United States Patent Application Publication US 2006/0134663 A1 - sequence listing, part 38

SEQ ID NO: 68255 - DNA, 2807 bp, Homo Sapiens
  misc_feature (1721)..(1745): n is a, c, g, or t
  misc_feature (2368)..(2513): n is a, c, g, or t
  misc_feature (2521)..(2536): n is a, c, g, or t
  misc_feature (2554)..(2605): n is a, c, g, or t
  misc_feature (2612)..(2738): n is a, c, g, or t
gggggggacaaagccgggaagaggaaaagctcggacctaccctgtggtcccgggtttctgcagagtctacttcagaagcggaggcactgggagtccggtttgggattgccaggctgtggttgtgagtctgagcttgtgagcggctgtggcgccccaactcttcgccagcatatcatcccggcaggcgataaactacattcagttgagtctgcaagactgggaggaactggggtgataagaaatctattcactgtcaaggtttattgaagtcaaaatgtccaaaaaaatcagtggcggttctgtggtagagatgcaaggagatgaaatgacacgaatcatttgggaattgattaaagagaaactcatttttccctacgtggaattggatctacatagctatgatttaggcatagagaatcgtgatgccaccaacgaccaagtcaccaaggatgctgcagaagctataaagaagcataatgttggcgtcaaatgtgccactatcactcctgatgagaagagggttgaggagttcaagttgaaacaaatgtggaaatcaccaaatggcaccatacgaaatattctgggtggcacggtcttcagagaagccattatctgcaaaaatatcccccggcttgtgagtggatgggtaaaacctatcatcataggtcgtcatgcttatggggatcaatacagagcaactgattttgttgttcctgggcctggaaaagtagagataacctacacaccaagtgacggaacccaaaaggtgacatacctggtacataactttgaaaaaagtggtgggtgttgccatggggatgtataatcaagataagtcaattgaagattttgcacacagttccttccaaatggctctgtctaagggttggcctttgtatctgagcaccaaaaacactattctgaagaaatatgatgggcgttttaaagacatctttcaggagatatatgacaagcagtacaagtcccagtttgaagctcaaaagatctggtatgagcataggctcatcgacgacatggtggcccaagctatgaaatcagagggaggcttcatctgggcctgtaaaaactatgatggtgacgtgcagtcggactctgtggcccaagggtatggctctctcggcatgatgaccagcgtgctggtttgtccagatggcaagacagtagaagcagaggctgcccacgggactgtaacccgtcactaccgcatgtaccagaaaggacaggagacgtccaccaatcccattgcttccatttttgcctggaccagagggttagcccacagagcaaagcttgataacaataaagagcttgccttctttgcaaatgctttggaagaagtctctattgagacaattgaggctggcttcatgaccaaggacttggctgcttgcattaaaggtttacccaatgtgcaacgttctgactacttgaatacatttgagttcatggataaacttggagaaaacttgaagatcaaactagctcaggccaaactttaagttcatacctgagctaagaaggataattgtcttttggtaactaggtctacaggtttacatttttctgtgttacactcaaggataaaggcaaaatcaattttgtaatttgtttaagaagccagagtttatcttttctataagtttacagcctttttcttatatatacagttattgccacctttgtgaacatggcaagggacnnnnnnnnnnnnnnnnnnnnnnnnnctagtaccagcctaggaattcggttagtactcatttgtattcactgtcactttttctcatgttctaattataaatgaccaaaatcaagattgctcaaaagggtaaatgatagccacagtattgctccctaaaatatgcataaagtagaaattcactgccttcccctcctgtccatgaccttgggcacagggaagttctggtgtcatagatatcccgttttgtgaggtagagctgtgcattaaacttgcacatgactggaacgaagtatgagtgcaactcaaatgtgttgaagatactgcagtcatttttgtaaagaccttgctgaatgtttccaatagactaaatactgtttaggccgcaggagagtttggaatccggaataaatactacctggaggtttgtcctctccatttttctctttctcctcctggcctggcctgaatattatactactctaaatagcatatttcatccaagtgcaataatgtaagctgaatcttttttggacttctgctggcctgttttatttcttttatataaatgtgatttctcagaaattgatattaaacactatcttatcttctcctgaactgttgattttaattaaaattaagtgctaattnnnnnnnnnnnnnnnnnnnnnnnnnnnnnnnnnnnnnnnnnnnnnnnnnnnnnnnnnnnnnnnnnnnnnnnnnnnnnnnnnnnnnnnnnnnnnnnnnnnnnnnnnnnnnnnnnnnnnnnnnnnnnnnnnnnnnnnnnnnnnnnnnnccgtgggnnnnnnnnnnnnnnnnaaaaaatttttaaaaccnnnnnnnnnnnnnnnnnnnnnnnnnnnnnnnnnnnnnnnnnnnnnnnnnnnncccaaannnnnnnnnnnnnnnnnnnnnnnnnnnnnnnnnnnnnnnnnnnnnnnnnnnnnnnnnnnnnnnnnnnnnnnnnnnnnnnnnnnnnnnnnnnnnnnnnnnnnnnnnnnnnnnnnnnnnnnnnnnnnnntgtttataaatatatttcccccccgcgggcgctttatggaaggaggggttgatttttttaaaattttcc

SEQ ID NO: 68256 - DNA, 1029 bp, Homo Sapiens
  misc_feature (461)..(933): n is a, c, g, or t
  misc_feature (938)..(938): n is a, c, g, or t
  misc_feature (977)..(977): n is a, c, g, or t
  misc_feature (995)..(995): n is a, c, g, or t
catgtctgtctctctgatcagtggaaaagtgaaaatttctagtatctagcactaacgtatgacccaactttgagggatcacaagctagaacaagttgaggatttaaaatcctggataattatatacttaaagctcatgagcataaagctcacttgaccatgcagaaatgctgggaagcagggtgcatggcatgggaatacatctccctgatctttgagagagcctctctggatattctttcagagcatgggccagggcaagaaaaatctagcttcatataatttgtctgggactatacaccctatataatgttagttttacagaagtaatatgacttttgattgctacataccacaaagagtttatgaactgagatcataaagggcaactgatgtgtgaagaaagtagtcagtacatcctggctcatgctctgaaagaatatccctcgtgccgaattcttnnnnnnnnnnnnnnnnnnnnnnnnnnnnnnnnnnnnnnnnnnnnnnnnnnnnnnnnnnnnnnnnnnnnnnnnnnnnnnnnnnnnnnnnnnnnnnnnnnnnnnnnnnnnnnnnnnnnnnnnnnnnnnnnnnnnnnnnnnnnnnnnnnnnnnnnnnnnnnnnnnnnnnnnnnnnnnnnnnnnnnnnnnnnnnnnnnnnnnnnnnnnnnnnnnnnnnnnnnnnnnnnnnnnnnnnnnnnnnnnnnnnnnnnnnnnnnnnnnnnnnnnnnnnnnnnnnnnnnnnnnnnnnnnnnnnnnnnnnnnnnnnnnnnnnnnnnnnnnnnnnnnnnnnnnnnnnnnnnnnnnnnnnnnnnnnnnnnnnnnnnnnnnnnnnnnnnnnnnnnnnnnnnnnnnnnnnnnnnnnnnnnnnnnnnnnnnnnnnnnnnnnnnnnnnnnnnnnnnnnnnnnnnnnnnnnnnnnnnnnnnnnnnnnnnnnncacanatcgacctcagtcagaggtgcgaaccggaaggactaaangaacaggcgttcccctgnagtccctcggcgtctcctgttcgacctgcgctac

SEQ ID NO: 68257 - DNA, 2952 bp, Homo Sapiens
  misc_feature (1045)..(1070): n is a, c, g, or t
tgaatacctgttgcccggtacttcccctacgaatgtggtttctgattgttggttaagttgcccgaggaaaataggccttacctggtaacattggacagagaagaaagcatggtcacactgggcaaggagtaagaagggattgggtaaaaagaaaatgggagagaaaagggaaaaaattttggcaagacaattgttccctgctaagaagctgcagggtgaaagctttcctttcttctatttttgtttttaatggtctgtctctctgatcagtggaaaagtgaaaatttctagtatctagcactaacgtatgacccaactttgagggatcacaagctagaacaagttgaggatttaaaatcctggataattatatacttaaagctcatgagcataaagctcacttgaccatgcagaaatgctgggaagcagggtgcatggcatgggaatacatctccctgatctttgagagagcctctctggatattctttcagagcatgagccaggatgtactgactactttcttcacacatcagttgccctttatgatctcagttcataaactctttgtggtatgtagcaatcaaaagtcatattacttctgtaaaactaacattatatagggtgtatagtcccagacaaattatatgaagctagatttttcttgccctggcccaatttatcattcctcctcctgcccacacctacctccctttaaatattttaggttgcagaagcacagctgaccagaaatttgctcttaaagataaatcctaaagatagaactcagtgctttatactgagtaatggctcaagaaattcgccttcagcacaagctgtatggtacacagctgatagaatttgctgttgtggctccagttcactgatgctatgaactacgggctagaaacagagggacttaacagggcttgagactagcatttctctagactcagcatccttagctccaaaggttcaaaagagaaattggtaacaactaaccactcaagcaattcctcagcattaacaccaaaaattctccttaannnnnnnnnnnnnnnnnnnnnnnnnnggacaacagaaataaatcctagaggacaaaattaaactcaatagagtgtagtctagttaaaaactcgaaaaatgagcaagtctggtgggagtggaggaagggctatactataaatccaagtgggcctcctgatcttaacaagccatgctcattatacacatctctgaactggacataccacctttacgcaggaaacagggcttggaacttctaagggaaattaacatgcaccacccacatctaacctacctgccgggtaggtaccatccctgcttctctgaagaagtgaaagagcactgatttcagcagctaagaaatgggctcttttaaggcgatttagacattgcagattgttccacagagaaggtaccttagcatttcctgttaataaggtacctaattaagactaaagtccccagaaatggtaaagaaagaatcacctttctgggctgggagagtaaaatccttctttagtgactagagtgaggaaccctgaacttctatttcatctaaagagccatgaagcaagttcctgtgtggtctgcagaacttggataatgagatgaaaaaacaagaatgaaattataggaaaaaaatcaagaggaaaggagtaagaagaaaataaaagttatcttaaaaaatatttctttagagtgtgtggttcaggtggactggtccttggtagtatggtccattagtatctgtaataattaggtttgaatggcccatttttgttgagtcccagatattttgcttggtcatctgtcagctctgtaaggtgggcatcaaatgatggcagatgcaagctggcaacgtattcatccattttcttaggaagcaagtacacatcctgcttgtatcgcccctcgggtgcattatagagttctatcagtgccaaagcctgtgttgtggctgtgatggacagaacaaaggtgggaactgtggagcagctcaaattgagtagacgaccctctgccaggaggacaactcgtttgccatctggccagatgacatggtccacctgagaacgtactcgctcccacgtcagctccggagtgcggaggctggtcacatcgatttctgtgttggagtggcccatattgcatacgatacaactgtttttcatgcgatccaagtgctcccgtgtcactacattcttatttcctgtgcaagttattacgacatcgacttgccggatgacttcatttagctttaccaccctgaacccatccatgcaggcctgcagagcacagatggggtcgatttcggtaatgtagacaattgctccaagagctttgagagcagcacagcagcccttgcctacctcaccatagccacacaccaccacttgtttcccaccaaacatcacatctgtggtcctcttcaggccatccaaaatggattctcggcagcagtacaagttatcaaacttctgtttggtaacagaatcattgacgttcatggccggaacacagagcttcccagctttggagagctgatacagcctgtgaacaccagtcacgctctcttccacaatgcctcggatcttcttaaacacgtttggatacttcttataaacccagtgggttaagtctcccccatcatccaggatcatgttggcctgccacccatccatgttcacacagcggtcaatacaccaccagaagtcatcttctgactcgcccttccaagcgaacactgcaactccagcctcagccagtgctgcagctacttcattctgagttgagtagatgttacaagcagaccagcggcactgagcccccagggcacagagtgtctcaatcaacaccgctgtctgggctgtgatgtgtgtacagcccactattttagcaccagccaagggcttctccccctgagcacg

SEQ ID NO: 68258 - DNA, 512 bp, Homo Sapiens
  misc_feature (298)..(329): n is a, c, g, or t
  misc_feature (351)..(426): n is a, c, g, or t
acatatatatacacacacttatttgcataaattttcctagttctgtctgctgaaatgccccaaagcaatgatatccagtatcagtgtgaatacctagtgccaattttagcttctaaatgacatacctactaaaagaaactaagaaactactatatactactactacatacctattaaagaaactccttggagaaactgctgattcctgggctgggcaaggaaaatacaagataagcctagagcattatcttgtcagaaaataacgaaatactaaaaaaatcagtgggatatattaaannnnnnnnnnnnnnnnnnnnnnnnnnnnnnnngaaatcaagagatcgagaccannnnnnnnnnnnnnnnnnnnnnnnnnnnnnnnnnnnnnnnnnnnnnnnnnnnnnnnnnnnnnnnnnnnnnnnnnnncaggtgaaagtttattgacagacaagattaaataataccccacaaattagttatcagttacaaagagaaaatggtaacctaccatg

SEQ ID NO: 68259 - DNA, 731 bp, Homo Sapiens
tcacagaagaggtgaaaaggggtgtagtaaaaccgtatctagattccaaacttctcatggaacatctggaccctgatgaagaagaagaagaaggggaggtttcagctagcacaaatgctcggaacaaagcaattacctcactgcttggaggaggcagccctaaaaataatacagcagcagagacagaagatgatgaaagtgatggggaggatagaggaggaggcacttcaggggtgaggcggaggaggagtcaacgtatttcgcagcgtattacgtaaaatgatttttatgtgcttatatatgtcagtctattaaatgtacaccaagtaatgtaatacttaaaagagaaaacattttgtagatagagattctctacttacccgtttatacatccttttgtagaaagtttaacataaaagacaataaaaaaacagaaatgagatttatccagcataaagggttaatttttctttgaattgtattaatgtgtgttatttttattgttgctaagttttatgtagctatatggttcatatgtatatataattttatatatcaataagagtaaagacacgggtacaaattaagagttatatggttttacaagtatatgttaaccccttggcgctggcggtcacggtgcgtctcattgccggcaatggaagtgtgccgggaaatcccaactcccggcgtcaagggattaaaagcaataaaaacaataatttcactaa

SEQ ID NO: 68260 - DNA, 580 bp, Homo Sapiens
ggggcgcggtcgctcagcagtgacgtgacacgcagcccacggtctgtactgacgcgccctcgcttcttcctctttctcgactccatcttcgcggtagctgggaccgccgttcagtcgccaatatgcagctctttgtccgcgcccaggagctacacaccttcgaggtgaccggccaggaaacggtcgcccagatcaaggctcatgtagcctcactggagggcattgccccggaagatcaagtcgtgctcctggcaggcgcgcccctggaggatgaggccactctgggccagtgcggggtggaggccctgactaccctggaagtagcaggccgcatgcttggaggtaaagtccatggttccctggcccgtgctggaaaagtgagaggtcagactcctaaggtggccaaacaggagaagaagaagaagaagacaggtcgggctaagcggcggatgcagtacaaccggcgctttgtcaacgttgtgcccacctttggcaagaagaagggccccaatgccaactcttaagtcttttgtaattctggctttctctaataaaaaagccacttagttcagtcaaaaaa

SEQ ID NO: 68261 - DNA, 176 bp, Homo Sapiens
tactactactactatacggctgcgagaagacgacagaagggctaagcggcggatgcagtacaaccggcgctttgtcaacgttgtgcccacctttggcaagaagaagggccccaatgccaactcttaagtcttttgtaattctggctttctctaataaaaaagccacttagttcagt

SEQ ID NO: 68262 - DNA, 1013 bp, Homo Sapiens
aagagtatccaacttcaagggaatctccgcatttcaatgaaaggaggaagagtgtgctgataaacctaccagcacctattgagcaatgtctattatagtaattttgcatacatttttatttaagggaaaaaatataggtattgtgaaatattttgctaatcttatagaaaaggaaaaaatcccgttatttaaagggaaaagtaaatttaacagttgccttttttcttaatgtcagggcagatcttattttacagtacagtgggggaaatagaaacatgtgaaaggcaaaaggcaggctcctaaattaatgtcagtgaagttcagggtgggcaaatgagtgtgtgtgaggtataggaaatgctgatgacttctttaatgcttgaagtccgttcacaggtatctagccctagaatgcctagaacaggaagaggcagctggtgttctgcaaaacttggacaggggcaaagttgctgaaaaagttttggtttaacccgaagataagtggaaaagagcttgtccatgaacccaggttctcactctgtttacagaagtgtgttgagtacagttggtgaaggaagaggtaacaaaaaatgctaaatattttatccatgaaaatgacttccagaaaaggaagaatatgaaccccagaccgaaggggaaaagatagttaatagtattatctaacctggttggtatttgtaatgaatggtgattttaattagtcattagccataatgatgtttatttacagtataactcctgaatgctacttaaataaaccaggattcaaactgcaagccagccaggccgttcattatttaaaacgttttaatcggggcttccgggtagaaggtggagcggcagggtgtaattgggttgatgggtgggacctgtcttgaccatcggagttttataatcgagggccaggagggcccgggttgctctcctggttatgtatgtacttgtacataaccacctaaagaatggtgaaataaatgttcttggaaattcct

SEQ ID NO: 68263 - DNA, 1164 bp, Homo Sapiens
  misc_feature (548)..(548): n is a, c, g, or t
  misc_feature (595)..(595): n is a, c, g, or t
aatttaccagttcccaaaccagaagtttcttcagtccctgatcagaacagagaagagcccagaggctcatcaggacttgtaaacagcagacagaagagctatgcccactcaaggcaccatcatgggagcagcattgctggaggaatggtgaagggggctttgtctgttgctgcctctgcaaacaaggccctgtttgatgggccaccagtcactgcacagccaataatttctgaagatcagacagcagccctgatggcccatctctttgaaatgggattctgtgacaggcagctgaacctacggctgctgaagaaacacaattacaatatcctgcaggttgtgacagaacttcttcagttaaacaacaacgactggtacagccaacgctattgaggagtgaccttgtattaaataactgcctgctgctcagagatgatctttattctgtcattggggtatgggatagaagcccctgcttatttttaaacttgatgaatctgtatagagcccatcgttgagttaccaagacaatacctgctacagtattntggggagcaaactaaagaccagaacttaaattttcactttagacatnggatgaatagtatgaagacagtttttcagttgatttggataaaactattttagtgcattgacaagtgtaacttcaacttcatatagaaccatttttctttctgcttttattgaaactgagtatttttctttggctaatgtggatttttttatggggatatctgttaattttcaggtttcgaaagacattaacctcggaacgtgtttttaagaattattctcataattcttattctcataatttctgtaatccacctcaagcttcatagttatctggcattgaaataacacccagagcatgatagaaatgtcgttactcttcctctctcaaggagaaagtaattttcctgcaatacttaataattggcaccgttgctttctaaagactccatggtgcattcaagaagtatccaacttcaaggggaatctccggcattttcaatggaaaggaggaagaagtgtgctgataaaccaacaagcacctatggagcaatgtctattatagtaattttggataaatttgatttaagggaaaaatattggtatgggaaaaattggtaatctattgaa

SEQ ID NO: 68264 - DNA, 967 bp, Homo Sapiens
  misc_feature (83)..(117): n is a, c, g, or t
  misc_feature (897)..(905): n is a, c, g, or t
aaacttgaaatcacctatagggcgctagctcggcttagccgaacgaccgagcgcagcgaagtagtgagcgaggaagcggccgnnnnnnnnnnnnnnnnnnnnnnnnnnnnnnnnnnncagtcgacggtaccggacatatgcccgggaattcggccattacggccgggggaaaaacaaatgaatcaaggactgtgtcacaatttctttgcataagtttctgaaggaaagcccaaaagaggatttcctcttcacatcttacgaagtatgagggaatattcactaactttcagtgaggcttcatgtgcgcaggtaaagaaacaattttgtgtctgtgtctatggactgtcttttcatttgggtcttctagacctgtgcagaatctcaggactatcctggcaaggtactgagggtatcattaccttgtaagttcaagggctggcacacaagctcctggtttataagaaaaacttcctctgtattccttggcaaagataaagtcttgtatgctggcctttccttccagaagcttcatacattgtcgctgaacatactgtttaattagacttatatctctcgtttcaaatagcagctttagagaacgctcaagtatcttaaaacaaaaaagatatgcaagtaaagataaaatatctcctagtatgtttcaccattgttattacactttcaattatgtaactactgggtaacctgctaacctacctaaataatctgttacttacaatgatgggataataaaattattacaaaattgacagttatttgagactttagagagctttgctatttctaaaaatagaatatcatgtgtttaaggaaaaccatgtgggaatgactgcaaattacattgtcctgtgataagcaacataaaacacgttaagnnnnnnnnnaaatagtcaaagccctaggtaagaaaacgaaagattcttgtttggttttttttacatttaag

SEQ ID NO: 68265 - DNA, 1049 bp, Homo Sapiens
ggtccggaattccttccaatcgtcgacccacgcgtccggtttgcggagcgcagcagccatggcaagccgtctcctgctcaacaacggcgccaagatgcccatcctggggttgggtacctggaagtcccctccagggcaggtgactgaggccgtgaaggtggccattgacgtcgggtaccgccacatcgactgtgcccatgtgtaccagaatgagaatgaggtgggggtggccattcaggagaagctcagggagcaggtggtgaagcgtgaggagctcttcatcgtcagcaagctgtggtgcacgtaccatgagaagggcctggtgaaaggagcctgccagaagacactcagcgacctgaagctggactacctggacctctaccttattcactggccgactggctttaagcctgggaaggaatttttcccattggatgagtcgggcaatgtggttcccagtgacaccaacattctggacacgtgggcggccatggaagagctggtggatgaagggctggtgaaagctattggcatctccaacttcaaccatctccaggtggagatgatcttaaacaaacctggcttgaagtataagcctgcagttaaccagattgagtgccacccatatctcactcaggagaagttaatccagtactgccagtccaaaggcatcgtggtgaccgcctacagccccctcggctctcctgacaggccctgggccaagcccgaggacccttctctcctggaggatcccaggatcaaggcgatcgcagccaagcacaataaaactacagcccaggtcctgatccgggttccccatgcagaggaaccttgggtgggtgatcccccaaagtcttgtgacaccaggaacccattggctgaaaaacttttaagggcctttgacttttaaccttgaacagcccaggaattatgacccccctttaccttcagctacaacacggggaacctgggaaggggtcctggtggccctttggtttgaagctggtacccctctccccaccagggaatttaacccccctttccctttg

SEQ ID NO: 68266 - DNA, 1384 bp, Homo Sapiens
  misc_feature (20)..(20): n is a, c, g, or t
tattaattactccagaacanaaacaaagaggctggtccggtccggattcccgggatatcgtcgacccacgcgtccgggtctggggagcgcagcagccatggcaagccgtctcctgctcaacaacggcgccaagatgcccatcctggggttgggtacctggaagtcccctccagggcaggtgactgaggccgtgaaggtggccattgacgtcgggtaccgccacatcgactgtgcccatgtgtaccagaatgagaatgaggtgggggtggccattcaggagaagctcagggagcaggtggtgaagcgtgaggagctcttcatcgtcagcaagctgtggtgcacgtaccatgagaagggcctggtgaaaggagcctgccagaagacactcagcgacctgaagctggactacctggacctctaccttattcactggccgactggctttaagcctgggaaagaatttttcccattggatgagtcgggcaatgtggttccccagtgacaccaacatttctggacacgtgggcggccatggaaaagcctggtggatgaagggctggtgaaagctattggcatctcccaacttcaaccaatctccaggtggagatgatcttaaacaaacctgggttgaagtataagccttgcagttaacccagattgagtggccaccccatatctcacctaaggagaatttaatcccagtactgcccagtccaaaaggcatcgttgggtgacccgccctaacagccccccttccgggttctccttgaaagggcccctgggccacaagccccgaggaacccctttccttcttccctggcaatgaatccccaggtattcaaaggccgatcgcccagccaaaggccacaattaacaacttaccagccccaagggtccctggaatcccgggttccccccatggcgaagaagggaacatttggctgggggtatacccccccaagtgcttgtggtacacctcaaaaaacccctttgacttggcagaaacttttcggaggttcgtttgtgaatttttgtaaacctggaggccaactctcaggatatatgtgtcaccacccttttcacttcagccgctaacaaccaggggcaacatgggtgagggggacactgagtgccccctctttttatagcttgtgtcacctctccccgatcaatgagcgcttctccccacctcttcccctgtatacagctgtccttttgaaaatccttttcgcggtgttgcccctatggtccccaacgcccccataggagccccctcttctaaccccgggggggttctttctcgcccccacaaatcttgtttactctccggggccaacaggcataacactttggcccctggtggtttcccatgtcccccccatgt

SEQ ID NO: 68267 - DNA, 970 bp, Homo Sapiens
  misc_feature (72)..(72): n is a, c, g, or t
tttgagccaacgctcgccccatatcccccggcccgctccaggtgccaaacgttaccacgccctttaaaacgntttccatgcaatgccgttccttggtgtcacagtacctcgcgggatcacccaccaagtttcctctgcatggggaaaccggaatcagcgacctgggctgtagttttatggggctcggccgcgatcgcttggatccggggatcctccaggagagaagggtcctcgggcttggcccagggcctgtcaggagagccgagggggctgtaggcggtcaccacgatgcctttggactggcagtactggattaacttctcctgagtgagatatgggcggcactcaatccggtcaactgcaggcttatactacaagccaggtttctttaagatcatctccacctggagatggttgaagctggagatgccaatagctttcaccagcccttcatccaccagctcttccacggccgcccacgtgtccagaatcttggtgtcactgggaaccacattgcccgactcatccaatgggaaaaattccttcccaggcttaaagccagtcggccagtgaataaggtagaggtccaggtagtccagcttcaggtcgctgagtgtcttctggcaggctcctctcaccaggcccttctcatggtacgtgcaccacagcttgctgacgatgaagagctcctcacgcttcaccacctgctccctgagcttctcctgaatggccacccccacctcattctcattctggtacacatgggcacagtcgatgtggcggtacccgacgtcaatggccaccttcacggcctcagtcacctgccctggaggggacttccaggtacccaaccccaggatgggcatctgcgcgccgttgttgagcaggagacggcttcccatggctgctgcgctccggacgcggggtcgacgatatcccgaaaactccgcaccggtaccagccgcttttt

SEQ ID NO: 68268 - DNA, 948 bp, Homo Sapiens
ctggtaccggtccggaattcccgggatatcgtcgacccacgcgtccggcagcagccatggcaagccgtctcctgctcaacaacggcgccaagatgcccatcctggggttgggtacctggaagtcccctccagggcaggtgactgaggccgtgaaggtggccattgacgtcgggtaccgccacatcgactgtgcccatgtgtaccagaatgagaatgaggtgggggtggccattcaggagaagctcagggagcaggtggtgaagcgtgaggagctcttcatcgtcagcaagctgtggtgcacgtaccatgagaagggcctggtgaaaggagcctgccagaagacactcagcgacctgaagctggactacctggacctctaccttattcactggccgactggctttaagcctgggaaggaatttttcccattggatgagtcgggcaatgtggttcccagtgacaccaacattctggacacgtgggcggccatggaagagctggtggatgaagggctggtgaaagctattggcatctccaacttcaaccatctccaggtggagatgatcttaaacaaacctggcttgaagtataagcctgcagttaaccagattgagtgccacccatatctcactcaggagaagttaatccagtactgccagtccaaaggcatcgtggtgaccgcctacagccccctcggctctcctgacaggccctggggccagccccaagacccttctctcctgggagatcccaggaatcaaggcgatcgcagccaagcacaataaaactacagccccagtcctgatccgggttccccatgcagaggaaacttggtggggatccccaggtctgggacaccagaaacgccttgctgaaaaactttaaggtctttgactttgaaactgagcagcccgggatatgaccacccttactccgctacaacaggaa

SEQ ID NO: 68269 - DNA, 2298 bp, Homo Sapiens
  misc_feature (1451)..(1539): n is a, c, g, or t
  misc_feature (2166)..(2166): n is a, c, g, or t
ggaagcatggtatcaacgcagagtggccattacgccgggggccgacctcacgggctatttaaaggtacgcgccgcggccaaggccgcaccgtactgggcgggggtctggggagcgcagcagccatggcaagccgtctcctgctcaacaacggcgccaagatgcccatcctggggttgggtacctggaagtcccctccagggcaggtgactgaggccgtgaaggtggccattgacgtcgggtaccgccacatcgactgtgcccatgtgtaccagaatgagaatgaggtgggggtggccattcaggagaagctcagggagcaggtggtgaagcgtgaggagctcttcatcgtcagcaagctgtggtgcacgtaccatgagaagggcctggtgaaaggagcctgccagaagacactcagcgacctgaagctggactacctggacctctaccttattcactggccgactggctttaagcctgggaaggaatttttcccattggatgagtcgggcaatgtggttcccagtgacaccaacattctggacacgtgggcggccatggaagagctggtggatgaagggctggtgaaagctattggcatctccaacttcaaccatctccaggtggagatgatcttaaacaaacctggcttgaagtataagcctgcagttaaccagattgagtgccacccatatctcactcaggagaagttaatccagtactgccagtccaaaggcatcgtggtgaccgcctacagccccctcggctctcctgacaggccctgggccaagcccgaggacccttctctcctggaggatcccaggatcaaggcgatcgcagccaagcacaataaaactacagcccaggtcctgatccggttccccatgcagaggaacttggtggtgatccccaagtctgtgacaccagaacgcattgctgagaactttaaggtctttgactttgaactgagcagccaggatatgaccaccttactcagctacaacaggaactggagggtctgtgccttgttgagctgtacctcccacaaggattaccccttccatgaagagttttgaagctgtggttgcctgctcgtccccaagtgacctatacctgtgtttcttgcctcatttttttccttgcaaatgtagtatggcctgtgtcactcagcagtgggacagcaacctgtagagtggccagcgagggcgtgtctagcttgatgttggatctcaagagccctgtcagtagagtagaagtctcttccagtttgctttgcccttctttctaccctgctggggaaagtacaacctgaatacccttttctgaccaaagagaagcaaaatctaccaggtcaaaatagtgccactaacggttgagttttgactgcttggaactggaatcctttcagcaagacttctctttgcctcaaataaaaagtgcttttgtgagcccnnnnnnnnnnnnnnnnnnnnnnnnnnnnnnnnnnnnnnnnnnnnnnnnnnnnnnnnnnnnnnnnnnnnnnnnnnnnnnnnnnnnnnnnnggaacaacagagcaaaatacaataaaggcgcagacaacccaagggcacacacccgcacgacaatgacagaacacatccacaccccatacccctccagcattgcagactacctcctgtcccccgaggagcacagaggcgcatcaaaacagccgaaacgcaggcaagggtctggcacgcgacgagaagagcgcgccgggacagtacattcccccacgaagccgcgacagattgagcggacccgaactgacgaaaccgacgccaccggcaaacccatggacaccaacaccaagacagccgtaagaacaccactaaaaaaactaaccgagcgacaaccaatacaatgactcacgacacgcaactatgcaatcagtccgcggcattagtgcgccagatatacccgtaccccactcaaacggatattctccgccactcaacgacgcacacccgcgcaccacggagaagtgtcgagcagagaggaacccatctctgcgcagaaaccgggacgcacaccgaggcggcgataacccctatgcgctaccccatagtataaggcaccagctacgtcaagcgaccacagctgcgctagagagtgctccatctcaacagacgccacatcgatgcaggccnccaagccacgaatcccgctcgggtcgaatggagtccacgccccatccgcacgctacactataagacctacctggactcggtcacaagacacgaacaccgtagcacatagcacaaccagccaatccaccaaaa

SEQ ID NO: 68270 - DNA, 916 bp, Homo Sapiens
caaaagacccacaaaacaacagtgtgcctatagacccgtggtttcacaaaagcaggctggtaccggtccggaatttcccagggatatcgtcgaacacaagcgtccggggagcgcagcaaccatggcaagccgtactccatgctcaacaacggcgccaagatgcccatcctgggtgttgggtacctgtgaagtccccatccagggcaggtgactgaggccgtgaaggtggacattgacgtcgggtaccgccacatcgactgtgcccatgtgtaccagaatgagaatgaggtgggggtggccattcaggagaagctcagggagcaggtggtgaagcgtgaggagctcttcatcgtcagcaagctgtggtgcacgtaccatgagaagggcctggtgaaaggagcctgccagaagacactcagcgacctgaagctggactacctggacctctaccttattcactggccgactggctttaagcctgggaaggaatttttcccattggactgagtcgggcaatgtggttcccagtgacaccaacattctggacacgtgggcggcatggaagagctggtggatgaagggctggtgaaagctatggcatctccaacttcaatcatctccaggtggagatgatcttaaaacaaacctggcttgaagtataagcctgcagttaaccagattgagtgccacccatatctcactcaggagaacgtcaaatccagttactggccagtccaaaggcatcgtggttgactgctacaggccccctcggctctcctgaccaggccctgggccaagccgaggaccttttctcctggaaggatccaggatcaggcgatcgcagccaagcacaataaactacagccggtctgaccggtcccatgagagaactggtgtgtcccagttgtgcaccgac

SEQ ID NO: 68271 - DNA, 1906 bp, Homo Sapiens
  misc_feature (1367)..(1429): n is a, c, g, or t
  misc_feature (1706)..(1719): n is a, c, g, or t
gggtccggaattcccgggatcgcctaccgggggcttctctcaccgggactcgggactcccgggaagtggaccggcagaagagggggctagctagctgtctctgcggaccagggagacccccgcgcccccccggtgtgaggcggcctcacagggccgggtgggctggcgagccgacgcggcggcggaggaggctgtgaggagtgtgtggaacaggacccgggacagaggaaccatggctccgcagaacctgagcaccttttgcctgttgctgctatacctcatcggggcggtgattgccggacgagatttctataagatcttgggggtgcctcgaagtgcctctataaaggatattaaaaaggcctataggaaactagccctgcagcttcatcccgaccggaaccctgatgatccacaagcccaggagaaattccaggatctgggtgctgcttatgaggttctgtcagatagtgagaaacggaaacagtacgatacttatggtgaagaaggattaaaagatggtcatcagagctcccatggagacattttttcacacttctttggggattctggtttcatgtttggaggaacccctcgtcagcaagacagaaatattccaagaggaagtgatattattgtagatctagaagtcactttggaagaagtatatgcaggaaattttgtggaagtagttagaaacaaacctgtggcaaggcaggctcctggcaaacggaagtgcaattgtcggcaagagatgcggaccacccagctgggccctgggcgcttccaaatgacccaggaggtggtctgcgacgaatgccctaatgtcaaactagtgaatgaagaacgaacgctggaagtagaaatagagcctggggtgagagacggcatggagtacccctttattggagaaggtgagcctcacgtggatggggagcctggagatttacggttccgaatcaaagttgtcaagcacccaatatttgaaaggagaggagatgatttgtacacaaatgtgacaatctcattagttgagtcactggttggctttgagatggatattactcacttggatggtcacaaggtacatatttcccgggataagatcaccaggccaggagcgaagctatggaagaaaggggaagggctccccaactttgacaacaacaatatcaagggctctttgataatcacttttgatgtggattttccaaaagaacagttaacagaggaagcgagagaaggtatcaaacagctactgaaacaagggtcagtgcagaaggtatacaatggactgcaaggatattgagagtgaataaaattggactttgtttaaaataagtgaataagcgatatttattatctgnnnnnnnnnnnnnnnnnnnnnnnnnnnnnnnnnnnnnnnnnnnnnnnnnnnnnnnnnnnnnnntctaatgatcatcatgaaatgaataagagggcttaagaatttgtccattttgcattcggaaaagaattgaccaggcaaaaaggtttactattacctctcccctttggggatttaatgtctggttgctgcgcctgagtttcacgacaataagctgcaagaggactcccggagcacaagaaaccacattatagagggggtggcgttgttagcaatttctttcaaatgcaactggagaggtcccggtctttaaaattaccatctggtggtactttttggnnnnnnnnnnnnnnctattaccaacaaaaactgttttgggccgcctcgggccctgagaaagttttctaaaaccattccgtgtgtggccggggccccatgtgtattcgaacatggggccaaacgtctccccaggaaacgctggccgaaaaggcgcggggtctcccccataaaaacggcgggggacccgagcctttgacaacc

SEQ ID NO: 68272 - DNA, 710 bp, Homo Sapiens
  misc_feature (627)..(656): n is a, c, g, or t
gttcctaaacaaaccaaaggctttctaaccatgaggtcaactgaaatgatatacatgaaaggtgctttctaaacagtaaagtgtccatatcagattattattcccaaattaaatgagagaaatatacttcaaggacaattagatctttgtgtaaccttcattcatggaccccaatcaaccattcagtttcttccaagctcctttctagcagatgccgtatgtgtaattgggcatggggactggatctatatcactcttttgcatgcgtgtgcatccatcttgcttgatgggaggacaacccaaatagctcacagaagaaacaggagtcatgaaaaaaataacaacaaaatgtatttaaaaacagacttctccagttggcattttgaatgaaattgctaacaactccaaccctctatattgtgtttcttttgctcctggagtcctcttgcagctttaattcttgaaactcaggcggcagcaccagacattaaatccccaaagggagaggtattagtaaaccttttgctggtcattcttttccgaatgcaaatggacaaattcttaagccctcttattcatttcatgatgatcattagataaaaaaattaagcctaacttgcatattgnnnnnnnnnnnnnnnnnnnnnnnnnnnnnnccttcccggccgtaatggccgaattcccgggcatatgtccggtaccgtcgactg

SEQ ID NO: 68273 - DNA, 1020 bp, Homo Sapiens
  misc_feature (20)..(20): n is a, c, g, or t
  misc_feature (34)..(34): n is a, c, g, or t
  misc_feature (117)..(117): n is a, c, g, or t
agaagagctgtgtcttctcnagatggtataattntgctgcaatgcaggatattaatgctgccatgaagatcagtactacagcagaatcttaacaaatcgtggggtgattcatgagtntatgggccacaaacagaatgcaatgaaagactaccaagatgcaattactctaaaccccaagtactcgctggcttactttaatgcaggaaatatctactttcaccacaggcagttttcccaggccagtgactacttctcaaaagctttaaaatttgatccagaaaatgaatatgttctcatgaatcgagctattacaaatacaatattaaagaaatatgaagaagcaaaagaagattttgcaaatgtaattgaaagctgtcccttttgggctgcagtatattttaatagagcacatttctactactgcttaaagcaatatgaactagctgaggaagaccttaataaagccctgtctttgaagcctaatgatgctctagtatataattttagagcaaaagttcgtggtaaaataggtctgattgaggaagctatggctgactataaccaagcacttgatcttgaagactatgcctcagttatatgattacatagactgtggttgctatagtagtttacacagctgttctctctgaaacggaaacatatttgttgtctaaaaggttctaccattttcattattgtattcgttatgcttagtcttccatataaccttctatgcattttaataaaatgtttgttatacattaattataaaacatatatcatttgctgcatatttggaataccttgagaactgaatttttccaaggttgcagaatctcaaggaaaatgtttcttaaggaattaaataggaatgtctcttaacatttaaaatattttctttaattccttttcaaataatactatacattgtagaaaaagtgtcattgaccttttcatcagtccttgctgacaatgtattaaacagtatacagattaaaaaataaacaaaccgatgactat

SEQ ID NO: 68274 - DNA, 421 bp, Homo Sapiens
  misc_feature (84)..(147): n is a, c, g, or t
ggcacgaggcgcaggcagccacaaataaagcaagagcctgagaggcgcaggcagccacaaataaagcaagagccagaatcagannnnnnnnnnnnnnnnnnnnnnnnnnnnnnnnnnnnnnnnnnnnnnnnnnnnnnnnnnnnnnnngagccagagcaaaagccttgtctgaaacctactctgaggcccatcagctctgctccatctgtttcctctgccagtggcaatgcaacacctaacactcctggggatgagtctccctgtggtattattattcctcatgaaaactcaccagatcaacagcaacctgaggagcataggccaaaaataggactaagtcttaaactgggtacgttagcatttccttccttctttattttcttcccttcacccctgcaaatacctgtattgtgctttaaag

SEQ ID NO: 68275 - DNA, 1069 bp, Homo Sapiens
  misc_feature (43)..(43): n is a, c, g, or t
  misc_feature (133)..(133): n is a, c, g, or t
  misc_feature (296)..(296): n is a, c, g, or t
cactgactgatagaattatagatcattaggaattgccctgagnccagattcgcacaagtgacccaaggaatctcacttacagaagattgtgaagatactacaaggaatccgcagatgtgcagtcagcgacagnacatgaacacacacgtggcagagattccccggcgcacacgactccttgaacaccctcgtggcactccaccagctgtaccaatacacgcagaagtactatgacgagatcatcaatgccttggaggagaatcctgccgcccagaagatgcagctgcccttccgcntgcagcagattgccgctgcactggagaacaaggtcactgacctctgacctacaatctccagtgctgccttgggacataggtacctgaggtacctgagagcccctcaggggaggaggccgagtggctgtggctgaggcccccaccctcccctggaacgcgccccaagccggagtgggtgcagccggaacccgcccagcgtctagactgtagcatcttcctctgagcaataccgccgggcaccgcaccagcaccagccccagccccagctccctccggccgcagaaccagcatcgggtgttcactgtcgagtctcgagtgatttgaaaatgtgccttacgctgccacgctgggggcagctggcctccgcctccgcccacgcaccagcagccgcctccatgccctaggttgggcccctgggggatctgagggcctgtggcccccagggcaagttcccagatcctatgtctgtctgtccaccacgagatgggaggaggagaaaaagcggtacgatgccttcctgacctcaccggcctccccaagggtgccggcactctgggtggactcacggctgctgggccccacgtcaaaggtcaagtgagacgtaggtcaagtcctacgtcggggcccagacatcctggggtcctggtctgtcagacaggctgccctagagccccacccagtccggggggactgggagcagttccaagaccaccccacccctttttgtaaatcttgttcattgtaaatcaaatacagcgtctttttcaaaaaaa

SEQ ID NO: 68276 - DNA, 1596 bp, Homo Sapiens
  misc_feature (41)..(75): n is a, c, g, or t
  misc_feature (305)..(305): n is a, c, g, or t
  misc_feature (683)..(722): n is a, c, g, or t
  misc_feature (1130)..(1143): n is a, c, g, or t
aacgacgagcgcagcgagtgatgtgagcgaggaagcggcgnnnnnnnnnnnnnnnnnnnnnnnnnnnnnnnnnnncagtcgacggtaccggacatatgcccgggaattcggccattacggccggggaaaacaccagtcataaactattaccacccccactctcttttgatcagaaatggcaagcccttgtgaaggcatggagtttaaaattggaatgcaaaaattagcagacaatccattcctactgtatttctgtatgaatgtgtttgtgaatgtatgtgtaaaagtctttcttttccctaatnttgcttggtggggtccttaaaacatttcccaactaaagaatagaattgtaaaggaaaagtggtactgttccaacctgaaatgtctgttataattaggttattagtttcccagagcatggtgttctcgtgtcgtgagcaatgtggtttgctaactggatggggttttcttattaataagatggctgcttcagcttctcttttaaaggaatgtggatcatagtgatttttccttttaattttattgctcagaaatgaggcatatcctaaaaatcctggagagctgtatttaatggcatttttgcactaattggtccttagtttaattctattgtatctgtttatttaacaaaaaattcatcataccaaaaagtgtaagtnnnnnnnnnnnnnnnnnnnnnnnnnnnnnnnnnnnnnnnnttaggcaaattgacagacagtgagagttttacaaacatgataggtattctgctcggcaatttgtaagtttacatgttatttaaggataaaggtaaatcattcaaggcagttaccaaccactaactatttgttttcatttttgtcttgtagaaggtttatatcttgttttaccttggctcattagtgtttaaaaatgtactgatgatgtgcttagagaaattcctggggctttcttcgttgtagatcagaatttcaccagggagtaaaattacctgaaaacgtaagaagttttaaacagcttttcacacaaattagatgcaactgttcccatgtctgagtacttatttaaaagaaaggtaaagattggcctgttagaaaaagcataatgtgagctttggattactggannnnnnnnnnnnnnaaacacacctggagaggacatttgaaaacactgttcttaccctcgaaccctgatgtggttccattatgtaaatatttcaaatattaaaaatgtatatatttgatcctggggactcatattctttcagaatcatgtaaataaatggcatcatgttgtaattgtgtggtgcatactagaaaagttaaaaatatgggctgaactttttatggacttgatttttatgactattggtatctaaaggtcaaggaagccatttacattattttggatgaatctactatacatctatggaaatgtctcttttattttaaattctggtttctcaacggaaaatttcagaaaagatgccccttgccattttcgttaattattcagtcttttcttagacacacccccagcctaagaccttgttcgaggagtttatagtgtctgtcttttcttaacatactgcac

SEQ ID NO: 68277 - DNA, 1059 bp, Homo Sapiens
  misc_feature (95)..(145): n is a, c, g, or t
  misc_feature (225)..(307): n is a, c, g, or t
  misc_feature (456)..(535): n is a, c, g, or t
  misc_feature (779)..(828): n is a, c, g, or t
cagtcgacggtaccggacatatgcccgggaattcggccattacggccgggcgggagcgggaacgagaacgggatagggaccgtgaccggacaaannnnnnnnnnnnnnnnnnnnnnnnnnnnnnnnnnnnnnnnnnnnnnnnnnnaaggagctcagatcgtaataaggatcgcagtcgatcaagagaaaaaagcagagatcgtgaaagggaacgagagcgggaannnnnnnnnnnnnnnnnnnnnnnnnnnnnnnnnnnnnnnnnnnnnnnnnnnnnnnnnnnnnnnnnnnnnnnnnnnnnnnnnnnaaaagacaaaaaacgggaccgagaagaagatgaagaagatgcatacgaacgaagaaaacttgaaagaaaactccgagagaaagaagctgcttatcaagagcgccttaagaattgggaaatcagagaacgaaagaaaacccgggaatatnnnnnnnnnnnnnnnnnnnnnnnnnnnnnnnnnnnnnnnnnnnnnnnnnnnnnnnnnnnnnnnnnnnnnnnnnnnnnnnnctatgatgatgatagagatgaccccaaatattacagaggaagtgctcttcagaaaaggttgcgtgatagagaaaaggaaatggaagcagatgaacgagataggaagagagagaaggaggagcttgaggaaatcaggcagcgccttctggcagaaagccatccagatccagatgcagagctccagaggatggaacaagaggctgaaaggccgcaggcagccacaaataaagcaagagccagaatnnnnnnnnnnnnnnnnnnnnnnnnnnnnnnnnnnnnnnnnnnnnnnnnnncccatggaagaggaagaggagccagagcaaaagccttgtctgaaacctactctgaggcccatcagctctgctccatctgtttcctctgccagtggcaatgcaacacctaacactcctggggatgagtctccctgtggtattattagtcctcatgaaaactcaccagatcaagagcgccttaagaattgggaaatcagagaacgaaagaaaactcgggaatatgagaaagaa

SEQ ID NO: 68278 - DNA, 1293 bp, Homo Sapiens
  misc_feature (40)..(40): n is a, c, g, or t
ggagctgggcctggggctggtgctgggtgcggtgcccggncggtattgctcagagggaggatgttacagtctagacgctgggcgggttccgggctggcaccccactccgggcttgggggcgcgttcccagggaaggggtggggggcctcagcccacaggccactcggccttccttcccctgagggggctctcaggtacctcaggtacctatgtcccaaggcagcactggagattgtaggtcagaggtcagtgaccttgttctccagtgcagcggcaatctgctgcaggcggaaggccagctgcatcttctgggcggcaggatcctcctccaaggcattgatgatctcgtcatagtacttctgcgtgtattggtagagctggtggagtgccacgagggtgttcaaggagtccgtgtgcgcccgggaaatctctgccaggtgtgtgttcatgtcctggtcgctgacctgcaccatctgccggatccccttgtagtaatcctccaccatcttcttgtaggtggagatctccttggcgtacagcagcttgttgctgggagaatcgcggctcagcttatgctccgtgcgcgtgcaggcatccatgaaggtctgcgcgatgactgacagcgaggcgtccaccacctcgtggacatgcacgtcaaagatgaagtgggggttcttgaggatgttcacccagaaccggagcggtaaactgttcgtcttccagatgtggatggtgtcttcatcctggatgttgtgcttctctgcctgctcgtccaggaagtcgaagaagtacttgactgcaggtggcaccgcgtgcccaggcgccagcacgctctggaagaagttgtccacaaactgctgcagtgtgcccttgactgagagcagccgcgtcaggtagatctcggtgatggccttcgtccgctccttctctttcacgctgcctctcttggacttgccctcgtccacctcgtcggtcggccgcaccaggtgccacacccggttctcctcctccaggagggcatggcgctccccaggcaggtcctgctggctgtcctccggctgctgggagacccccaccttggacaggatgagggtggctccatcccggacattgtagtgcataagggtgttgacgcgcttccaccggccctcccgctgtgacgtcaggtccaggtccgacaggatctgcgctgtggagcccggacgccactccaggaccacgctgtctggcctgggccagcaggagcagggctgcccacggtacacctggtcaatgatcttctccttgacctcc

SEQ ID NO: 68279 - DNA, 1636 bp, Homo Sapiens
  misc_feature (818)..(827): n is a, c, g, or t
agccagagcaaaagccttgtctgaaacctactctgaggcccatcagctctgctccatctgtttcctctgccagtggcaatgcaacacctaacactcctggggaggagtctccctgtgggaatattattcctcatgaaaaactcaccagatcaacagcaacctgaggagcatagcccaaaaataggactaagtcttaaactgggtgcttccaatagtcctggtcagcctaattctgtgaagagaaagaaactacctgtagatagtgtctttaacaaatttgaggatgaagacagtgatgacgtaccccgaaaaaggaaactggttcccttggattatggtgaagatgataaaaatgcaaccaaaggcactgtaaacactgaagaaaagcgtaaacacattaagagtctcattgagaaaatccctacagccaaacctgagctcttcgcttatcccctggattggtctattgtggattctatactgatggaacgtcgaattagaccatggattaataagaaaatcatagaatatataggtgaagaagaagctacattagttgattttgtttgttctaaggttatggctcatagttcaccccagagcattttagatgatgttgccatggtacttgatgaagaagcagaagtttttatagtcaaaatgtggagattattgatatatgaaacagaagccaagaaaattggtcttgtgaagtaaaactttttatatttagagttccatttcagatttcttctttgccacccttttaaggactttgaatttttctttgtctttgaagacattgtgagatctgtaannnnnnnnnncggtagaaaatgtgaattttttggtcctctaatttgttgttgccctgtgtactcccttggttgtaaagtcatctgaatccttggttctctttatactcaccaggtacaaattactggtatgttttataagccgcagctactgtacacagcctatctgatataatcttgttctgctgatttgtttcttgtaaatattaaaacgactccccaattattttgcagaattgcacttaatattgaaatgtactgtataggaaccaacatgaacaattttaattgaaaacaccagtcataaactattaccacccccactctcttttgatcagaaatggcaagcccttgtgaaggcatggagtttaaaattggaatgcaaaaattagcagacaatccattcctactgtatttctgtatgaatgtgtttgtgaatgtatgtgtaaaagtctttcttttccctaatttgctttggtggggtccttaaaacatttcccaactaaagaatagaattgtaaaggaaaagtggtactgttccaacctgaaatgtctgttataattaggttattagtttcccagagcatggtgttctcgtgtcgtgagcaatgtggtttgctaactggatggggttttcttattaataagatggctgcttcagcttctcttttaaaggaatgtggatcatagtgatttttccttttaattttacttgctcagaaatgaggcatatcctaagaatcctggagagctgtatttaatgcatttttgcactaattggtccttagttaattctattgtatactgtctattaacaaaaa

SEQ ID NO: 68280 - DNA, 1689 bp, Homo Sapiens
  misc_feature (88)..(122): n is a, c, g, or t
aagaactgtatacgatccatatagggcgctcgctcgttagtagacgaacgaccgagcgcagcgaagtagtgagcgaggaagcggccgnnnnnnnnnnnnnnnnnnnnnnnnnnnnnnnnnnncagtcgacggtaccggacatatgcccgggaattcggccattacggccgggttctgcagttgttttttgaggacagcattgatgatgccaagtactgtgggcggctctatggcttaggcacaggagtggcccagaagcagaatgaggatgtggactctgcccaggagaagatgagcatcctggcgattatcaacaacatgcagcagtgatggcgccaggctctgcagggtgggcctgatcccagagtggtgcttactgtgctgactgtgtacttatcttccccaagagaaaatgcttcttttgagcacactgtacctaccatctgcattgagcagaaagacttttgttttactgaagacaaaagatgtttttattttagacccagaagagaggagtttgctctgaatttgtaaataagtcttccccattcctcatactcgagcctctcctctctggttgcctcctgccaccagcatccatggctcatttgacacctttttaaatatcaggacaagtctgaaacaaagtagtaaaatgtatataactcttacctgttgtcattctttttcttttaaatttgttgctaatctctgataatgaagattcttactctgattctcagctgagctgtgagggcttccagggaaaatggaacaaaatggtgttcttaggtaatgggttgtagatactgagtcttcctttccttttctgacccttctcgaggacaattgctttcctcacacttttgtagtctctctttacatatgtactatatggaaatgaattgctctgtgctgaaatttgaagaccagataatgaaactgaaaagcaaacaattttactgaatctgtctacccttcattcatgagaactccagaatgagtgttgaccactgaagcatcttttaagtctgtgttccattgtgccattcaggtttgctgtcacatatgcatcatctgaaatcatttgaaatttttgtacaataaaatatcctggatttgatcctgaaggaaactagtaagatcagatttttgggtcatgtctgttgtattttcagtaatgtgatttcagatggtcatctggattctcccacttctctactccattatttctctacttttccttccagcaaacctgaaacgtgagggagatggattaatgtgagtaacaggaatgtgtctttaaaaagctagagtggttacatttaatcaggcagtaagataatttgggttcttgagttgttttggagtaatatcccacaactggggtaggaagctcaggacttttttctttaaagctagtcatttcaaaagcatattgtatttttttgaatgactacagtatggacaatttcaaaaaccaaaacccactttggattggtggaagtaaaaactggtaactcactcaagtgaatgaatggtcttgcattttaaaagcttatgggaaactcaatttgaaatgattagaaaatgtcaagtattataagctggtatttaagatgcttgtaaatactatttatgtttttaattttgtaaaataaagatttctttttaaccactggcaaaaaa

SEQ ID NO: 68281 - DNA, 1001 bp, Homo Sapiens
  misc_feature (26)..(26): n is a, c, g, or t
  misc_feature (35)..(36): n is a, c, g, or t
  misc_feature (42)..(42): n is a, c, g, or t
  misc_feature (83)..(83): n is a, c, g, or t
  misc_feature (88)..(88): n is a, c, g, or t
  misc_feature (104)..(104): n is a, c, g, or t
  misc_feature (117)..(117): n is a, c, g, or t
  misc_feature (136)..(136): n is a, c, g, or t
  misc_feature (142)..(142): n is a, c, g, or t
  misc_feature (181)..(181): n is a, c, g, or t
  misc_feature (189)..(189): n is a, c, g, or t
  misc_feature (226)..(226): n is a, c, g, or t
  misc_feature (241)..(241): n is a, c, g, or t
  misc_feature (258)..(266): n is a, c, g, or t
agggggggaacccatttcccggtggntgacccccnntatgtntaaccactgccttacctatattatcaccagtcacttccacncatcntaatgcccgctgcgtnttctttgccagtntcataccacaggttcatcngcatcntagagaacacatcaccagtcatccccacactgcaccacngcatttcntaccgttcggaatctgcactgagatgctggtcgccgncacacaacgatcacnccacaaattttcccgtnnnnnnnnntacatgtgatgtcaaatggttgctggggctggcagcaaagctgggagtgaactacgtgcaccagttctgtgtgggggcagccaagggggtgctgagcccgtttgtgctgcaggagatcgtcatggagacgctgcagcggctgagtcccgctcatgcccacaaccacctgcgtgccccggccttccaccaactggtgcagcgctgccagcaggcatacatgcagtacatccaccaccgcttgattcacctgactcctgcggactacgacgactttgtgaatgcgatccggagtgcccgcagcgccttctgcctgacgcccatgggcatgatgcagttcaacgacatcctacagaacctcaagcgcagcaaacagaccaaggagctgtggcagcgggtctcactcgagatggccaccttctccccctgagtctttcacccttagggtcctatacagggacccaggcctgtggctatgggggcccctcacacagggggagtgaaacttggctggacagatcatcctcactcagttccctggtagcacagactgacagctgctcttgggctatagcttggggccaagatgtctcacaccctagaagcctagggctgggggagacagccctgtctgggagggggcgttgggtggcctctggtatttatttggcatttataaatatataaactccttttttactctgaactcctgcctgctactgaaacaaaaaagcatgt

SEQ ID NO: 68282 - DNA, 3155 bp, Homo Sapiens
  misc_feature (139)..(147): n is a, c, g, or t
  misc_feature (735)..(747): n is a, c, g, or t
  misc_feature (808)..(817): n is a, c, g, or t
  misc_feature (2988)..(2996): n is a, c, g, or t
gctgataattcaaattctgtactttggcaagcaaaagaggtacaacatcacctttggagttttacaatttaataatgcatactttaaaattcatgataactcatggaaccccactatactcactaattcaactattgannnnnnnnngagtcaaagacttaaagggcccaatgaattattatatacatactgcatcttggttatttctgaaggtagcattctttggagttaaaatgcacatatagacacatacacccaaacacttacaccaaactactgaatgaagaagtattttggtaaccaggccatttttggtgggaatccaagattggtctcccatatgcagaaatagacaaaaagtatattaaacaaagtttcagagtatattgttgaagagacagagacaagtaatttcagtgtaaagtgtgtgattgaaggtgataagggaaaagataaagaccagaaattcccttttcaccttttcaggaaaataacttagactctagtatttatgggtggatttatccttttgccttctggtatacttccttacttttaaggataaatcataaagtcagttgctcaaaaagaaatcaatagttgaattagtgagtatagtggggttccatgatttatcatgaattttaaagtatgcattattaaattgtaaaactccaaggggatgttgtacctcttttgcttgccaaagtacagaatttgaattatcagcaaagnnnnnnnnnnnnngccagccaagctttaaattatgtgaccaaaatgtactgatttcagtaagtctcaaaggttnnnnnnnnnngtcaccaaatagtgtgaaatatattacttaactgtccgtaagcagtatattagtattatcttgttcaggaaaaggttgaataatatatgccttgtataatattgaaaattgaaaagtacaactaacgcaaccaagtgtgctaaaaatgagcttgattaaatcaaccacctattttgacatggaaatgaagcagggtttcttttcttcactcaaattttggcgaatctcaaaattagatcctaagatgtgttcttatttttataacatctttattgaaattctatttataatacagaatcttgttttgaaaataacctaattaatatattaaaattccaaattcatggcatgcttaaattttaactaaattttaaagccattctgattattgagttccagttgaagttagtggaaatctgaacattctcctgtggaaggcagagaaatctaagctgtgtctgcccaatgaataatggaaaatgccatgaattacctggatgttctttttacgaggtgacaagagttggggacagaactcccattacaactgaccaagtttctcttctagatgattttttgaaagttaacattaatgcctgctttttggaaagtcagaatcagaagatagtcttggaagctgtttggaaaagacagtggagatgaggtcagttgtgttttttaagatggcaattactttggtagctgggaaagcataaagctcaaatgaaatgtatgcattcacatttagaaaagtgaattgaagtttcaagttttaaagttcattgcaattaaacttccaaagaaagttctacagtgtcctaagtgctaagtgcttattacattttattaagctttttggaatctttgtaccaaaattttaaaaaaagggagtttttgatagttgtgtgtatgtgtgtgtggggtggggggatggtaagagaaaagagagaaacactgaaaagaaggaaagatggttaaacattttcccactcattctgaattaattaatttggagcacaaaattcaaagcatggacatttagaagaaagatgtttggcgtagcagagttaaatctcaaataggctattaaaaaagtctacaacatagcagatctgttttgtggtttggaatattaaaaaacttcatgtaattttattttaaaatttcatagctgtacttcttgaatataaaaaatcatgccagtatttttaaaggcattagagtcaactacacaaagcaggcttgcccagtacatttaaattttttggcacttgccattccaaaatattatgccccaccaaggctgagacagtgaatttgggctgctgtagcctatttttttagattgagaaatgtgtagctgcaaaaataatcatgaaccaatctggatgcctcattatgtcaaccaggtccagatgtgctataatctgtttttacgtatgtaggcccagtcgtcatcagatgcttgcggcaaaaggaaagctgtgtttatatggaagaaagtaaggtgcttggagtttacctggcttatttaatatgcttataacctagttaaagaacaggaacaagacatacaagaaaacgaatgaaaataactgaatttggaggctggagtaatcagattactgctttaatcagaaaccctcattgtgtttctaccggagagagaatgtatttgctgacaaccattaaagtcagaagttttactccaggttattgcaataaagtataatgtttattaaatgcttcatttgtatgtcaaagctttgactctataagcaaattgcttttttccaaaacaaaaagatgtctcaggtttgttttgtgaattttctaaaagctttcatgtcccagaacttagcctttacctgtgaagtgttactacagccttaatattttcctagtagatctatattagatcaaatagttgcatagcagtatatgttaatttgtgtgtttttagctgtgacacaactgtgtgattaaaaggtatactttagtagacatttataactcaaggataccttcttatttaatcttttcttatttttgtactttatcatgaatgcttttagtgtgtgcataatagctacagtgcatagttgtagacaaagtacattctggggaaacaacatttatatgtagcctttactgtttgatataccaaattnnnnnnnnnttgtatctcattacttatactgggacaccattaccaaaataataaaaatcactttcataatcttgttatgaagttttatgttgtagcaaatatagtctaatgtatcactttatttcaactattactatggattattcaattaaaatattgcactgtaaa

SEQ ID NO: 68283 - DNA, 1029 bp, Homo Sapiens
  misc_feature (296)..(317): n is a, c, g, or t
atcatcaaaacaaacagccaatatgtctctagaaacattgcgttccactgctactgacccagaggggaatgagggctgagttatgaaaagataacttcatgaagacttaactggcccagaagctgattttcatgaaaatctgccactcagggtctgggatgaaggcttgtcagcacttccagtttagaacgcaatgtttctagagacatattggctgtttgttttgatgataaaaggagaataagaaaaggcatcactttcctggatccaggataatttttaaaccaatcaaatgnnnnnnnnnnnnnnnnnnnnnnggaaatgtcatgtgaggttaaaccagtttgcattcccctaatgtggaaaaagtaagaggactactcagcactgtttgaagattgcctcttctacagcttctgagaattgtgttatttcacttgccaagtgaaggaccccctccccaacatgccccagcccacccctaagcatggtcccttgtcaccaggcaaccaggaaactgctacttgtggacctcaccagagaccaggagggtttggttagctcacaggacttcccccaccccagaagattagcatcccatactagactcatactcaactcaactaggctcatactcaattgatggttattagacaattccatttctttctggttattataaacagaaaatctttcctcttctcattaccagtaaaggctcttggtatctttctgttggaatgatttctatgaacttgtcttattttaatggtgggttttttttctggtaagatttagacctaaatcgcatcatgccaacttgtgactttgagactattcatcaagaatgaggatatagtagccatgacatagcttgagctatagcctttaattccttactttggctatgggtggagggtgagtttgaagaggttctgattttcttgtaacctgggaaagccatgaccttgtgcccgattctttcagattgctttgggtaataaatattggtggtggtatctgaaaaaa

SEQ ID NO: 68284 - DNA, 2191 bp, Homo Sapiens
  misc_feature (1703)..(1724): n is a, c, g, or t
  misc_feature (1859)..(1891): n is a, c, g, or t
tcccgcgccttccaggccgcactccagagccaaaagagctccatggcggcggcggccaagcccaacaacctttccctggtggtgcacggaccgggggacttgcgcctggagaactatcctatccctgaaccaggcccaaatgaggtcttgctgaggatgcattctgttggaatctgtggctcagatgcccactactgggagtatggtcgaattgggaattttattgtgaaaaagcccatggtgctgggacatgaagcttcgggaacagtcgaaaaagtgggatcatcggtaaagcacctaaaaccaggtgatcgtgttgccatcgagcctggtgctccccgagaaaatgatgaattctgcaagatgggccgatacaatctgtcaccttccatcttcttctgtgccacgccccccgatgacgggaacctctgccggttctataagcacaatgcagccttttgttacaagcttcctgacaatgtcacctttgaggaaggcgccctgatcgagccactttctgtggggatccatgcctgcaggagaggcggagttaccctgggacacaaggtccttgtgtgtggagctgggccaatcgggatggtcactttgctcgtggccaaagcaatgggagcagctcaagtagtggtgactgatctgtctgctacccgattgtccaaagccaaggagattggggctgatttagtcctccagatctccaaggagagccctcaggaaatcgccaggaaaagtagaaggtcagctggggtgcaagccggaaagtcaccatcgagtgcaccgggggcagaggcctccatccaggcgggcatctacgccactcgctctggtgggaccctcgtgcttgtggggctgggctctgagatgaccaccgtacccctactgcatgcagccatccgggaggtggatatcaagggcgtgtttcgatactgcaacacgtggccagtggcgatttcgatgcttgcgtccaagtctgtgaatgtaaaacccctcgtcacccataggtttcctctggagaaagctctggaggcctttgaaacatttaaaaagggattggggttgaaaatcatgctcaagtgtgaccccagtgaccagaatccctgatgttaacatgctctgccctcatccccacaagtcttgggatctcagggcacaatggctggacatgggtgggctctgatgcagaactttctcttttgaatgttaagaataactaatacaattcattgtgaacagaagtccttaagcagaggaattggtgtgccttaaagatacaatctgggatagtttgggggaacttgtagccagaatgccctgttcatgctgagcaaagttcagcaagtagagcagagtttggcaggcaggtgccaggaactccccttcttcctggagtgccttcattgaggaaggaaatctggcccttgggtttcctggttccactgctactgacccagaggggaatgagggctgagttatgaaaagataacttcatgaagacttaactggcccagaagctgattttcatgaaaatctgccactcagggtctgggatgaaggcttgtcagcacttccagtttagaacgcaatgtttctagagacatattggctgtttgttttgatgataaaaggagaataagaaaaggcatcactttcctggatccaggataatttttaaaccaatcaaatgnnnnnnnnnnnnnnnnnnnnnnggaaatgtcatgtgaggttaaaccagtttgcattcccctaatgtggaaaaagtaagaggactactcagcactgtttgaagattgcctcttctacagcttctgagaattgtgttatttcacttgccaagtgaaggnnnnnnnnnnnnnnnnnnnnnnnnnnnnnnnnntaagtacggtcccttgtcaccaggcaaccaggaaactgctacttgtggacctcaccagagaacagggaggttttggttagctcacaaggacttcccccaccccagaagattagcatccccatactagactcatactcaaactcaactaggctcatactcaatttgatgggttattagacaattccattttcttttctggggtattataaaacaggaaaatcctttcctcttctccatacccagtaaaggcttcttgggaatcttttccgggtgggaatggatttctattgaacttgtcct

SEQ ID NO: 68285 - DNA, 1002 bp, Homo Sapiens
cacgctagcgccgccaggctggcacaaaggaggaagcctagtcccgcccctgcgtgcggcgcttctcccaggccccaccttccatccagtgccctggaccctcggctgggtagcgccaccagagcgaccaaacgtcccgcgccttccaggccgcactccagagccaaaagagctccatggcggcggcggccaagcccaacaacctttccctggtggtgcacggaccgggggacttgcgcctggagaactatcctatccctgaaccaggcccaaatgaggtcttgctgaggatgcattctgttggaatctgtggctcagatgtccactactgggagtatggtcgaattgggaattttattgtgaaaaagcccatggtgctgggacatgaagcttcgggaacagtcgaaaaagtgggatcatcggtaaagcacctaaaaccaggtgatcgtgttgccatcgagcctggtgctccccgagaaaatgatgaattctgcaagatgggccgatacaatctgtcaccttccatcttcttctgtgccacgccccccgatgacgggaacctctgccggttctataagcacaatgcagccttttgttacaagcttcctgacaatgtcacctttgaggaaggcgccctgatcgagccactttctgtggggatccatgcctgcaggagaggcggagttaccctgggacacaaggtccttgtgtgtggagctgggccaatcgggatggtcactttgctcgtggccaaagcaatgggagcagctcaagtagtggtgactgatctgtctgctacccgattgtccaaagccaaggagattggggctgatttagtcctccagatctccaaggagagccctcaggaaatcgccaggaaaagtaaaaggtccagctggggtggcaagccggaaatccaccatccaaaggcaccggggccaaaaggcctccattccagggggggcatcttaccccactcgcctctgggtggggaccctccct

SEQ ID NO: 68286 - DNA, 970 bp, Homo Sapiens
  misc_feature (19)..(19): n is a, c, g, or t
ggtcaaggagcgagcctgngtggcattccggacgagggaaaaaaagaagaacaaaaccagccgctctcagcccggtgatggtcccgcgtcagaagtatcagcagagggtgaagagatcttctgctgaccctcttcctctctgctgaggcagctgcctcctgatcctggccagcccacctctcctgctgtccccgcgtgcacaagtctcttacactggacgcccactgctcctcagcgtccagtcctcctgggcggccccaggtcctggacaataagcaacagatgatattgagtgtcgggtggggaaggaggcccagactctgcttcggccatgatttgtgactgcccaggactctcaggttgggctggccctactcaggattacactgaaagtaatggcctcgtaagtacaggtgatggttttggacacgtcaggaattcctaaaggctgaaagagtgtatccaagtaaggtctgaacctccgactgccttttatttgggggaacacaaaaccaaacagcagatgttttggacttgatctgtgtacgtacatggggacctgtctgcatatacacacggggaatgccagaagaaggcccagtctgcaccaggcgtctggtcaacttagcacaagggcagtgcctggacggacccggagcccccgcatatcagcagttcacccagtactcctcagagactggtttccctctaaacccatcccgggcacataccacccctgttttgcatgtatttctcatttcattttagggatgacaaacatttgtgaaaccagtgagagaaggcttgatgtgtataaaagacgtgatgtgcaccacctcgatctcggtgtttcaggcactaaagcaacaaaacaacccatagtatctcattttgtcatcagatccagaagaaatatcctggttttccagcatgtttacccacatgttttggcatggataaagtgaagagg

SEQ ID NO: 68287 - DNA, 204 bp, Homo Sapiens
caggaacaatgtagagtttactggagcagttcacaagggagagttacaatgaatcccccacagcaacatttcctttaaaatcccttcaatcaatattatctctcaccaaaacccttgctctaacagctagctcatcccttttttctatctctttctccgcccctcatcctctataaatcgtgtaggaaaacaaaagacacccaa

SEQ ID NO: 68288 - DNA, 827 bp, Homo Sapiens
  misc_feature (153)..(207): n is a, c, g, or t
  misc_feature (760)..(786): n is a, c, g, or t
cgaggtgaaaaatatgccgaaggctaaatatgcaatgcattgaaatttctgggaagagatcttgcaggtctagtattttaataatgcactattacccagggcagatattatgagaaactgtttcttctctaagggtttatggcagactttgcnnnnnnnnnnnnnnnnnnnnnnnnnnnnnnnnnnnnnnnnnnnnnnnnnnnnnnngctgagtgaaggaaaggagaaattgttgctattgtcagcatcttaaaggtatttccagtcaaggcaaggctaagtgctttgtgatagtattaagcaagtcatgttttgaatggattacctgtagtgactcattggaatgatataattatacaagtaatgccaaaaaccaagtcaaagcctaattaaccaaagcactcatttaaaaatcatcatgtttggacctatctggacctctcagcactgtaaaatagttttggttttgtggcatatgaatagctgtttaacaaatcaaagttagctttttgcttctcagcttttttgggcaatacaagttaagttcttaatggggagacattatcatggcatgacttaagggaacattggtttgtgaaggaaaaacagattatctaaagccatctctatgtttctgttcagataaagattaatgagttctgtgtttatatcagctttgtatatttcatcttagccattctatcctagaaagattttaatgtgagcttaagatgtaaataaataattttgcaaacatgcnnnnnnnnnnnnnnnnnnnnnnnnnnngcctacagccgcggccgcaagcttattccctttagtgaggg

SEQ ID NO: 68289 - DNA, 878 bp, Homo Sapiens
ggggtcctgcgccggtgttcccacgtgcggcctgaacctgagcgcataatgttatgaggagatgggagcactagtgattcgcggtatcaggaatttcaacctagagaaccgagcggaacgggaaatcagcaagatgaagccctctgtcgctcccagacacccctctaccaacagcctcctgcgagagcagattagtctctatccagaagttaaaggagagattgctcgtaaagatgaaaagctgctgtcgtttctaaaagatgtgtatgttgattccaaagatcctgtgtcttccttgcaggtaaaagctgctgaaacatgtcaagagccgaaggaattcagattgccgaaagaccatcattttgatatgataaatattaagagcattcccaaaggcaaaatttccattgtagaagcattgacacttctcaataatcataagcttttcccagaaacctggactgctgagaaaataatgcaagaataccagctagaacagaaagatgtgaattctcttcttaaatattttgttacttttgaagtcgaaatcttccctcctgaagacaagaaagcaatacgatcaaaatgaagaaaatcacagaaatttcctatgtgtactcctcatccctcctgctgtatattttctcattttttgcgtaataaattatgttaattaccaaatatttaatgctctcattgtgagggcatactcttaatatttatcgagctccctgacttttcaagattgccatagaatatctttggtattatttaacatcggtttaggcatatttcataagtgcatgtcagcatgactgagcacatctgtacctttattatggtgaacagagttaattcgtattttaggcacatatacg

SEQ ID NO: 68290 - DNA, 975 bp, Homo Sapiens
  misc_feature (161)..(219): n is a, c, g, or t
ggatagtcatcagagtttgagaacgctgaccctacagggaatccttctatatttagaatgatggagaagaagaaaaagaaacatagagataggaagtcatctgactctgacagctcaaactctgagagtgatacaggcaagagggcaaggcacacatcaannnnnnnnnnnnnnnnnnnnnnnnnnnnnnnnnnnnnnnnnnnnnnnnnnnnnnnnnnngagtgagagtataaagagtgtaaggggtggttgagagtaagaaaccaggagccttgtgccttgagactcctggaaagactcaatagtgagaatatagcctcccaccccattaacttcgctcccatgggagatggcttcccctcatgcaacaggcaggtttgggagttagaggtcaaaagcagctgcctgaatgagttgttgtttccttatcactcctggtccctttgcaagtgaaccctgcagctcacccattcattcacccaacttccttcattcagcaggaggccctattaccctctccagctgccactgccagagctggattcctgtaaaggagtccaggctagagccacagagactgttgtggaggtgagttcggctgtagttagagtgattggacccttcctattggtctgtcctgggccaactggtgggtgatctctgctgcatccaacatgggagcagagactggcagcaggaggggggaacatggtgagaagtggtgctcacttttcccattcctcctaacatagttctactatgctagaagtggcatccagcggccacagctagaaaacagtctgcagtgtgacttaacttgtgtattgcattccagcagaccactgaaccagacagcgaagccaagatcattgttctactttgtatttactactgtgtgaatcagttgattctacttcaggtccttgcttaaattcctgtcactaaatggaaatgtgtttggttttaaacttaaaa

SEQ ID NO: 68291 - DNA, 947 bp, Homo Sapiens
ggggtgggtggaaacgcgctggctgactggggtcggcgtttagttcagcgcagcgactcggggacctggagctgacgcctagacacttgtattagctttaatagaagagaaatggaggagccatagaatattaaggatgaattcaggaaggcctgagaccatggaaaacttgcctgctctctacactattttccaaggagaggttgctatggtgacagactatggggcctttatcaaaatcccaggctgtcggaagcaaggtctggtccatcgaactcatatgtcatcctgtcgggtggataagccctctgagatagtagatgttggagataaagtgtgggtgaagcttattggccgagagatgaaaaatgatagaataaaagtatccctctccatgaaggttgtcaatcaagggactgggaaagaccttgatcccaacaatgttatcattgagcaagaagagaggcggaggcgatccttccaggattacactgggcagaagatcacccttgaggctgtcttgaacactacctgcaagaagtgtggctgtaaaggccactttgcaaaagattgtttcatgcaaccaggtgggactaaatactctctgatacctgatgaggaagaggaaaaggaacgaggcaaagtcagcagagtttgagaagcctgaccctacaaggaatccttctagaaaaagaaaagaaggagaagaagaaaaagaaacatagagataggaagtcatctgactctgacagctcagactctgagaatgatacaggcaaagagcgccacaggcacacatcaaaagacagcaagggcagcacacgcaagacgaaacaagcaaaagaagcacaagaagaagcacaaggagtgaacagtatacagagcgtaacgggcggagagagtaagcaaccacggagctgcgcctggacatcctggacaactcacta

SEQ ID NO: 68292 - DNA, 754 bp, Homo Sapiens
  misc_feature (573)..(588): n is a, c, g, or t
aaccatatggtttgtcctctatttcttagggagaacaccgaaaacaataactcctcctccaacaagcagaaccaactctctcctctggaagggggcaagccgctcatgtccagctcagaagaggaattctcacctccccaaagtccagaccagaactcggtccttctgctgcagggcaatatgggccacgccaggagctcaaactattctctcccgggcttaacagcctcgcagcccagtcacggcctgcagacccaccagcatcagctccaagactctctgctcggccccctcacctccagtctggtggacttggggtcctaagtggggagggactggggcctcgaagggattcctggagcagcaaccactgcagcgactagggacacttgtaaatagaaatcaggaacatttttgcagcttgtttctggagttgtttgcgcataaaggaatggtggactttcacaaatatctttttaaaaatcaaaaccaacagcgatctcaagcttaatctcctcttctctccaactctttccacttttgcattttccttcccaatgcagagatcagggnnnnnnnnnnnnnnnncccaaacaaacaaaagcacccaggcacccagtctgagttctgggcaactgatacgcctgtttcagcaggctttcttttttttcaatgaatgggaattgcaaatcaactggattttcattatttccttttaatttatatatggagaaatgtaagcacttgcggccgc

SEQ ID NO: 68293 - DNA, 1032 bp, Homo Sapiens
  misc_feature (41)..(42): n is a, c, g, or t
  misc_feature (54)..(54): n is a, c, g, or t
  misc_feature (65)..(65): n is a, c, g, or t
  misc_feature (71)..(71): n is a, c, g, or t
  misc_feature (73)..(73): n is a, c, g, or t
  misc_feature (78)..(78): n is a, c, g, or t
  misc_feature (156)..(156): n is a, c, g, or t
  misc_feature (178)..(178): n is a, c, g, or t
  misc_feature (208)..(208): n is a, c, g, or t
  misc_feature (512)..(522): n is a, c, g, or t
ccaagaatcggcaccgagttttcaatatttagtgtaacaanntaatgtaagatnaaataaaaganccagtntnaggangaaaaacaagtgcctaaatgtcgtaatgctctctatgtgagacagaatagaacgtgaccattagtaatgcaactattnttgtcaaatttagtgggatttnttgttgttgtttgtttcctgggtttttttntaaatgacaaactctaaaaatgtaccaatgtgaaaaaacactttcctgaatgccattactcatgccctcaaagctttcatatctgtagcctactcctgtaaagggtttctcctgtttctagtttctagtttgcaaaggtatgccaacgaatctggcaacctggtatttgttactaaaacagcatgtgttttcaggtttcttttctattgtacctaaagcagtctaaattaaaacttagtagaacaccaggagtatgattctgtttctgaaaggtgagtggtgtattgctgtcattgggccctannnnnnnnnnnaaatatatttttctttcttacttaatggtggctgtgaattgcagggtactttgaaggccatcatctgaaccaagagtagtaactagattaattatatgacagaaagagtgaatttagccttggggtatttattaacttctattatttagatatgcaattttgtttaccactatctcttcacagcattcatatgttaactaagctcttttgtgttaacaagtttatgacaagactgtgaaagtaaaaataatttatctgcttgaagacaaaaaagggaaggagaacaaggatagaaacattgtgaattaatttgtacaaatagaaagcagaccagcaggacaggagctcttttgcagtgctgccggatggtgtctagaaaaatcccagtaatcatgtaggctccatattatttttgcctggggcaaaatgatgtatcttctgtatttagcttttaaaattagtgaaacaaatggcattatttattaaaattctactcaaaataacaaaaaa

SEQ ID NO: 68294 - DNA, 815 bp, Homo Sapiens
  misc_feature (60)..(75): n is a, c, g, or t
  misc_feature (537)..(575): n is a, c, g, or t
ccctgatctctgcattgggaaggaaaatgcaaaagtggaaagagttggagagaagagggnnnnnnnnnnnnnnnncccaaacaaacaaaagcacccaggcacccagtctgagttctgggcaactgatacgcctgtttcagcaggctttcttttttttcaatgaatgggaattgcaaatcaactggattttcattatttcctgttaatttatatatggagaaatgtgaagagcgaaaggaaatggaaagagaaagagaaagcgagataaaaatagtgaaaataagagcctccaggctcaaaagaactgattacattcttaaggtgaacaggaaaaatacaatctataactttctttgatgaggaaaaattaagtttacatttttcatatttagtgttaaacaatttaatgtagattaaaataaaagaccagtattaggaggaaaaaacaagtgcctaaatgtcttaatgctctctatgtgagacagaaatagacgtgaccattagtaatgcaactatttttgccaaatttagtgggannnnnnnnnnnnnnnnnnnnnnnnnnnnnnnnnnnnnnnaaatgacaaactctaaaaatgtaccaatgtgaaaaaacactttcctgaatgccattactcatgccctcaaagctttcatatctgtagcctactcctgtaaagggtttctcctgtttctagtttctagtttgcaaaggtatgccaacgaatctggcaacctggtatttgttactaaaacagcatgtgttttcaggtttcttttctattgtacctaaagcagtctaaattaaaacttagtag

SEQ ID NO: 68295 - DNA, 813 bp, Homo Sapiens
gaaaagataaaatacttggactatattttaaaggggaatctggggtcatgcatattgaagtttaactagatccctccagatttttggttttgatcctacacatttagatactagttttggattttagacagttggtgctgacagtgtgaaactcctattgcctgcagttaaattgaagctttggtttctcatgtgaacaggcagtgaagctggtattatactttaagtcctcatttcagaaatagtttccctccacccccaagcactaccacacatggtctccccacctggtttcagctagtgcattagttttatcttgttttttaccgctgggcaaaccttgctggaacaacaactgacttcatgatttgcacatttggagggcttaacgtctttgcaaatgaaaaatccactgtacaataacaagctcaaaggaactcggagcctttttagaagaaatcgtgctgaattataatgtggcttactgcaataatgtttctttgatcaggatggaaaggaaaatactgagtttagcagaaaacgatgtctaaatgtatttgtaatgatacaattgtttataaatgttttactattaggttgaaccataagaaattgccagtgtacaatttcatctacaaaatgactggcttaacctaaattctgcattttatactccaagaataagctcttcgtggcagctttctaagtgtgaaatgatggaactttctatttgccagaatgacctacacttctctaatagtttatctcatattgttagccaaacgctgattaaaatgcaaatttcaaactaaa

SEQ ID NO: 68296 - DNA, 2779 bp, Homo Sapiens
  misc_feature (75)..(144): n is a, c, g, or t
  misc_feature (2038)..(2050): n is a, c, g, or t
  misc_feature (2729)..(2738): n is a, c, g, or t
tggtaccggtccggaattcccgggatatcgtcgacccacgcgtccgcggacgcgtgggcagctgatggcctctcnnnnnnnnnnnnnnnnnnnnnnnnnnnnnnnnnnnnnnnnnnnnnnnnnnnnnnnnnnnnnnnnnnnnnntgaggcgcccgccgcctgccgcgggggccgctcgcgtcctccatggaggccggagaggaaccgctgctgctggccgaactcaagcccgggcgcccccaccagtttgattggaagtccagctgtgaaacctggagcgtcgccttctccccagatggctcctggtttgcttggtctcaaggacactgcatcgtcaaactgatcccctggccgttggaggagcagttcatccctaaagggtttgaagccaaaagccgaagtagcaaaaatgagacgaaagggcggggcagcccaaaagagaagacgctggactgtggtcagattgtctgggggctggccttcagcccgtggccttccccacccagcaggaagctctgggcacgccaccacccccaagtgcccgatgtctcttgcctggttcttgctacgggactcaacgatgggcagatcaagatctgggaggtgcagacagggctcctgcttttgaatctttccggccaccaagatgtcgtgagagatctgagcttcacacccagtggcagtttgattttggtctccgcgtcacgggataagactcttcgcatctgggacctgaataaacacggtaaacagattcaagtgttatcgggccacctgcagtgggtttactgctgttccatctccccagactgcagcatgctgtgctctgcagctggagagaagtcggtctttctatggagcatgaggtcctacacgttaattcggaagctagagggccatcaaagcagtgttgtctcttgtgacttctcccccgactctgccctgcttgtcacggcttcttacgataccaatgtgattatgtgggacccctacaccggcgaaaggctgaggtcactccaccacacccaggttgaccccgccatggatgacagtgacgtccacattagctcactgagatctgtgtgcttctctccggaaggcttgtaccttgccacggtggcagatgacagactcctcaggatctgggccctggaactgaaaactcccattgcatttgctcctatgaccaatgggctttgctgcacattttttccacatggtggagtcattgccacagggacaagagatggccacgtccagttctggacagctcctagggtcctgtcctcactgaagcacttatgccggaaaagcccttcgaaggtttcctaaacaacttaccaagtccctagcactggccaatccccaagaaaatgaaagagttcctcacatacaggactttttaagcaacaccacatcttgtgcttctttgtagcagggtaaatcgtcctgtcaaagggagttgctggaataatgggccaaacatctggtcttgcattgaaatagcatttctttgggattgtgaatagaatgtagcaaaaccagattccagtgtactagtcatggatctttctctccctggcatgtgaaagtcagtcttagaggaagagattccacttgcacggcaacagagccttacgttaaatcttcagtccagttatgaacagcaagtgttgaactctttctgcttgttttgattcaaagtgcagttactgatgttgttttgattatgcaactaagtaggcctccagagcctctctagtggcagagcagctcacactccctccgctgggaacgatggcttctgcctagtacctatccttgtgtttctgatgcagtggtagcattggttcaagttctctcctgctgtggtcagagttgcttcgatgttggccaagtgcttttcttcttgggctcccttctgacctgcaggacagttttcctggagccatttggtatgaggtattaatttagcttaactaaattacaggggactcagaggccgtgctcctgaccgatccagacactattactggcnnnnnnnnnnnnnctttaacaatggtgtgcatgtgcaggaaatgacaaatttgtatgtcagattatacaaggatgtattcttaaaccgcatgactattcagatggctactgagttatcagtggccatttattagcatcatatttatttgtattttctcaacagatgttaaggtacaactgtgtttttctcgattatctaaaaaccatagtacttaaattgaacagttgcaaagatgtcttaattgtgtaaagaattggtgtagtcatgactttagctgatactcttatgtacgagatctgtctctgctgtttaacttcattggattaatcagctggtttcaactctactgcgaaacaaaaatagctccttaaaagtactgttctccttcagtggcatgtagttatctaatcaagacacctcattcaaacaaaacctgccttaggaaaatttaatatattttaaattattttaaaagaaatacaacatcttattctttagctttcttaatcggtgctttatggaggccagtgtaacgttacatgactcgttgagaaagttgaggaatttcctctaccacctttgttgcttgaagaaaaacatgtcttttcaaaatgagaggctttcattgaagaaaagaaaaaaacaacagttaaaagcttttggctctctgtttcatttttttccattaagnnnnnnnnnngtccccttttaaaacaagcagggctgggtgtgacggcacat

SEQ ID NO: 68297 - DNA, 396 bp, Homo Sapiens
cccagatcctgaggagtctgtcatctgccaccgtggcaaggtacaagccttctggagagaagcacacagatctcagtgagctaatgtggacgtcactgtcatccatggcggggtcaacctgggtgtggattggtatcgtaagaagccgtgacaagcagggcagagtcgggggagaagtcacaagagacaacactgctttgatggccctctagcttccgaattaacgtgtaggacctcatgctccatagaaagaccgacttctctccagctgcagagcacagcatgctgcagtctggggagatggaacagccagtaaacccactgcaggtggcccgataacacttgaatctgtttaccgtgtttgttcaggtcccagatgcgaagagtcttatcacc

SEQ ID NO: 68298 - DNA, 917 bp, Homo Sapiens
ctacatcatgtgtggggagataaggaggataaaatgaagagaaagaatattattgaggggaagttcttcggaatacaaaatgtgtgtgaatttttgtaaaataagtattacattcacagggttcaaactatttgaagtaaagagattattatataaagaatccatccctcaacttacccaggtggtcacttttctgtttcttgtgtatctgcccagtattcattcctgctgatatcagtcaataatgaatgatacgtgttttcttcacttttttcattcttgtcaggtagcagactgtgtagacttttctgcacttgcccttttcataacaatctatcttggagaactttccctatgagaacatacagagcttcctgtacacagttgcatgtactgcattatgcaaatgcattatattttatgtaacctgtccactgttggtaggcacttgagttgttttagtcttttgctatcaaacagttctgggatgattaaccctgatttactgcaaaattgaaattgctctgctattctgctggaatggtggtaagtgaactgaaaattccagtcactcttgggctagactcaacgttcttaaaaactatgtggccatcaccaaattagttattttgaaccttaatttcttcacctctaaaatggaggtaatacttaccttaagtggctatgagaatgaagatcatgtgtatgaattgttggtgctctaaagaacagcacaaataaaattattttcaaatttaattttaattgaactatgtgtaatttcttaattttgaaataattttatttgtaatgtgcataatcttatttaatgtataatgtatacattgtaatagaaacagatttcccaaattccagcctggcatgaggtaataaaaggtaatgcaaagggaaaaaaa

SEQ ID NO: 68299 - DNA, 1515 bp, Homo Sapiens
  misc_feature (84)..(118): n is a, c, g, or t
  misc_feature (952)..(998): n is a, c, g, or t
  misc_feature (1419)..(1440): n is a, c, g, or t
aacactgtataccgactccactataggggctcggcgttgttcgaacgacgagcgcagcgagtatgtgagcgaggaagcggccgnnnnnnnnnnnnnnnnnnnnnnnnnnnnnnnnnnncagtcgacggtaccggacatatgcccgggaattcggccattacggccgggggtgaagaacaagtgaggctctggagaagaagctacaatgtaaccgccgcctcccattgaggagtctcatccttactaccaagaaatctacaacgaccggcaggtataaagtatgcgatgtgcccttggatcaactgccacggctcggaaagctctaaaggatgttctggagagactccttccctattggaatgaaaggattgctcccgaagtattacgtggcaaaaccattctgatatctgctcatggaaatagcacgtagggcactcctaaaacacctggaaggtatctcagatgaacgacatcatcaacattactcttcctactggagtccccattcttctggaattggactgacaaacctgcgtgctgtctgggcctcatcagttcctgggtgaccaagaggcgatccaagcagccattaagaaagtagaagatcaaggaaaagtgaaacaagctaaaaaatagtctttctcaactgttggctaagaagaaatgcaaaagaagtggcataggagtgtgttatgggtgctgaactctctctctttttccccgattttccagagctaggctgtggagtagagtttgtataggtaactaggtaacttattgtggcccagataaggctttaggatgcctcagtgcttatgtcatagccttatgagttagctttcttgctagccccctagtcggtcaccaaactagtaactagtggggcttaatgaaggtcataagtttctgagatgggagagcaacaagtagagatgaagttaaaggtatttannnnnnnnnnnnnnnnnnnnnnnnnnnnnnnnnnnnnnnnnnnnnnnatcagtagttcactttaatatttaataagattttctgggataacagtaagggatattagataatataccgtatgtatttattactagtcttttcctctaggaaaagggatactttgataattaaggccagaggcccattagttgagaaagtcacagatatatttctccaagaaagccaacaaccaccaccacaatgacagaaatgacaacaaggccctttaacttgtcttctagtttagagacatccttcatttgacatttagtagaattcctctttggccacaagaataagcagcaaataaacaactatggctgttgaggttctcattttggtttgttttaattttttgaactttgggtacctgtaattagtttaaaaataaagttcctgataataaagtgactgaaaatggcatccccnnnnnnnnnnnnnnnnnnnnnngcctacagccgcggccgcaagcgtattccctttagtgagggttaattcgaagcattggccacgtggcccgtcgtt

SEQ ID NO: 68300 - DNA, 1564 bp, Homo Sapiens
  misc_feature (18)..(18): n is a, c, g, or t
  misc_feature (664)..(680): n is a, c, g, or t
gaagtacaggacaatatnaaagaacttaaaaggagtctagaaaatccagcagaaaggaaaatggaaggtcagaattcccagagtcctcaatgtttcaaaacatgctcagagcaaaatggttatgttctcacattgtcaaatgcacaaccagttctgcaatatggtaatccttatgcatctcaggaaacaagagatggagcagatggtgctttttacccagatgaaatacaaaggccacctgtcagagtcccctcttggggactggaagacaatgttgtctgcagccagcctgctcgaaactttagtcggcctgatggcttagaggactctgaggatagcaaagaagatgagaatgtgcctactgctcctgatcctccaagtcaacatttacgtgggcatgggacaggcttttgctttgattccagctttgatgttcacaagaagtgtcccctctgtgagttaatgtttcctcctaactatgatcagagcaaatttgaagaacatgttgaaagtcactggaaggtgtgcccgatgtgcagcgagcagttccctcctgactatgaccagcaggtgtttgaaaggcatgtgcagacccattttgatcagaatgttctaaattttgactagttactttttattatgagttaatatagtttagcagttnnnnnnnnnnnnnnnnnccacacctaaaatagaccactgaggagaccatagagcggatgctttcatgcaccctttactgcactttctgaccaggagctactttgagtttggtgttactaggatcagggtcagtctttggcttatcaataaattttaatctctgttaatcttacctgctttaaaaaaaagttcttgtgtgttcgtatctttatttattccctagtttgcagaactgtctgaataaaggatacaaggattatttcaatgttactgcactgaaaaacgtgtatgtattagtgtgctagattatttagcagaatattcacaagtttctgttgaccttgttgattgagcatgactactaaatattatgtaataaaaagcatttgtcataacagtcttatgaagtagttcttcgaatatagaaagttctataatttagcccatgaaatgataggtttttaattttcagaaatggagctgcatgtagaatgagatcacatgcttttatatgtgaaatattggttttagcaattaacagaaggcatactttgctaattttatggcaaaattttagaataacctgaatgattatttttaaactatcttgaagttgtatgtatatatctaatgggaaaatggaacaagagatgtcagtataattgttttcctattaaatgatctcataacaggggtgtttgtggcataaaaatcatagaatatatatcagtatcttttttacattttcctgatgagaatataaatttgaaatattctcagtaagtgattaaaagtacaatacataaacccaaatcaaagtaatgtgtttcttcagttatgtctgtgctgtatagaactgtcactaacattaaagaaagaggacacatttttcaagatctgt

SEQ ID NO: 68301 - DNA, 2619 bp, Homo Sapiens
  misc_feature (83)..(117): n is a, c, g, or t
  misc_feature (168)..(173): n is a, c, g, or t
  misc_feature (2558)..(2575): n is a, c, g, or t
cccttgataactcacctatagggcgcctagccgttagagccgaacgacgagcgcagcgaagtagtgagcgaggaagcggccgnnnnnnnnnnnnnnnnnnnnnnnnnnnnnnnnnnncagtcgacggtaccggacatatgcccgggaattcggccattacggccgggnnnnnntaggcggtagtggcggaagaggttcggcggctgatggcggatcaggatcggaagcctgcgtaactttctcccttgatccgggagtctttccactggattcacaatgacatcctttcaagaagtcccattgcagacttccaactttgcccatgtcatctttcaaaatgtggccaagagttaccttcctaatgcacacctggaatgtcattacaccttaactccatatattcatccacatccaaaagattgggttggtatattcaaggttggatggagtactgctcgtgattattacacgtttttatggtcccctatgcctgaacattatgtggaaggatcaacagtcaattgtgtactagcattccaaggatattaccttccaaatgatgatggagaattttatcagttctgttacgttacccataagggtgaaattcgtggagcaagtacacctttccagtttcgagcttcttctccagttgaagagctgcttactatggaagatgaaggaaattctgacatgttagtggtgaccacaaaagcaggccttcttgagttgaaaattgagaaaaccatgaaagaaaaagaagaactgttaaagttaattgccgttctggaaaaagaaacagcacaacttcgagaacaagttgggagaatggaaagagaacttaaccatgagaaagaaagatgtgaccaactgcaagcagaacaaaagggtcttactgaagtaacacaaagcttaaaaatggaaaatgaagagtttaagaagaggttcagtgatgctacatccaaagcccatcagcttgaggaagatattgtgtcagtaacacataaagcaattgaaaaagaaaccgaattagacagtttaaaggacaaactcaagaaggcacaacatgaaagagaacaacttgaatgtcagttgaagacagagaaggatgaaaaggaactttataaggtacatttgaagaatacagaaatagaaaataccaagcttatgtcagaggtccagactttaaaaaatttagatgggaacaaagaaagcgtgattactcatttcaaagaagagattggcaggctgcagttatgtttggctgaaaaggaaaatctgcaaagaactttcctgcttacaacctcaagtaaagaagatacttgttttttaaaggagcaacttcgtaaagcagaggaacaggttcaggcaactcggcaagaagttgtctttctggctaaagaactcagtgatgctgtcaacgtacgagacagaacgatggcagacctgcatactgcacgcttggaaaacgagaaagtgaaaaagcagttagctgatgcagtggcagaacttaaactaaatgctatgaaaaaagatcaggacaagactgatacactggaacacgaactaagaagagaagttgaagatctgaaaactccgtcttcagatggctgcagaccattataaagaaaaatttaaggaatgccaaaggctccaaaaacaaataaacaaactttcagatcaatcagctaataataataatgtcttcacaaagaaaacggggaatcagcagaaagtgaatgatgcttcagtaaacacagacccagccacttctgcctctactgtagatgtaaagccatcaccttctgcagcagaggcagattttgacatagtaacaaaggggcaagtctgtgaaatgaccaaagaaattgctgacaaaacagaaaagtataataaatgtaaacaactcttgcaggatgagaaagcaaaatgcaataaatatgctgatgaacttgcaaaaatggagctgaaatggaaagaacaagtgaaaattgctgaaaatgtaaaacttgaactagctgaagtacaggacaattataaagaacttaaaaggagtctagaaaatccagcagaaaggaaaatggaagatggagcagatggtgctttttacccagatgaaatacaaaggccacctgtcagagtcccctcttggggactggaagacaatgttgtctgcagccagcctgctcgaaactttagtcggcctgatggcttagaggactctgaggatagcaaagaagatgagaatgtgcctactgctcctgatcctccaagtcaacatttacgtgggcatgggacaggcttttgctttgattccagctttgatgttcacaagaagtgtcccctctgtgagttaatgtttcctcctaactatgatcagagcaaatttgaagaacatgttgaaagtcactggaaggtgtgcccgatgtgcagcgagcagttccctcctgactatgaccagcaggtgtttgaaaggcatgtgcagacccattttgatcagaatgttctaaattttgactagttactttttattatgagttaatatagtttagcagttnnnnnnnnnnnnnnnnnngcctacagccgcggccgcaagcttattccctttagttgagggta

SEQ ID NO: 68302 - DNA, 1096 bp, Homo Sapiens
  misc_feature (43)..(84): n is a, c, g, or t
  misc_feature (88)..(122): n is a, c, g, or t
aagactgtatagactcactatagggcgctagcggtcgcttatnnnnnnnnnnnnnnnnnnnnnnnnnnnnnnnnnnnnnnnnnnccgnnnnnnnnnnnnnnnnnnnnnnnnnnnnnnnnnnncagtcgacggtaccggacatatgcccgggaattcggccattacggccggggggtctttgggggtaggcggtagtggcggaagaggttcggcggctgatggcggatcaggatcggaagcctgcgtaactttctcccttgatccgggagtctttccactggattcacaatgacatcctttcaagaagtcccattgcagacttccaactttgcccatgtcatctttcaaaatgtggccaagagttaccttcctaatgcacacctggaatgtcattacaccttaactccatatattcatccacatccaaaagattgggttggtatattcaaggttggatggagtactgctcgtgattattacacgtttttatggtcccctatgcctgaacattatgtggaaggatcaacagtcaattgtgtactagcattccaaggatattaccttccaaatgatgatggagaattttatcagttctgttacgttacccataagggtgaaattcgtggagcaagtacacctttccagtttcgagcttcttctccagttgaagagctgcttactatggaagatgaaggaaattctgacatgttagtggtgaccacaaaaagcaggccttcttgagttgaaaattgagaaaacccatgaaagaaaaacgaagaacctgttaacgttattgccgttccggacaacagaaaccagcgccacttcgagaaaccagtggggacggatggcaacagaggaacttacccttgagaaaggaaaattgtgaccaattggagcacgggacaagggtctctggaggtaacccacggttttaatggagatgggagagtttgaacaggtggcggagggtcatccgaggccactagtgggagattttgtgcgtacccttacgggggagaccggtcacgtcaggagcacagagcgatcgagacatttgcgctgagaaacgaagagtcgtggtcgacaacaacgg

SEQ ID NO: 68303 - DNA, 694 bp, Homo Sapiens
gcggccgggagctgtcctagcgcctagttctctcccggccgcagagctggccgcccagggggagtcgcagagtttggaagatctctctaacacctctcggccaacttcagaagtgtataagatcagctttatctttccaaatggagacaagtatgatggtgactgtacaagaacatcttctggaatctacgagagaaatggaataggtattcataccactcctaatgggattgtctacacaggaagctggaaagatgacaagatgaatggttttggaagacttgagcatttttcaggagcagtatatgaaggacaatttaaggataatatgtttcatggactggggacttacacattcccaaatggggcaaagtatactggaaatttcaatgaaaatagggtggaaggtgaaggggaatatactgatatccaaggactagaatggagtggtaactttcattttacagctgctccagacctgaaattaaagcttcacatgtagatgtgatgttaaattaaagttgaaatgtagtaattgaagcttttagttgtaaggaaagcaacttaatctgttatttgaaatgacttcatacactacccctataagtttgccaataaaaccatcacctgcttacacctttttgaactttatattcattgtcttacaattagtttaaaataaaaaacatgattc

SEQ ID NO: 68304 - DNA, 849 bp, Homo Sapiens
  misc_feature (80)..(139): n is a, c, g, or t
cactcttcctcctgtcccaccctctgtgagtgatttaaaaacggaaaaggtcaaagcccagccaggcctacatttagagnnnnnnnnnnnnnnnnnnnnnnnnnnnnnnnnnnnnnnnnnnnnnnnnnnnnnnnnnnnncttaaaacttaagcatggtaaaatgttaagctgttttcatccactgatattattctactataaaaagcccttcttgagcagatttgatgataaaaaggagaacatttctaaggtataattagagaagctgttgcatgagaaatcatgtctccatctccattttgctatgcgttatctgaggattgtttctgaaagagatctatttaggcagtgtatgtatgtgtcagcatgtaaaaagtaaagaactgaaaatagacaaaccttgtaaatgcacttcaaaaccaattgtggctcaagtgtaggtggttccccaaggctggtaccaatgagactggggtttgggaattagttggtcatcatccctcctgctgcccagcagtggtcagtcatttttcatgagggatggactaggaaaatgaagtgtctattataaggagagttcctgtaacttaaggagcaagctcactacaaaacccagctacctgcttatcgtagtggccagagtggtagaagagatacggagtaggaattaaaccacacaatgttatttagggactaagccatgcccctaacaagaaaacaagccaaaaggaaagtattaggcattctctgggaaggcatgcatttttttcccatgtctctggggccaaaaaccttataccaagtacctattggcacccgaatatatttgtagaatgaatgaatacatg

SEQ ID NO: 68305 - DNA, 1580 bp, Homo Sapiens
  misc_feature (57)..(57): n is a, c, g, or t
  misc_feature (61)..(61): n is a, c, g, or t
catatgtgggcaagtgtacgtgtgtgttgtcatgtgtgcagagggcttcctaacccntgcntgataggtgcagaacgtcggctatcagagcaagcattgtggagcggttccttatgccaggctgccatgtgagatgatccaagaccaaaacaaggccctagactgcagtaaaacccagaactcaagtagggcagaaggtggaaggctcatatggatagaaggcccaaagtataagacagatggtttgagacttgagacccgaggactaagatggaaagcccatgttccaagatagatagaagcctcaggcctgaaaccaacaaaagcctcaagagccaagaaaacagagggtggcctgaattggaccgaaggcctgagttggatggaagtctcaaggcttgagttagaagtcttaagacctgggacaggacacatggaaggcctaagaactgagacttgtgacacaaggccaacgacctaagattagcccagggttgtagctggaagacctacaacccaaggatggaaggcccctgtcacaaagcctacctagatggatagaggacccaagcgaaaaaggtatctcaagactaacggccggaatctggaggcccatgacccagaacccaggaaggatagaagcttgaagacctggggaaatcccaagatgagaaccctaaaccctacctcttttctattgtttacacttcttactcttagatatttccagttctcctgtttatctttaagcctgattcttttgagatgtactttttgatgttgccggttacctttagattgacagtattatgcctgggccagtcttgagccagctttaaatcacagcttttacctatttgttaggctatagtgttttgtaaacttctgtttctattcacatcttctccacttgagagagacaccaaaatccagtcagtatctaatctggcttttgttaacttccctcaggagcagacattcatataggtgatactgtatttcagtcctttcttttgaccccagaagccctagactgagaagataaaatggtcaggttgttggggaaaaaaaagtgccaggctctctagagaaaaatgtgaagagatgctccaggccaatgagaagaattagacaagaaatacacagatgtgccagacttctgagaagcacctgccagcaacagcttccttctttgagcttagtttctggcatcactaccactactgattaaacaagaataagagaacattttatcatcatctgctttattcacataaatgaagttgtgatgaataaatctgcttttatgcagacacaaggaattaagtggcttcgtcattgtccttctacctcaaagataatttattccaaaagctaagataaatggaagactcttgaacttgtgaactgatgtgaaatgcagaatctcttttgagtctttgctgtttggaagattgaaaaatattgttcagcatgggtgaccaccagaaagtaatcttaagccatctagatgtcacaattgaaacaaactggggagttggttgctattgtaaaataaaatatactgttttgaaaaaaaa

SEQ ID NO: 68306 - DNA, 749 bp, Homo Sapiens
cagacattcatataggtgatactgtatttcagtcctttcttttgaccccagaagccctagactgagaagataaaatggtcaggttgttggggaaaaaaaagtgccaggctctctagagaaaaatgtgaagagatgctccaggccaatgagaagaatttgacaagaaatacacagatgtgccagacttttgagaagcacctgccagcaacagcttccttctttgagcttagtccatccctcatgaaaaatgactgaccactgctgggcagcaggagggatgatgaccaactaattcccaaaccccagtctcattggtaccagccttggggaaccacctacacttgagccacaattggttttgaagtgcatttacaagtttctggcatcactaccactactgattaaacaagaataagagaacattttatcatcatctgctttattcacataaatgaagttgtgatgaataaatctgcttttatgcagacacaaggaattaagtggcttcgtcattgtccttctacctcaaagataatttattccaaaagctaagataaatggaagactcttgaacttgtgaactgatgtgaaatgcagaatctcttttgagtctttgctgtttggaagattgaaaaatattgttcagcatgggtgaccaccagaaagtaatcttaagccatctagatgtcacaattgaaacaaactggggagttggttgctattgtaaaataaaatatactgttttgaaa

SEQ ID NO: 68307 - DNA, 1019 bp, Homo Sapiens
  misc_feature (77)..(78): n is a, c, g, or t
  misc_feature (119)..(119): n is a, c, g, or t
  misc_feature (130)..(130): n is a, c, g, or t
  misc_feature (224)..(224): n is a, c, g, or t
  misc_feature (252)..(252): n is a, c, g, or t
  misc_feature (267)..(267): n is a, c, g, or t
  misc_feature (285)..(285): n is a, c, g, or t
  misc_feature (300)..(300): n is a, c, g, or t
  misc_feature (323)..(323): n is a, c, g, or t
  misc_feature (335)..(335): n is a, c, g, or t
  misc_feature (445)..(445): n is a, c, g, or t
  misc_feature (457)..(457): n is a, c, g, or t
  misc_feature (473)..(481): n is a, c, g, or t
  misc_feature (941)..(941): n is a, c, g, or t
gctacattttctccgctgttgttgtggatgtggcgaaacaattcaccagaacgttgactggtacgattatccgctcnnataggatttgccctcggccagaatcgcacgaagctgtgatntgaaattgcanttgtgaaaagtcggagactgctctgtagtcacagagtgctgcagccttgaaaaagtggaggaaagaaagccttctccttgccccgcacacattncactcccactgtactggctccaaagctntgcatttcaggcccntatatttctgtaggaaanatcgttgagacactnttctatatgggtgatttgagacnatcgtacgctgntgcgtaaggatgtacagagaaattgtaggtattttttgaagaacattaatttgttaatgatatgtagctatttaatttttccctttcctattgtaatcattcattttttntgttgttcgganaaaaaaaagttgatcnnnnnnnnngtcgtagatttgtctgtaaaagtgcaggaacagttattctatgagaacactgcatctgcattcatagccacgagtttgttattgctacaggctactgagcgtcgtaacaggaaaaccacccacagctgaccggctcggtggaggacactcctgggacaggtctctttgtcagtgaacaagggcgtcactctgggaggggtcggcggtgctggcggccgggtccctggtgcactgacctatctgggataggcagtaccctggaggggggcctggggcagaggaggcagcagaaaaccaaacatttcactgagaaagccccctccctgctctaagaaggggctccgtgaagttcttcccagagccgcgctgcctgcagtgcgctctgaccttctcttcatgtgtgtaaatctgtaatataccattctctgtggcctgtttttcctggaagaagaaaaaaaanggtttggcaggccatctttttttgtacttaaaagtagccttaagaacaataataaagtgctcttaaaccaaaaaaaaa

SEQ ID NO: 68308 - DNA, 887 bp, Homo Sapiens
  misc_feature (21)..(21): n is a, c, g, or t
  misc_feature (34)..(34): n is a, c, g, or t
aatcctttgtcctcactagtntgctttacatttntgaaaagtattatttttgtccaagtgcttatcaactaaaccttgtgttaggtaagaatggaatttattaagtgaatcagtgtgacccttcttgtcataagattatcttaaagctgaagccaaaatatgcttcaaaagaagaggactttattgttcattgtagttcatacattcaaagcatctgaactgtagtttctatagcaagccaattacatccataagtggagaaggaaatagataaatgtcaaagtatgattggtggagggagcaaggttgaagataatctggggttgaaattttctagttttcattctgtacatttttagttagacatcagatttgaaatattaatgtttacctttcaatgtgtggtatcagctggactcagtaacacccctttcttcagctggggatggggaatggattattggaaaatggaaagaagaaagtaactaaaagccttcctttcacagtttctggcatcactaccactactgattaaacaagaataagagaacattttatcatcatctgctttattcacataaatgaagttgtgatgaataaatctgcttttatgcagacacaaggaattaagtggcttcgtcattgtccttctacctcaaagataatttattccaaaagctaagataaatggaagactcttgaacttgtgaactgatgtgaaatgcagaatctcttttgagtctttgctgtttggaagattgaaaaatattgttcagcatgggtgaccaccagaaagtaatcttaagccatctagatgtcacaattgaaacaaactggggagttggttgctattgtaaaataaaatatactgttttgaaaactttgta

SEQ ID NO: 68309 - DNA, 426 bp, Homo Sapiens
  misc_feature (348)..(357): n is a, c, g, or t
ttgtcgtagatttgtctgtaaaagtgcaggaacagttattctatgagaacactgcatctgcattcatagccacgagtttgttattgctacaggctactgagcgtcgtaacaggaaaaccacccacagctgacctatctgggataggcagtaccctggaggggggcctggggcagaggaggcagcagaaaaccaaacatttcactgagaaagccccctccctgctctaagaaggggctccgtgaagttcttcccagagccgcgctgcctgcagtgcgctctgaccttctcttcatgtgtgtaaatctgtaatataccattctctgtggcctgtttttcctggaagaagnnnnnnnnnnggtttggcaggccatctttttttgtacttaaaagtagccttaaaaacaataataaagtgctcttaaacc

SEQ ID NO: 68310 - DNA, 1124 bp, Homo Sapiens
  misc_feature (79)..(113): n is a, c, g, or t
aaaacgtacgactatataggcgctacgcgttaaagccgaacgacgagcgcagcggagtcagtgagcgaggaagcggcgnnnnnnnnnnnnnnnnnnnnnnnnnnnnnnnnnnncagtcgacggtaccggacatatgcccgggaattcggccattacggccgggattgtaccatgtacctaatccaaatatcatataaacattttatttatagttaataatctatgatgaaggtaattaaagtagattatggcctttttaagctattgcagtctaaaacttcaaaaactaaaatcattgtcaaaattaatatgattattaatcagaatatcagaatatgattcactatttaaactatgataaattatgataatatatgaggaggcctcgctatagcaaaaatagttaaaatgctgacataaaccaaattcattttttaaaaaatctgttgttccaaatgtgtataattttaaagtaattttctaaagcagtttattataatggtttgcctgcttaaaaggtataattaaacctcttttctcttctacattgacacacagaaatgtgtcaatgtaaagccaaaaaccatcttctgtgtttatggccaatctattctcaaagttaaaagtaacaattgtttcagagtcacagttccctttatttcacataagcccaaactgatagacagtaacggtgttaagttttatactatatttgtgctatttaattctttctattttcacaattattaaattggtgtacactttcattacttttaaaaatgtagaaattcttcatgaacataactctgctgaatgtaaacagaaaattttttttcaaaaatgctgttaatgtatactactggtggttgattggttttattttatgtagcttgacaattcagtgacttaatatctattccatttgtattgtacataaaattttctagaaatacacttttttccaaagtgtaagtttgtgaatagattttagcatgatgaaactgtcataatggtgaatgttcaatctgtgtaagaaaacaaactaaatgtagttgtcacactaaaatttaattggatattgatgaaatcattggcctggcaaaataaaacatgttgaattcccc

SEQ ID NO: 68311 - DNA, 846 bp, Homo Sapiens
  misc_feature (54)..(55): n is a, c, g, or t
  misc_feature (107)..(107): n is a, c, g, or t
  misc_feature (114)..(114): n is a, c, g, or t
  misc_feature (144)..(231): n is a, c, g, or t
gagaaggttcgttttgccagttgagtcgtgcacatttggtattgcaacccactnntgctaaagtatctctgcctcacctcccgacagtgggatacagcacacccccnccaaccngtattttgtttttgtagagtagggtttgtnnnnnnnnnnnnnnnnnnnnnnnnnnnnnnnnnnnnnnnnnnnnnnnnnnnnnnnnnnnnnnnnnnnnnnnnnnnnnnnnnnnnnnnncatacccagcctatgctgtgactttagacaagttaggaaagtacctagcagagtacctgggacataagtaggttttctgtaaatgtttgtgacctttggctccgttgtgaggagagactgagcatacattactccacgctacaaataattaactatctatttgatttgactttcagtgtggagtgcagagctttttttctaaaagtgctaataaagccagtcctcattaaaaatatagtcagatgagtcagcaaagcaagttatttcaaaatttgaagaaatgagacaaaacaactttttgagtaatactataacctatgaaaatttggcagttagcaattgaaaaccttgtactttatcatctgtcccttaaccatggcctaccattgaggagaaaagattagagagcttgacataggccacaatgaagaggttctgaagagtcaaactattattgctttcatttcataaaccacactgttaaattcatttgtgtgtttggcatgggtgtgcacacatgtgtttcctaggttaagcatttaggaaaaacattatgaaatatgacatagacacaaaaaagtttattaaaaatttatgtgagcttggtgtttcaaa

SEQ ID NO: 68312 - DNA, 791 bp, Homo Sapiens
  misc_feature (122)..(122): n is a, c, g, or t
  misc_feature (152)..(161): n is a, c, g, or t
tggtgacctcacaatcacgtcggtatgattgggcacccttgcctactgtaagagaccctaaaaccttggtgcagtggtggggaccacaaaacaaccagggaggaagagatacatcatttttnagtattaaggaccatctaagacagctctannnnnnnnnngccactttatgattatgtgtcacacccaagtcacagaaataaaaaactgactttaccgctgcaatttttctgttttcctccttactaaatactgatacattactccaatctattttataattatatttgacattttgttcacatcaactaatgttcacctgtagaagagaacaaatttcgaataatccagggaaacccaagagccttactggtcttctgtaacttccaagactgacagctttttatgtatcagtgtttgataaacacagtccttaactgaaggtaaaccaaagcatcacgttgacattagaccaaatacttttgattcccaactactcgtttgttctttttctccttttgtgctttcccatagtgagaatttttataaagacttcttgcttctctcaccatccatccttctcttttctgcctcttacatgtgaatgttgagcccacaatcaacagtggttttattttttcctctactcaaagttaaaactgaccaaagttactggctttttactttgctagaacaacaaactatcttatgtttacatactggtttacaatgttatttatgtgcaaattgtcaaaatgtaaattaaatataaatgttcataataaaccaaa

SEQ ID NO: 68313 - DNA, 1061 bp, Homo Sapiens
  misc_feature (838)..(976): n is a, c, g, or t
cctggctggcacttcactcttcaggcacacgatcaaattctctccattttcgtctagcagtggaagaagactgaatatctcgtataccagaaacatgactctgaaaagatggtaaagaacaatgtagccatagctgtaacgtataaccatgatgggtcttatagcatgcagattgaagataaaactttccaagtcctatggtaatctttacagcgagggagactgcacttacctgaaatgttctgttaatggagttgctagtaaagcgaagctgattatcctggaaaacactatttacctattttccaaggaaggaagtattgagattgacattccagtccccaaatacttatcttctgtgagctcacaagaaactcagggcggccccttagctcctatgactggaaccattgaaaaggtgtttgtcaaagctggagacaaagtgaaagcgggagattccctcatggttatgatcgccatgaagatggagcataccataaagtctccaaaggatggcacagtaaagaaagtgttctacagagaaggtgctcaggccaacagacacactcctttagtcgagtttgaggaggaagaatcagacaaaagggaatcggaataaactccagcaaggaaatggccagttaagtagtgtcttctctctccaccaaaaagaggaagtgcctccagcttttctgggggtctcataaagagcagttttactaaatgattgtatgcttatgctgaacacctttcatattggagaatcatgcatttgggtcactaattatctcaaaatatttcatactaataaagttgaattattttttattggaagccnnnnnnnnnnnnnnnnnnnnnnnnnnnnnnnnnnnnnnnnnnnnnnnnnnnnnnnnnnnnnnnnnnnnnnnnnnnnnnnnnnnnnnnnnnnnnnnnnnnnnnnnnnnnnnnnnnnnnnnnnnnnnnnnnnnnnnnnnnngggcgcggggccccaagaggaaagagaacggggccatagttgtccccaaaaaaaccggggccaagactagggttggaatccccac

SEQ ID NO: 68314 - DNA, 413 bp, Homo Sapiens
  misc_feature (134)..(147): n is a, c, g, or t
ccccaaaaggcatacttaggtgacacctattagaaccacgcttggtgttaacaaaaacaaatgcatggtcggttacggtccggaattcccgggatatcgtcgaccacgcgtcgtctagatcgcgagcggcgccnnnnnnnnnnnnnnctgtctgcttttttcttatgtctcttgttgagtttaatattttcaggggttatttgtgcttgtgttagatcattattaaaatatatccaatgtcccttttgatactggtgctctgctgagaatgtacagttggcattaaacatcccaggtctcatccttcaggaatttggcagttcaatgagaagagggagacaaatataaagatgaggacagaagcatctctacagatgaaaattacataaataaaacattctccatcaacaact

SEQ ID NO: 68315 - DNA, 892 bp, Homo Sapiens
  misc_feature (382)..(391): n is a, c, g, or t
  misc_feature (459)..(468): n is a, c, g, or t
  misc_feature (621)..(677): n is a, c, g, or t
aatctagaattttttacatatttttataatactgttagcccagttattggatgagtgaaagataatcatgttggttttaatagtgtcaatttttgtaaaataaaaattaaacttcaaactctttactttataaattgtccataggccacactttaatatcccattataaagggaaggacagtcttcatttctcctggttattggtttgtttgtcattaaagatatattttgaatccatgaaattgctatgctaaacagcctttacatgtatggtctggttaaagttcctttgttccttttgttttaataaaatgtgtcactgattttttagctcaaaatcatcactgttaatttccagtcaccccaaatatggttaaaagannnnnnnnnnaatcatgaagagaaaattagtagcatttctttctctccccattatttattggttttcctcactaatcnnnnnnnnnnagtccaaaagccaaaaatatttatcttggttttacattttaatttccattcttaattgtaatttttttctttaaataaggaaaccaatataatctcatgtataaaaacttaaatattttacaagttacatatagcatcattctaaaataagannnnnnnnnnnnnnnnnnnnnnnnnnnnnnnnnnnnnnnnnnnnnnnnnnnnnnnnncagtggttatttttgcttgtgttagatcattattaaaatatatccaatgtccctttgatacttgtgctctgctgagaatgtacagtttgcattaaacatcccacgtctcatccttcaggaattttgcagttcaatgagaagacggagaccaatataaagatgaggacagaagcatctctaccgatgaaaattacataaataaaacattctccatc

SEQ ID NO: 68316 - DNA, 1080 bp, Homo Sapiens
  misc_feature (574)..(583): n is a, c, g, or t
accatcttgtgaaaggtttctgaaactcgataataaaaagcggttggtgtaaattattcttttgtgtcacatttttagaaggaaaaacataaaagaatgtatccttagtactggttcttaaacagcccataaaaacccattggcctgaagcttatatctcaggcctatgcccatcttatagtcttggaagacaaaaggctggtagagacagtcttcagtggcttcagtgatgctctgtagaggccagggtgtcttgagtgctgtaactcccaagcactgggctagcctgacttctgtatctccctaccaccacccccttaaaaaaataaggtaacagcaaatctatagtaaaaccatgtctgcatagaacgtgttcaaatcctctgttttcattaaatgtaaaagatgctgtctccattaagttgaatatttggaattggagaagccattgattattattttgagtttctgtaatgttttatagaaaagtaagatgcttattcagaatttaagaatgaaggcaactgaaatatgcattgttgtagttatttatatttcaaactaaaaataagcnnnnnnnnnnggctggtttgagaaaaatcaggtaaaattgatgaaacggatgttgtgtttctctttccatcatctggtttttaccatttcactcagtaggtatttttagaacacacttatttgaggaaagagacatcagatgcacaattttacatttataaaggaacaaatggggaaaactgaaaactaaaaattttaaatgtattaaatgccatccctgagcctaaatctagtatttgtagtttatttctaggtctgctagaacctgaaaacctgaatgaaaaaaggtgtgctgacactaatcaagtcctgtgaggtttaaattattgacctatccactctacctccattgtacaaaaaatattttacaacaagcctgggtaagattcaacagcatagtagttttgtatccaaggttacttccccacaaccactttaaacataagaaatgtggtggcaatataaagtttgtagcctttccaataaaggtttataaaacagttaaaa

SEQ ID NO: 68317 - DNA, 849 bp, Homo Sapiens
tggaggagtataggacagaggaccaaaatacacagcaggtagtgtagctctctgctaggagctcaaagcaacacaacttgtatcaaaatcacaactggcagagaagctggtggatccaatcctttcttcatctgttgttatttagaactcacctctcacactctgttctttagtgtccttacctttatcttaccacacacatgggtgtttctattatccttggaagcacagacctcgggcatccccttattgcctgatgggccaacaccaacagttacggagtgcttgagaaggggcaagtttcacagaaatggccagatagggccttcctacagagcagcaagagtaggccaagcagaaagactgctgaggtaacacggaccccagcccctgtcagggcctctgccaaggaaataatatggaccatttacctggcaggcagtctgctctctctcaggatcaccacgcatctcaggattggtctaaacttcaagtctcaaccaagtgtctgaagtgaactttgcattgaataaatttttgccatggaaagaacatcaaacaagccactcatctctacagagataagaaaacaagtttggcagagcaagagacagaagaccgtggagaaatcagaagggggaacagtcagtttagttaaggatggaacctgggaaaggccaccattcctgcttgatggggctctgatttgctcttgctcaagtggaataaaaccccatggtcttcttgacatgattcttgatcttttctccactgagacacacttaagtgatgatccttacaggactgacaccctaatgccaataaaagttgctcattatggactgctac

SEQ ID NO: 68318 - DNA, 1454 bp, Homo Sapiens
ttctttgaatgtttactaagcagtcagaaggtgacttactccattccccagttccagcccctgagcatagagggtttagggttaggaggagtaccacagactgaagaggaagtagagttaagggcttggcaagttgcccactcctatccctggtctagctgcctcagaactaaaggaggcctggaactaacaagtcactcccttccagattagatgaggccagctggcctttggatgccccaggaagaggtggtggcagcagtggcatgagggatccctctgtaactccacatgccaggtcatctgcactggattagatgtccatttcaaattgtgcgtcatcgggtatctcttcctctgtctcctgctccttcagctcctccagcttggagagaggggctgttggaggagttgtgaccccgggaatctgagggaggcagcaggggggtgtccgggcaatgggtgagttcttgcactccagcaggaactttcggtcgtagatgatcctggtgcctctggttaggagaggccaccatcggccgtccaattctcttcttcggtctggttagctgaggtgatgggatttcccctttgagagcagggactgaaggaagcagactggcctgctgggcatcagtgcattcagttgaattttggataacttttatcatagggttccaagcaggatctggattgtgaagtccattaaacagagggcctcctggaacatcagcaagctgaggatgagagggtattatggtgcctccatacatggaaattggcagacccataggctgatgaaaaatgttagagggggctaccattccagaatcatctctctccattggctgatgttgggagaatgtgcttgggtctgataattgttgatgcattggatggttccccatcacagattgcgaccaacctgataagccttctgacacagcattgacaccaaatgaccagattccactgtgtccaacgggagcgacaaaactggtccccgccggggcttgtgcaacagaccctccttgccgaattcgggccagtctctctgttccaattgggggaggtatctttcgatcttgactggcactgactccttttggttggcccaacgttggtggggcagaagtggctgaaagaggtgaagatgatcccgaagaaacagatggaataggagagtcacctggtggcaaaatatttctctattgttttattacatataaaaaactataagaatatgagaaaccttgttggaaagatctattccacaacataagttctgtaaagaaaatctttcattttaaaagaacattcaaataaaacataatttctatagacattatcctacacgatttctgcctataataagtatacaacagtctaaaaaatgttttcccacccggccgtaatggccgaattcccgggcatatgtccggtaccgtcgactg

SEQ ID NO: 68319 - DNA, 681 bp, Homo Sapiens
aaatacaaaaagaagatcgagggaatggtcaggagacccgatatatctgagatagaagaggccacgactccatgtccattctgcaaatttcttctcccagagtgtgaactcctctgtcctggatgtaaaaacagtatcccatattgcattgcaacaggtcgacacatgttgaaagatgactggacggtgtgtccacattgtgacttccctgctctatactcagaattgaagatcatgctaaacactgaaagcacatgtcctatgtgttcagaaagattaaacgctgctcagctgaaaaagatttcagactgtacccagtacctgcgaacggaggaggaactgtgattggcacgtgcagatacaatgctcctgagaagacagcattttccacaggaggctgtttcctcccctggtggatttaagagacggtcctttctggatacagagaaatgaaacaacggtgacctctccaggtcggcactttccacttctgtacggtggcaaaacgatgacatgtaaccttgctgtttattgtactttgtatattatttcctcttcaaagtctttcttacatactctatcctctgcactgttaatagtaacctatgacataattgtaaatattcagctttttgctaacttttgtattttgaaaaactttaaaataaaattgttgactag

SEQ ID NO: 68320 - DNA, 550 bp, Homo Sapiens
gtgtacggtctgttaccgtacagaagtggaaagtgccgaccttggagaggtcaccgttgtttcatttctctgtatccagaaaggaccgtctcttaaatccaccagtggaggaaacagcctcctgtggaaaatgctgtcttctcaggagcattgtatctgcacgtgccaatcacagttcctcctccgttcgcaggtacttgggtacagtctgaaatctttttcagctgagcagcgtttaatctttctgaacacataggacatgtgctttcagtgtttagcatgctgtttaggggagggaaaggcagagtaaattaaatatataacattcctttagcttagggttactctaatgagaaagacaacaactttctgtctacacctcttaacacatgtccaccatgcaatttgagaatcagaactattcagtctcatgcaagatcctctttaaagataatattctcaaaggccacaggaggttcttcccaaaagacaatttgagtctttagagatccttaggaacacaaatagaagaacgcttcggaagacaaga

SEQ ID NO: 68321 - DNA, 971 bp, Homo Sapiens
ctgcccacccccctcacggaggacatgatgaaggaagggcttcctctgctctgtaagacaggcaatgggctggctcatgcttatgtcaagctggaggttaaagagagggacctgacagacatctacttgctgcgctcctacatccatctgcgctatgtggatatttctgagaaccacctgacagacctgtctccactcaactacctcacccacctgctctggctcaaggctgatggcaatcggctgcgaagtgcccagatgaatgaactgccctacctgcagattgctagttttgcttataaccagattactgacactgaaggcatctctcatcctcgtcttgaaaccctgaatctcaaagggaacagcatccacatggtgacaggtctggaccccgagaagttgatcagcctgcacacagtggagcttcgggggaaccagctggaaagcaccctgggaatcaatcttcctaagctgaagaacctctacctggcccaaaacatgctgaagaaggtggaaggcttggaggatctgagcaatctcaccaccttgcatcttcgagacaaccagattgacaccctgagtggcttctccagagaaatgaaatcattgcagtacctcaacctgaggagatcaaagacgctggccttcagacctgatcagactcccaggggcagccaccacatgtatgacagaggacagaggatgcctgtttttgccccaaagctggaaattcatcacaacctgaggcccaggatctgctctgtgccggtcctctgggcagtgtggggtgcagaatggggtgcctaggcctgagcgttgcctggagcctaggccgggggccgccctcgggcaggcgtgggtgagagccaagaccgcgtgggccgcggggtgctggtaggagtggttggagagacttgcgaaggcggctggggtgttcggatttccaataaagaaacagagtgataaaa

SEQ ID NO: 68322 - DNA, 878 bp, Homo Sapiens
ttgatcagcctgcacacagtggagcttcgggggaaccagctggaaagcaccctgggaatcaatcttcctaagctgaagaacctctacctggcctaaaacatgctgaagaaggtggaaggcttggaggatctgagcaatctcaccaccttgcatcttcgagacaaccagattgacaccctgagtggcttctccagagaaatgaaatcattgcagtacctcaacctgaggggcaacatggtggccaacctgggggagctggccaagcttcgagacctgcccaagctgcgagcgttggtgctgcttgataacccatgcacggacgaaaccagctaccgccaggaggccctggtgcagatgccataccttgaacgcctggacaaggaattctatgaggaggaggaacgggctgaggctgatgagattcgacagaggctgaaggaagaaaaggagcaggagcctgagccccagcgtgacctggaacccgaacagtcattgatctagcagcagttctagcctctaaagatagagatcaaagacgctggccttcagacctgatcagactcccaggggcagccaccacatgtatgacagagaacagaggatgcctgtttttgccccaaagctggaaattcatcacaacctgaggcccaggatctgctctgtgccggtcctctgggcagtgtggggtgcagaatggggtgcctaggcctgagcgttgcctggagcctaggccgggggccgccctcgggcaggcgtgggtgagagccaagaccgcgtgggccgcggggtgctggtaggagtggttggagagacttgcgaaggcggctggggtgttcggatttccaataaagaaacagagtgatgctcctgtgtctgac

SEQ ID NO: 68323 - DNA, 3714 bp, Homo Sapiens
  misc_feature (40)..(40): n is a, c, g, or t
  misc_feature (2933)..(2996): n is a, c, g, or t
  misc_feature (3544)..(3544): n is a, c, g, or t
gaagctgacacaatactctgcgccagaccatcaccacatntggtctctcaaaaccattcaaattcctgagcacttgatggctcatgctagttcagcaaatattgggcccttcctggagaagagaggctgtatctccatgccagagcagaagtcagcatccggtattgtagctgtccctttcagcgaatggctccttggaagcaaacctgccagtggttatcaagctccttacatacccagcaccgacccccaggactggcttacccaaaagcagaccttggagaacagtcagacttcttccagagcctgcaatttcttcaataatgtcgggggaaacctaaagggcttagaaaactggctcctcaagagtgaaaaatcaagttatcaaaagtgtaacagccattccactactagttctttctccattgaaatggaaaaggttggagatcaagagcttcctgatcaagatgagatggacctatcagattggctagtgactccccaggaatcccataagctgcggaagcctgagaatggcagtcgtgaaaccagtgagaagtttaagctcttattccagtcctataatgtgaatgattggcttgtcaagactgactcctgtaccaactgtcagggaaaccagcccaaaggtgtggagattgaaaacctgggcaatctgaagtgcctgaatgaccacttggaggccaagaaaccattgtccacccccagcatggttacagaggattggcttgtccagaaccatcaggacccatgtaaggtagaggaggtgtgcagagccaatgagccctgcacaagctttgcagagtgtgtgtgtgatgagaattgtgagaaggaggctctgtataagtggcttctgaagaaagaaggaaaggataaaaatgggatgcctgtggaacccaaacctgagcctgagaagcataaagattccctgaatatgtggctctgtcctagaaaagaagtaatagaacaaactaaagcaccaaaggcaatgactccttctagaattgctgattccttccaagtcataaagaacagccccttgtcggagtggcttatcaggcccccatacaaagaaggaagtcccaaggaagtgcctggtactgaagacagagctggcaaacagaagtttaaaagccccatgaatacttcctggtgttcctttaacacagctgactgggtcctgccaggaaagaagatgggcaacctcagccagttatcttctggagaagacaagtggctgcttcgaaagaaggcccaggaagtattacttaattcacctctacaggaggaacataacttccccccagaccattatggcctccctgcagtttgtgatctctttgcctgtatgcagcttaaagttgataaagagaagtggttatatcgaactcctctacagatgtgaaggaatggacaagagttgagcagcctttctgctgattatcacacatcatgagctgagtgactgcagcttgccaaatctttgtgtttctgggtctgaccaattagcttagttcttctcctgcctaattttgaactagtaaagcaaagtgagtcatcagattataagttactgtttaaaagaaaaatgctgtgtattcatgctgagctgattcagttccctccttcttacagaagtattttaattcacccccacaccagaaatgcagcatctttgtgggtacgtctttttcacaagcctccaaggctccttagatcaggtcgttactaaaagtacattaaaacactcttgtttatcgaagtatattgatgtattctaaagctagtaaacttccctaacgtttaattgccctacagatgcttctcttgctgtgggttttcttttgttagtggtctgaaataattattttcctgttctattaatacatagtgtattttgcacaaaaaaattaacctggtcaatagtgattaccaaaatatatattaataatcttggcaatttttgacattaattatgaaacattttagcccacgttagttctacattattcttcacttaaactcagctactgcaaattttgtctttctgtaaatgttattaaaatatccagtgagctctttagaaggactcagtattatttcaagactatttttgaggtaattctagccttttaaaatattctacagacctacggggcttaaaagaaccccagtaccgactaagcaaataggcaaaagacatgttggaaatgtagtatagtacttgaaacagtcactatcatagggataattggtgcatcctgtgtaaatggaagctgagcttgacacctggtgcttttaagtagggataaagtcatcctctcactgcaagcacagcatacctgtacctccaaaagtgacgttttagtgaacaggccgttttcaacacttgtgccttggggtgttcattgaagctttgtgaaaactactgatgttttctcagtctccttaaagttacgtccatgctttaaaatgtctgtgtaggagagaagtggggtttataatgttttctctaagatatctttgctgctttccagactttgaaactattaagcttcttaactgcctcttaccggaaatacttctggggaaacttcatggtcccaaaatgtcattgccatacagcttcactagagttctttgaaccacagctgaaaagagctttgtattattttttaattccctccccagatatcatttaggagtattatataaaggtggtgggcaaaaacaatgtaaggagcctttccagttatcttgagttgcagctctgtagtttcttgaggccaaacacactgtattttacaagtcaaaatataatttacattaatcactatgttaatgagtatgtaaaacattcttttgcattgatgaattttgtatctgcttccattaaaagcataacagccatacgnnnnnnnnnnnnnnnnnnnnnnnnnnnnnnnnnnnnnnnnnnnnnnnnnnnnnnnnnnnnnnnntttattttgtcgggcgccctcgcaccctcgaaaatgcctttcctaaaacccttcgatttggccggcgccggaccccagtaggctaagtggaaacttggtccataaactggtttcccctagggataaccctgggcccctggacctaaggggctttggaatctctcctccaaataaaagaacgcccccgggcgggcaaacccgaagggtttttgaaaccaaaccccagaatggaacctctcgaaagggcattttacttggaattttattgaaacggagtgggcctgaggccgatgcctttaaatatcctatattaagggccccgcgccccgttgaacatattttttcaaggaaatacctgggtggatattttcatatataagcacttccgcgggcacgaatatgggaaaaagccctctcacccaaaaccggcagagtggattggaaacccttggtgaattcccacacgcggagtagattcaggacgacactggggagagtgagtttgcggcatatagaatattttttccacacccctctggtggcaacanaccgctagatgtgcgtgtaacaacaagcttgtctcgccactctatttgtgcgtgatcacaagaattgcaaacacacgccgaaaagcgttgatgagggcataaaccctccacgaacccctgagacatgactcgcatcctgtgtctaaagacgacatcatacgtgtgtctgt

SEQ ID NO: 68324 - DNA, 475 bp, Homo Sapiens
  misc_feature (13)..(13): n is a, c, g, or t
  misc_feature (22)..(22): n is a, c, g, or t
  misc_feature (36)..(36): n is a, c, g, or t
  misc_feature (75)..(75): n is a, c, g, or t
  misc_feature (130)..(130): n is a, c, g, or t
  misc_feature (194)..(194): n is a, c, g, or t
ggccccgcccccnttcctgggngaaccttcccaccngcatttgaacatccccctggttttggtgattaaaccagnaagtccagccatccggggtattggtaggctggtcccccttccagctgaatgggcnccctgggaagcaaaccctgcccagtggttatccaaggctcccttacataccccagcacccgacncccccaggactggcttaccccaaaagcagaccttggagaacagtcaggtctgttgctgcttttattgtttcctacagtagacacagcagtaggtggagttagttactaatcagtagtactatgtgtcattgttaactttttggttgcagtctggaaacatatttattaatagtctcttcatcatagaaagtttagaaaataaggaactctttatcatagaaaattttaaaaataaagaattttatattaaaaaagcccacaaacccataatctcaacacaa

SEQ ID NO: 68325 - DNA, 1052 bp, Homo Sapiens
gtgtacgagaccgcttagtgatgtacactccgcaacaaaagccgacataggcttatagggagagcagaggccccaatacgcagccccgtcacagggtgccggtcatcatgcgatggcaaaccagttcccgatgaaagccggctgtgggcaaagcaaataattgagtaaccacactatggcaccccagatttcgagctgtataacggtcctatttgtatggattgtggacgatagcatttccaacaaggaacagatataaaatgatagaagttaatagactgactatagggaattggccctggggaccagaattcggcacgaggtgaatgccctggacttttccatgtcttatgctgtaatatcctgtgcagaaataggaggaaattttttcaggactgctatatggtttcctgtaaaagaaaaaaacttctgtttgtttttagcgatcattattcacaatttacagtgattaacttggcaaggcttccttccgtgtttatccctgtggccatcatttaggtcaggaacagtcagaaaaatatttattttatttttattttgggtgtctgcaaaggtaaaaatccattaaaaccttaagttaaatataaatgttacaactcaatgtttgcttttagattttatacagtatttgttttgttttggttttgagtgtatataatgcagcattagcaatatggttccaatagaggagttaaatatatattgttaaaggagacctgtagcagtcaaagattttattgatttaatgacaaaggaaattaatgaaaatgtttttgtttttctgctgtaattctgcattaagctcacatgaaaatcatgattctagagtttggaatgcaaaattaattgttttaccctcaagctgggaatatttttcaaaataaatactataatatagatatcaaattattacctccccatgttatgttgaaaatttttttattaaattgataaaactttatttccattatattcataatgttctgttatacataacattaaaatgttcattaaaatcaatgttgaactgc

SEQ ID NO: 68326 - DNA, 570 bp, Homo Sapiens
gcacgagggataatttcaaatgggaagaaaatgaacctactcagaatcaattcggtgaaggttcactttttttctttgtaaaagaatttcaagtgtgtgctgataaggttctgggaatagaaagtcaccatgattttttggtgaaagtaaaagttggaaaattcatggccaaacttgctgaacatatgttcccaaagagccaggaataacaccttgattttgtaatttagaagcaacacacattgtaaactattcattttctccaccttgtttatatggtaaaggaatcctttcagctgccagttttgaataatgaatatcatattgtatcatcaatgctgatatttaactgagttggtctttaggtttaagatggataaatgaatatcactacttgttctgaaaacatgtttgttgctttttatctcgctgcctagattgaaatattttgctatttcttctgcataagtgacagtgaaccaattcatcatgagtaagctcccttctgtcattttcattgatttaatttgtgtatcatcaataaaattgtatgttaatgctggaaagaaa

SEQ ID NO: 68327 - DNA, 1810 bp, Homo Sapiens
  misc_feature (134)..(134): n is a, c, g, or t
  misc_feature (137)..(137): n is a, c, g, or t
  misc_feature (164)..(164): n is a, c, g, or t
  misc_feature (179)..(179): n is a, c, g, or t
  misc_feature (338)..(338): n is a, c, g, or t
cgctaaaagcaacactccttgatacgatgagaggagatgtgatgatgggtccagcaatatgaatcttgcctcagagatgtagaagtcaggagcagccacactccccagcgagggggtgtcggatcacaaccttnacntgcaggagagatgggaggaagccactntgatgccgatgcaantacttcctgaaccggatgctcagatccgagacagctggctggacaacatgactggggtgaagatccgggagcgcccacctgcccagcgccagccctcagactcggaggaggaggacagcttgggccagacctcaatgagtgcccaagccctcttggagngacttttggagctcctattgcctagagagacagtggctggggcactgaggcgtctgggggcccgaggaggaggcaaagggagaaaggggcctgggcaacccagttcccctcagcgcctggaccggctctccgggttggccgaccagatggtggcccggggcaaccttggtgtgtaccaggaaacaagggaacggttggctatgcgtctgaagggtttggggtgtcagaccctaggaccccacaatcccacacccccaccctccctggacatgttcgctgaggagttggcggaggaggaactggagaccccaacccctacccagagaggagaagcagagtcgcggggagatggtctggtggatgtgatgtgggaatataagtgggagaacacgggggatgccgagctgtatgggcccttcaccagcgcccagatgcagacctgggtgagtgaaggctacttcccggacggtgtttattgccggaagctggacccccctggtggtcagttctacaactccaaacgcattgactttgacctctacacctgagcctgctgggggcccagtttggtgggcccttctttcctggactttgtggaggaggcaccaagtgtctcaggcagcgaggaaattggaggccatttttcagtcaatttccctttcccaataaaagcctttagttgtgtactggggccttggctgtgctgatggccagaaaccaggggccttctccacagtccctttggacttgtcttggtccctgagtactcccatgaagatccttcttggaggtgcctgtcaggtatcctgtggcctccctgcctggactctgcttgccgtgtaaacacccccaactgcgctgctctgtgctcctctcccaggtttcttgttcgattcctcttaggtctttggctttcaggacctcagattctttatccttgtagccaccagaggacagagccccagaagtggatgttttaggcccagaaggaccagggcatcgagaagacattgggaccctgttgggggtgagcatggaaccctcttactctcgcttcaccctctcaagctccttagatgctgggcagaagtgggatgagtggcccaagaccgagatccctaaggttctgagagccagtgtcttccctaatctggctttcctctatccttgccgtcgttcccacagcccttcagtgaagtgcaaactcagtggccaagtgtgggccaagtgtgcattgtactggcacagagaggggcagtgactcactggagatcacaggaatcaaagggctggcccagacccagtgggctcctttcccagacctttcttggcacaaagcctttgctgccctggcctttggaagccctgcggcctacattctctggaccccactatgtgcctggcacaggcctaatgccttgaggaaactgaggtagctgggttggtccccttccaggaatcccggcggccga

SEQ ID NO: 68328 - DNA, 1318 bp, Homo Sapiens
cagtcgacggtaccggacatatgcccgggaattcggccattacggccggggagtcctcttccgggtgatggcggccgggtgccccggatgtagcccgggcgcaagcatctcttcttttttccacctcgccttccgcggattcccagcttgagaaacacctctttgccccgtcatgccaaagaggaaagtgaccttccaaggcgtgggagatgaggaggatgaggatgaaatcattgtccccaagaagaagctggtggaccctgtggctgggtcagggggtcctgggagccgctttaaaggcaaacactctttggatagcgatgaggaggaggatgatgatgatggggggtccagcaaatatgacatcttggcctcagaggatgtagaaggtcaggaggcagccacactccccagcgaggggggtgttcggatcacaccctttaacctgcaggaggagatggaggaaggccactttgatgccgatggcaactacttcctgaaccgggatgctcagatccgagacagctggctggacaacattgactgggtgaagatccgggagcggccacctggccagcgccaggcctcagactcggaggaggaggacagcttgggccagacctcaatgagtgcccaagccctcttggagggacttttggagctcctattgcctagagagacagtggctggggcactgaggcgtctgggggcccgaggaggaggcaaagggagaaaggggcctgggcaacccagttcccctcagcgcctggaccggctctccgggttggccgaccagatggtggcccggggcaaccttggtgtgtaccaggaaacaagggaacggttggctatgcgtctgaagggtttggggtgtcagaccctaggaccccacaatcccacacccccaccctccctggacatgttcgctgaaggagttgccggaaggaggaactggaagaccccaacccctacccagagaggagaagcagagtcgcggggagatggtctggtggatgtgatgtgggaatataagtgggagaacacgggggatgccgagctgtatgggcccttcacaagcgcccagatgcagacctgggtgagtgaaggctactcccggacggtgttattgccggaagctgaccccctggtggcagtctacactcaacgcttgacttgactctcactgagctgctgggccagtttgtggccttcttctgacttgtgagagcacagtgccagcgcagaaggagcattcatcattccttcataacttatggcgggctgtgcgagcaacaggctccatcttgtgtgtcgatct

SEQ ID NO: 68329 - DNA, 735 bp, Homo Sapiens
  misc_feature (480)..(518): n is a, c, g, or t
  misc_feature (520)..(550): n is a, c, g, or t
catcgctgactcttgaggaaccaccaagagtttgtggatctggctgcctggagacacctagcttgagctccagagaactaacaggccttagctaaggtttgggggaaaattcatctcctctccttcatgactattttctttgttatttaaaaggacgttatgaaagggcttagaccaaaataaatcataatgttacttgagccaccttatatagctgcttggagagtctatgtagttctttctgcatgcattaaaaatgtttagaaatgcttcagcaatggtatttttttcctcaaagaaaccatggccagtagctaggtgttcagtaggaatcaaagaaaaatcagtaagagctccagattaaacctgatttctaactgaaggaacattctgaggaaaaatacttacttaaaagtaaaaaaggtcaatgtgaaaaccctttttgacctgaaaaaggccttagtatggtcctccatgcannnnnnnnnnnnnnnnnnnnnnnnnnnnnnnnnnnnnnncnnnnnnnnnnnnnnnnnnnnnnnnnnnnnnntcctgtttttactgatttttattgattttgttcaaagatatctggggattggattggggaatgcttaatctgactattgaaagaaacatggatccctggagtatttcagatacggggttaccgccccagactgcctcccgccagcccacattaggtctcattttccctcatgatggcgaaaaaca

SEQ ID NO: 68330 - DNA, 2069 bp, Homo Sapiens
catagtgaatatagaacaagtgtgtacaaaaagcaggctggtaccggtccggatatcccgggatatcgtcgaccacgcgtccggtagtcttacctaaactctggtgatccaaacaaaatggcttcagtggtgcagatgtcacctacatgttattctagtactagaaactgaagaccatgtggagacttcatcaaacatgggtttagttttcaccagaatggaaagacctgtacccctttttggtggtcttactgagctgggtgggtgtctgttttgagcttatttagagtcctagttttcctacttataaagtagaaatggtgagattgttttctttttctaccttaaagggagatggtaagaaacaatgaatgtcttttttcaaactttattgacaagtgattttcaagtctgtgttcaaaaatatattcatgtacctgtgatccagcaagaagggagttccagtcaagagtcactacaactgattagttgtttagagaatgagaaatggaacagtgaggaatggaggccatatttccatgacttcccttgtaaacagaagcaacagaagggacaagaggctggcctctacatcactctcaccttccaaatcttgtggaagtgcatctacttgccagaaccaaattaaccttacttccaagttctggctgcttgcaggtggaactccagctgcaagggagttagggaaatgaaggtcttttttttaaaagcttctcagccttcctagggaacagaaattgggtgagccaatctgcaatttctactacaggcattgagaccagttagattattgagatattatagagagttatgaacacttaaattatgatagtggtatgacattggatagaacatgggatactttagaagtagaattgacagggcatattagttgatgaaatggagtcatttgagtctcttaatagccatgtatcataattaccaagtgaagctggtggaacatatggtctccattttacagttaaggaatataatggacagattaatattgttctctgtcatgcccacaatccctttctaaggaagactgccctactatagcagtttttatatttgtcaatttatgaatataatgaatgagagttctggtacctcctgtctttacaaatattggcgttggcaggatttttcctttttaaccattccaatcggggtgtagtggaggtttcattttggttttaatttgtatatccctgatagctataattgggtcatagaaattctttatacattctagatgcaagtctcttgtccgatatatgtattgagatattacacctagtctgtggcttgactgttttctttatgtcttttgatgaatagaagttttaaattttgacaacgccaaatttatttctttcttttggttgatattttttctctccaatttaaccccaagatttcagatattctgctctattatataaactttatatttttatatttgtgatctaccttgaattgatatgtatgttgtgaattatggatcagggttctttttttcccccatacaagtatccagtcattgtaacactgtttattgaaagaattatcctttcctcattaaattaccttgccaattagtaaaaaatcaattaaccataatggtggatctgtttctggactttctgtttggttacactgaaatgtttgtccatccttgcactcactcataccataatgcttgaattactgtagctgtatagatgctccttaagttgggattaccttgtaataaacgcatgtaagttgaacaaccagcgaaacagcgcgcctcgcagtggaaaaacacaaggggcgcaaaagtcatccaagagccacaacgacgccccaaataggccgaaagggccaaagggacaccaagtaaaacacggccgtcaaaacgaaggcaacgggcaccaaacaggaaagagaactggtgaagtggacaagcagtaggaacagaacaacaagggaacaacatggaggaaggctgcataccgaacaaccaacacaaggagacaaacatgaaacaaagcacgaacaat

SEQ ID NO: 68331 - DNA, 899 bp, Homo Sapiens
  misc_feature (44)..(44): n is a, c, g, or t
atacagaaccgtgacaatgatttcatgggtatcagcaggcagangacagtgaagaagataagaagtttctgacaggatatgatggaatcatccatgctgagctggttgtgattgatgatgaggaggaggaggatgaaggagaagcagagaaaccgtcctaccaccccatagctccccatagtcaggtgtaccagccagccaaaccaacaccacttcctagaaaaagatcagaagctagtcctcatgaaaacacaaatcataaatccccccacaaaaattccatatctctgaaagagcaagaagaaagcttaggcagccctgtccaccattccccatttgatgctcagacaactggagatgggactgaggatccatccttaacagctttaaggatgagaatggcaaagctgggaaaaaaggtgatctaagagttgtaccacctatataaacatcctttgaagaagaaactaagaagcatttgcaaatttctcttctggatattttgtttattttttctgaagtccaaaaaattatcattacagtgtaccatattaagccatgtgaataagtagtagtcattatttgtgaaaaattcccaaaaagctggggaaaacaaatgtgtaacttttccagttacttgacacgattcagtgggggaaaaccagcattttttattctattgataccaaagcatttctaataagagcttgttaaatttaagaataaagttatttaaaatattctgagtatagtatattaactggcattgtaattttgatgatacaaagattgaaagatcataggaaagcattgcccttcatcacagaagtattcaactctgacaaatcaatatgtcatcctgaattaataatgccttaataaaagtacatcctcctgct

SEQ ID NO: 68332 - DNA, 1422 bp, Homo Sapiens
  misc_feature (123)..(123): n is a, c, g, or t
  misc_feature (161)..(368): n is a, c, g, or t
  misc_feature (399)..(426): n is a, c, g, or t
  misc_feature (1011)..(1019): n is a, c, g, or t
  misc_feature (1023)..(1023): n is a, c, g, or t
cgtctgcttgtgcctttgtcaattctctgcgtatcccgatcttgatacctatcgcttgatgactgtacgtcccgcaccgacgacgagccaggatcatgagcgagagcgaagacgccatacgcnaacgctcttcccgcgcgtgccgattcataatgcagctnnnnnnnnnnnnnnnnnnnnnnnnnnnnnnnnnnnnnnnnnnnnnnnnnnnnnnnnnnnnnnnnnnnnnnnnnnnnnnnnnnnnnnnnnnnnnnnnnnnnnnnnnnnnnnnnnnnnnnnnnnnnnnnnnnnnnnnnnnnnnnnnnnnnnnnnnnnnnnnnnnnnnnnnnnnnnnnnnnnnnnnnnnnnnnnnnnnnnnnnnnnnnnnnaagaattcggcacgaggcgcggctgtaggcnnnnnnnnnnnnnnnnnnnnnnnnnnnncatactcagtaagtgtttaatgaagaagagacagatggaaagagatgggcgaggaaggctgatgttacaaatataaactttgtcagcactttcaaaacaatagcaaatacacttaaatacatacaaagtttattaaaaataggttgcaactgaaatacagtagaaatggaaaactacagcagttttgatgttttctcatagtaatgcagttctgaaaagcacttttacacatattcacatttgacctcactgcccaaagatggccaaatccacttgtgtatgggtttcacaaccacacatacaaatatccctgtatgtagatatttacatgtatctgcatgttctcctgtgtatttttctatatattaacagaaaagtaattcatctgcatctctttaaagaaagtgtggatttagtcaccataaggctgccagtgtcctcaagatatttgggaggtgcctgcttttcctagaacttctgctgcaagcaagcaaatccttcctaaacactcagaaccattcactctcttactcaaacaaggaaatggtaagagcacactttcaaataaaaaccctgatagaggtnnnnnnnnntatntacactcgcatttttaatgatttatcatacaacttttattaaaagtgatttcgaaggcagtaaaaagcccctatacctctctttgaaagtgtgcctattttcctaacatatgtaagagaacattctctttgaaaatgtgtctattttcctaacatacgtatgtgtaagagaacattctctttgaaagtgtgcctattttcctaacatacgtatgtgtaagagaacaatatggtacagaaaaatcatttggactccaccaagggctttgtcaaatagaaaatttgcttgtaatcacaaagtaatttatcatcttaacaccagacaatataaaacacactgaggtccgtctccccaacatcagccacatatccatagctgaagaaatgacagtggtaacta

SEQ ID NO: 68333 - DNA, 921 bp, Homo Sapiens
  misc_feature (60)..(69): n is a, c, g, or t
  misc_feature (437)..(451): n is a, c, g, or t
tttaaaatgtagttttctcatttagtaaaagttgtctaattgatatgaagcctgactgannnnnnnnnnccttacagtgagacatttaagcacacattttattcacatagatactatgtccttgacatatgaaatgattcttttctgaaagtattcatgatctgcatatgatgtattaggttaggtcacaaaggtttatctgaggtgatttaaataacttcctgatgggagtgtgtaagctgagcgatttctaataaaattttagttgtacacttttagtagtcatagtgaagcaggtctagaaaataagcctttggcagggaaaaagggcaatgttgattaatctcagtattaaaccacattaatctgtatcccattgtctggcttttgtaaattcatccaggtcaagactaagtatgttggttaataggaatccnnnnnnnnnnnnnnnaaagactaaatgtgaaaaaataatcactacttaagctaattaatattggtcattaaatttaaaggatggaaatttatcatgtttaaaaattattcaagcactcttaaaaccacttaaacagcctccagtcataaaaatgtgttctttacaaatatttgcttggcaacacgacttgaaataaataaaactttgtttcttaggagaaaatgattctgtaattccagtgtcactaatttatattgtcctaccctctgatttttttcaggttagtgatttatttgtatacaatttaatccaaatgttatgacattcacaaatcatgaaacacagtagatatctgttataatgtggtgtatcacatggattataaagcaaagttatggtcgatttctattcttgaaaggatcaactacagtgaatcctttgcatttgaagccttaacatgcattgctttaattttgcccagggac

SEQ ID NO: 68334 - DNA, 1250 bp, Homo Sapiens
gggagtcacggtgaggcgactggacccacactctcttaacctgccctccctgcactcgctcccggcggctcttcgcgtcacccccgccgctaaggctccaggtgccgctaccgcagcccctccatcctctacagctcagcatcagaacactctctttttagactccgatatggggtcctccaagaaagttactctctcagtgctcagccgggagcagtcggaaggggttggagcgagggtccggagaagcattggcagacccgagttaaaaaatctggatccgtttttactgtttgatgaatttaaaggaggtagaccaggaggatttcctgatcatccacatcgaggttttgaaacagtatcctacctcctggaagggggcagcatggcccatgaagacttctgtggacacactggtaaaatgaacccaggagatttgcagtggatgactgcgggccggggcattctgcacgctgagatgccttgctcagaggagccagcccatggcctacaactgtgggttaatttgaggagctcagagaagatggtggagcctcagtaccaggaactgaaaagtgaagaaatccctaaacccagtaaggatggtgtgacagttgctgtcatttctggagaagccctgggaataaagtccaaggtttacactcgcacaccaaccttatatttggacttcaaattggacccaggagccaaacattcccaacctatccctaaagggtggacaagcttcatttacacgatatctggagatgtgtatattgggcccgatgatgcacaacaaaaaatagaacctcatcacacagcagtgcttggagaaggtgacagtgtccaggtggagaacaaggatcccaagagaagccactttgtcttaattgctggggagccattaagagaaccagttatccaacatggtccatttgtgatgaacaccaatgaagagatttctcaagctattcttgatttcagaaacgcaaaaaatgggtttgaaagggccaaaacctggaaatcaaagattgggaactagtggaaagcggaagagcaggtcttgatgtgtcctagaattttgccatttctgagattgagccattgaaggcattccatttctaaagcttatttagccggtgcttctaaagaattccacactaacgtgataacatggtttttgtaacaataaatgtaggatatttcctggcacatgcaaataaacctaatcattgtttctttaaaaaaaa

SEQ ID NO: 68335 - DNA, 1408 bp, Homo Sapiens
  misc_feature (601)..(601): n is a, c, g, or t
  misc_feature (633)..(633): n is a, c, g, or t
  misc_feature (636)..(636): n is a, c, g, or t
  misc_feature (686)..(686): n is a, c, g, or t
ccacttaaccaaaacactgaaactttaattgaatgagaattacacctgtcaaagacctgggcagtacactcctctctcctctctatagcactcattccttctgaggtgtcattttacagctcttttcccctatgtggtcctactcatcctgttagtacgaggtgcaactctggagggtgcttcaaaaggcatttcatactatattggagcccagtcaaattttacaaaacttaaggaagctgaggtatggaaagatgctgccactcagatattttactccctttcagtggcttggggtggcttagttgctctatcatcttacaataagttcaaaaacaactgcttctctgatgccattgtggtttgtttgacaaactgtctcactagcgtgtttgctggatttgctattttttctatattgggacacatggcccatatatctggaaaggaagtttctcaagttgtaaaatcaggttttgatttggcattcattgcctatccagaggctctagcccaactcccaggtggtccattttggtccatattattttttttcatgcttttaactttgggtctcgattctcagtttgcttcgattganacgatcacaacaacaattcaagatttatttcncanagtgatgaagaaaatgagggttcccataactttgggctgctgcttggttntgtttctccttggtctcgtctgtgtgactcaggctggaacttactgggttcatctgattgacacttctgtgctggatggggcatttaattgcagctatactggagctagttggaatcatctggatttatggagggaacagatttcattgaggatacagaaatgatgattggagcaaagaggtggatattctggctatggtggagagcttgctggtttgtaattacgcctatccttttgattgcaatatttatctggtcattggtgcaatttcatagacctaattatggcgcaattccataccctgactggggagttgctttaggctggtgtatgattgttttctgcattatttggattccaattatggctatcataaaaataattcaggctaaaggaaacatctttcaacgccttataagttgctgcagaccagcttctaactggggtccatacctggaacaacatcgtggggaaagatataaagacatggtagatcctaaaagaggctgaccatgaaatacctactgttagtggcagcagaaaaccggaatgagatctcattgaaaaaaatatatgattgtataatgtgattttttttagaatagggggaaccttatttatttgtgtgttaactgaataggaaaatgtacatactatgttcatgatagtgtgatttttttcacatttaagcaggaatgcaatataaaaatgtgaatctctt

SEQ ID NO: 68336 - DNA, 981 bp, Homo Sapiens
gaagctatgtgaatatagaacagctggttaaaaaagcaggctggtacggtcggaattccgggatatcgtcgacccacgcgtccgcggcgatatggctgccgctgtgccccgcgccgcatttctctccccgctgcttccccttctcctgggcttcctgctcctctccgctccgcatggcggcagcggcctgcacaccaagggcgcccttcccctggatacggtcactttctacaaggtcattcccaaaagcaagttcgtcttggtgaagttcgacacccagtacccctacggtgagaagcaggatgagttcaagcgtcttgctgaaaactcggcttccagcgatgatctcttggtggcagaggtggggatctcagattatggtgacaagctgaacatggagctgagtgagaaatacaagctggacaaagagagctacccagtcttctacctcttccgggatggggactttgagaacccagtcccatacactggggcagttaaggttggagccatccagcgctggctgaaggggcaaggggtctacctaggtatgcctggttgcctgcctgtatacgacgccctggccggggagttcatcagggcctctggtgtggaggcccgccaggccctcttgaagcaggggcaagataacctctcaagtgtgaaggagactcagaagaagtgggccgagcaatacctgaagatcatggggaagatcttagaccaaggggaggacttcccagcatcagagatgacacggatcgccaggctgattgagaagaacaagatgagtgacgggaagaaggaggagctccagaagagcttaaacatcctgactgccttccagaagaagggggccgagaaagaggagctgtaaaaaggctgtctgtgattttcccagggtttggtgggggggtaagggaaggggaaaaaattaaccctgctgggctgtgaagcccccttgggggaaaaattaaaggg

SEQ ID NO: 68337 - DNA, 1823 bp, Homo Sapiens
  misc_feature (1295)..(1355): n is a, c, g, or t
ggcacgaggtcgcttacctacctccctctgcaggaacccggcgatatggctgccgctgtgccccgcgccgcatttctctccccgctgcttccccttctcctgggcttcctgctcctctccgctccgcatggcggcagcggcctgcacaccaagggcgcccttcccctggatacggtcactttctacaaggtcattcccaaaagcaagttcgtcttggtgaagttcgacacccagtacccctacggtgagaagcaggatgagttcaagcgtcttgctgaaaactcggcttccagcgatgatctcttggtggcagaggtggggatctcagattatggtgacaagctgaacatggagctgagtgagaaatacaagctggacaaagagagctacccagtcttctacctcttccgggatggggactttgagaacccagtcccatacactggggcagttaaggttggagccatccagcgctggctgaaggggcaaggggtctacctaggtatgcctggttgcctgcctgtatacgacgccctggccggggagttcatcagggcctctggtgtggaggcccgccaggccctcttgaagcaggggcaagataacctctcaagtgtgaaggagactcagaagaagtgggccgagcaatacctgaagatcatggggaagatcttagaccaaggggaggacttcccagcatcagagatgacacggatcgccaggctgattgagaagaacaagatgagtgacgggaagaaggaggagctccagaagagcttaaacatcctgactgccttccagaagaagggggccgagaaagaggagctgtaaaaaggctgtctgtgattttccagggtttggtgggggtagggaggggagagttaacctgctggctgtgagtcccttgtggaatataagggggtagtgggaaaagtggtactaacccacgattctgagccctgagtatgcctggacattgatgctaacatgaccatgcttgggatgtctctagctggtctggggatagctggagcacttactcaggtggctggtgaaatgacacctcagaaggaatgagtgctatagagaggagagaggagtgtactgcccaggtctttgacagatgtaattctcattcaattaaagtttcagtgttttggttaaaccccacgtactaaacctccctttgtccgcccagaagaacaccccatatctcaacctaacaaacccctttgtctgccgtccccggttcctcaaaaaacttttcttaaaccattccccttcggtcgtccggnnnnnnnnnnnnnnnnnnnnnnnnnnnnnnnnnnnnnnnnnnnnnnnnnnnnnnnnnnnnntggctcaacgacctcctctgcctctcgttttcttcttctacctcacaaaaattttttcgcccggcctacccaaagcggttccctgtaacaaaactccaaagatggtaacttcttgacggctatctctcccttggaactcctaccccaccccgcgcacccccataccggaggcttcgaaatactctaatgtatacttccccccgcccttgcatcattccccccccactaaactgattggcaccactcccttagcctctcccccgggcttatcacccgaacgccctctctccctaccccgcgccatgtgacacgaactttgtatatttccccaccgcggtatttctaaaccctcttgtgctccgccgttgtcggcatattacaacaattctcgcacgcgtacggctgataaaaacgaggcgtcctcgaaaaagacatttgcccgtctattatttgcgcactctcctcttc

SEQ ID NO: 68338 - DNA, 804 bp, Homo Sapiens
cgccaggccctcttgaagcagggcaagataacctctccgctccgcatggcggcagcggcctgcacaccaagggcgcccttcccctggatacggtcactttctacaagattatggtgacaagctgaacatggagctgagtgagaaatacaagctggacaaagagagctacccagtcttctacctcttccgggatggggactttgagaacccagtcccatacactggggcagttaaggttggagccatccagcgctggctgaaggggcaaggggtctacctaggtatgcctggttgcctgcctgtatacgacgccctggccggggagttcatcagggcctctggtgtggaggcccgccaggccctcttgaagcaggggcaagataacctctcaagtgtgaaggagactcagaagaagtgggccgagcaatacctgaagatcatggggaagatcttagaccaaggggaggacttcccagcatcagagatgacacggatcgccaggctgattgagaagaacaagatgagtgacgggaagaaggaggagctccagaagagcttaaacatcctgactgccttccagaagaagggggccgagaaagaggagctgtaaaaaggctgtctgtgattttccagggtttggggggggtagggaggggagaggtaacctgctggcttgtgagtcccttgtggaatataagggggtagtgggaaaagtggtactaacccacgattctgaagccggagtatgcctggacattgattgctaacatgaccatgcttggggatgtctctagctggtctggg

SEQ ID NO: 68339 - DNA, 401 bp, Homo Sapiens
  misc_feature (263)..(263): n is a, c, g, or t
gagcaaagccctgtcaaacaagtcaaaaggctggtgccccagaagcaggcgagcgtggctaagaaaaaaaagctggaaaaagaagaagaggaaataagagccagcgttagagacaagagccctgtgaaaaaggccaaagccacacccagagccaagaagccaggattcaagaaatgaggagccacgccttggggggcacggtgcaaagtgggccttccctgggctgtgctgcaggcacagggtgcccctgtccagcccctccnacctgtgtctgaatgcaaccaggggtgttgcgggggcaacatgagagcccctcacccccaactctccactttcaggaggcccccagtgaagagccccacctcggggtcacaataaagttgcctggtcaggaaaaaaaa

SEQ ID NO: 68340 - DNA, 1664 bp, Homo Sapiens
  misc_feature (61)..(78): n is a, c, g, or t
  misc_feature (682)..(715): n is a, c, g, or t
  misc_feature (872)..(872): n is a, c, g, or t
gtgcctagccgaaattaaccctcaactaaagggaataagcttgcggccgcggctgtaggcnnnnnnnnnnnnnnnnnnctccaggtctcagtttcataaaatctttcttatttgtggtccctgtgattccagaacggctgctgctgtttccttcttcatcaagagtctttttggtagcttttaattccttcttctgcttctctaacttctgtttctccagctgggcttggtattttcgaactttagttatttggttggcttttgcttccatccttcccactaatgcctccaattcacactccaacttgtctttcagttcaacggttggcgactcctggataagttttgcaagctgctggtgatcaaagctcatttgcccaaattcatcctgtaaagtctgtaagacttctgacaactcctcattaataccgttggaggagggaggtgttactgacaacttcttacttttaccacctcgtgaagatacttgctttgccaaaggaatactgttgatgactcgatcattgcacaaagctttactgtgttgcttcattagatgcaagacaagctgaacattggctaccacggcatggctagggcttgtggacttcccagctacaaatggcatatcacccaagcataatctataatgtggttgtgcaccaaaatagttcctagaacnnnnnnnnnnnnnnnnnnnnnnnnnnnnnnnnnnaattcttcttgcattgggaacacacgggagttgccttatcttcaaagataagtctatttgtttctagaccagtctgcaactcagctgccttagcttgcatgcgtttcctttcctgttcttcttcatggagttttgcttccaactcttgcattttttnttctgcaagggcctgcattgtggtaagtttgttatactcctgttcaagaagatccaatttttcaagttggctctgaacatgtgtttgatcatgttgtcgttctctttctagggaaacttgtttctctaagacagatgtcctctccatttcggcatgctttatcatatttcgcatgtattccaattgtttttctaatagattgcatttattttctgcagctaacaactgagatgtcagttcttgattgtgctttgattcctcattctttgaattctccctttcttgtatctgttcatccagtactttcttatattcaattgtttctctagacaaggttttcacactttcttctgcctgaatcctctcaagttccaagcgtcgaatcttatcttgaagattcttaagagcagaaaatatggctctgctgttgctttctggataggcaagtgtaggcttacttggggagcgtcgtagatcactattaaggaaaggcttatccgaaggatatactacatatggagatgaagaatgccgaaccatgcttccattagaccttgatggctcagcaaagctgttcgacaagtgagaaccagaagccgcagagacagacgccgccgccatctttcagcctgcccagggggtctccgcacttcgggggcggtctaggttctcgtgctcttctccaagactcgggagccgcccaccagcggggaccctaggctgaacccctgatggaaaagggcaagggtgctggtgctgggcttggaaacccctgcaacacaccccctcccc

SEQ ID NO: 68341 - DNA, 807 bp, Homo Sapiens
gcacgagggcattgagtataaatgcctggatgttaaggattccaatttaactttgaaaagaactgtctcattcatttacatttctgttacagtcagcccaggaggttacagtgagctctccactaagaatctggaagaaatgcatcactaggggttgattcccaatctgatcaactgataatgggtgagagagcaggtaagagccaaagtcaccttagtggaaaggttaaaaaccagagcctggaaaccaagatgattgatttgacaaggtattttagtctagttttatatgaacggttgtatcagggtaaccaactcgatttgggatgaatcttagggcaccaaagactaagacagtatctttaagattgctagggaaaagggccctatgtgtcaggcctctgagcccaagccaagcatcgcatcccctgtgatttgcacgtatacatccagatggcctaaagtaactgaagatccacaaaagaagtaaaaatagccttaactgatgacattccaccattgtgatttgttcctgccccaccctaactgatcaatgtactttgtaatctcccccacccttaagaaggtactttgtaatcttccccacccttaagaaggttctttgtaattctccccacccttgagaatgtactttgtgagatccaccctgcccacaaaacattgctcttaacttcaccgcctaacccaaaacctataagaactaatgataatccatcacccttcgctgactctcttttcggactcagcccacctgcacccaggtgaaataaacagctttatgctcac

SEQ ID NO: 68342 - DNA, 380 bp, Homo Sapiens
  misc_feature (307)..(307): n is a, c, g, or t
  misc_feature (348)..(348): n is a, c, g, or t
tggagcaacatggctgtttatttcacctgggtgcaggtgggctgagtctgaaaaaagagtcagcaagggtggtgggattatcattagttcttataggttttgggataggcggtggagttaagagcaatgttttgggggcagtgggtggatctcacaaagtgcattctcaagggacccagccctctattttcaaagaataggttctatctaatattatcatggtaaatatccatattagtttaagagagaaattgaaaataatttttgaatcctgttcttacagacatccaaagaaagcaggacagantgcacttcgaggggggggccccgttaccccaatttcgcccntattagttgagttcgtatttaccatttcactg

SEQ ID NO: 68343 - DNA, 848 bp, Homo Sapiens
  misc_feature (44)..(44): n is a, c, g, or t
  misc_feature (52)..(52): n is a, c, g, or t
ttgatgatgcatctcagcagcaaccaacaaaggaagagccgagngaagagtncgaagaggtggaagagggcagaattcagcatcgagaggagggtctcaaagaggaagagcagacactggtctggagacttctacccgtagcaggaactcaaagactgctgtgtcagcatctagaaatatgtctattatagatgcctttaaatctacaagacagcagccttcccgaaatgtcactactaagaattattcagaggtgattgaggtagatgaatcagatgtggaagaagacatttttcctaccacttcaaagacagatcaaaggtggtccagcacatcatccagcaaaatcatgtcccagagtcaagtatcgaaaggggttgattttgaatcaagtgaggatgatgatgatgatccttttatgaacactagttctttaagaagaaatagaagataatatatttaatggcactgagaaacatgcaagatacaggaaaaatgaaaatgttacaagctaagagtttacagtttaagattttaagtattgtttcctgagcataactccataagtaagaaatttctagttcacagacatacaatagcattgattcaccttgtttttttaacctggttgttgtagtaagagctttgtttcaatatcactcttgagtaaagattaaaataaagctaccattttacatttctatttcataatgaaaaactatgtcagtattttaatatggttacatttagccaaagttgagggaaagagcttataaaatttaacttcttcataattttagtaatttcctagaggttctgggttttctgaaagtaaaacaatttatgcg

SEQ ID NO: 68344 - DNA, 687 bp, Homo Sapiens
accctagttagatatgcccataaaaaaaatcaaatagtcccaagtggcatttaatgaaatacatagtctcttccccatgctgccctacctgcccccaagcaatctaatcaaaatcccaaaaagcaaccattttcagctccttcttttggtgattatattcatatttctaaataatatgtgggttatttttattcatcaggtttagagataatctattgcttctctgtcctggtagttaaggattcagctctcttacaaacaccctctcaattctcacttctgtggtctttcaatagttacataatcatttctgattaatagtatagaaatggaaatttccagtagtcatagaaatattaatcataacatactatttggctcaacagtgattacatttccttttttgtgcagcttttaatttttcctagagttaataatcgtctcactttttattttgcttgtgtttctgtatccagtgccacttaccccctcctctgaggttctcacaccttactgataactcagagtccagaacaatgtcataggtccttgccagtctcactttcctcttgccttctcacaaccattggaacccctttctccagttggaactgatggtaccctgggtttattacagagttgttatccagaactttcctttgtccccctcatgattagtcttctgct

SEQ ID NO: 68345 - DNA, 560 bp, Homo Sapiens
tggggcaacaagtgctgtgttgccaggacaaatagatgctaaacatggcacttaaatatttatttaaaaacttaaattattattggcaagcaaatcttagtatctttcttccagtaatatggcctggctgagggtcagaccacaggacaggagcgacctccggccttgactgtctgggaagcttgatggattataaaacttcctcctgcctggccaagcagcagcatcatttccaggacccaacaaaggcaacatcaaaatctgttttgctttgtcagtctgggcttccagaatgttgaatttgcctcaaggcctcttcagtataaggaaatacctggaaaactgtgaaacttttaccacgacgtaatctttccagtctcatactattttcacaaacagttttcaaacgttacttcatctgccaaagcattaaaaaaattaaacataagtcaagataaatgttcttaccaccagaataacccttaaagatgtatcttaattaatcagaataaaaggctaccttaaataagacatgatgaatagtagcattttgtagggtt

SEQ ID NO: 68346 - DNA, 854 bp, Homo Sapiens
gcggccgccggggcgctgcagaacatcacggcaggcgaccgcaggtgggcgggggtgctgagccgcctggccctggagcaggagcgtattctgaaccccctgctagaccgtgtcaggaccgccgaccaccaccagctgcgctcactgactggcctcatccgaaacctgtctcggaacgctaggaacaaggacgagatgtccacgaaggtggtgagccacctgatcgagaagctgccgggcagcgtgggtgagaagtcgcccccagccgaggtgctggtcaacatcatagctgtgctcaacaacctggtggtggccagccccatcgctgcccgagacctgctgtattttgacggactccgaaagctcatcttcatcaagaagaagcgggacagccccgacagtgagaagtcctcccgggcagcatccagcctcctggccaacctgtggcagtacaacaagctccaccgtgacttccaggcgaagggctatcggaaggaggacttcctgcgcccataggtgaagccttctggaggagaaggtgacgtggcccagcgtccaagggacagactcagctccaggctgcttggcagcccagcctggaggagaaggctaatgacggaggggcccctcgctggggcccctgtgtgcatctttgagggtcctgggccaccaggaggggcagggtcttatagctggggacttggcttccgcagggcagggggtggggcagggctcaaggctgctctggtgtatggggtggtgacccagtcacattggcagaggtgggggttggctgtggcctggcagtatcttgggatagccagcactgggaataaagatggccatgaacagtc

SEQ ID NO: 68347 - DNA, 1003 bp, Homo Sapiens
  misc_feature (85)..(85): n is a, c, g, or t
  misc_feature (128)..(128): n is a, c, g, or t
  misc_feature (194)..(194): n is a, c, g, or t
  misc_feature (230)..(230): n is a, c, g, or t
  misc_feature (243)..(243): n is a, c, g, or t
  misc_feature (249)..(249): n is a, c, g, or t
cactgttgaccctgggggtgggtcccccctaccacaacgctggagcgaattttatggtcatgatgctcaccgaactgttcgacgntagaacaagacggattcacgaagtgtgacacctaatcgagatntccagcagctggtgagagtgccccagccgagtgctgtaaacatcaagcttgctaacaactgtgtgnccagcccctcgctgcccgagacctgtgtatttgacngactccgaagctnatcttnatcaagaagaagcggacagcccccgacagtgagagtcctcccgggcagcatccagcctcctgccaaccctgtggcagtacaacaagctccacccgtgactttcgggcgaagggctatcggaaggaggacttcctgggcccataggtgaagccttctggaggagaaggtgacgtggcccagcgtccaagggacagactcagctccaggctgcttggcagcccagcctggaggagaaggctaatgacgggggggcgccgccgggagaggtcgtgggctgcttcacgccgcagagccggcggctgcgcgagctgcccctcgccgccgatgcgctcaccttcgcggaggtgtccaaggaccccaagggcctcgagtggctgtggagcccccagatcgtggggctgtacaaccggctgctgcagcgctgcgagctcaaccggcacacgacggaggcggccgccggggcgctgcagaacatcacggcaggcgaccgcaggtgggcgggggtgctgagccgcctggccctggagcaggagcgtattctgaaccccctgctagaccgtgtcaggaccgccgaccaccaccagctgcgctcactgactggcctcatccgcagggcagggggtggggcagggctcaaggctgctctggtgtatggggtggtgacccagtcacattggcagaggtgggggttggctgtggcctggcagtatcttgggatagccagcactgggaataaagatggccatgaacagtc

SEQ ID NO: 68348 - DNA, 1384 bp, Homo Sapiens
  misc_feature (982)..(983): n is a, c, g, or t
  misc_feature (985)..(985): n is a, c, g, or t
  misc_feature (987)..(1094): n is a, c, g, or t
  misc_feature (1096)..(1097): n is a, c, g, or t
  misc_feature (1099)..(1103): n is a, c, g, or t
  misc_feature (1106)..(1221): n is a, c, g, or t
  misc_feature (1225)..(1228): n is a, c, g, or t
  misc_feature (1276)..(1319): n is a, c, g, or t
aactatggaatatagaccgtgttaaaaaaagcaggctggtacggtccggaattcccgggatatcgtcgacccacgcgtccgtgctggtgctgcactgggctgactgcggcgctgacgcagcgtttccccccatccctgttgcctgtgtgttgtgtggatctgttcctagtataggcaacataatgagatactgtgcttcccacctccccttcagttcagagccaaaatgggtctagaatctggcactttactcatttcctttgataaattgtactatgcagagctgtcaggaaccttcagatagcagtagaggactgcagctgtctaggtctgcggccacatcttggggacacactggactgttcccatgtgcagggttcagcagttatgtgggagtgctaggggttaggcttttgagcttgaacgcctgcgtgtgaacagatgaaaaatccttcagtacccaagtcccagtctgtcctatggggagcagtttgggggcggccggcagcaggagcctgggaaagaggccctcgccaggtgatggcagggccagggtggcctggggcacccagcggaatgtgcttagtatttggtcaccagccgtcatcctgggcttttcctactgtgtcttgttacaaggcctcagcaatccacagaactctctctccttccttccacctgtcagcttctctgcttctgagataagaaccatttgtgtaacaccaacacttaacttcagaaagacatgcattatgtggtgtaatcaaacccgatgctttcagatgacctacttacatcttcaatgtggataagataaagaacaaaacacatgcatctaaactgctgggcaatccagttgacttttaaatgtaagaatggaattccaaacacttaacacattcagctatatgacagaaagtaaatctatggatatggtattttgtgaatgatcttttaaataaaagaaaaccttacgtaatannanannnnnnnnnnnnnnnnnnnnnnnnnnnnnnnnnnnnnnnnnnnnnnnnnnnnnnnnnnnnnnnnnnnnnnnnnnnnnnnnnnnnnnnnnnnnnnnnnnnnnnnnnnnnannannnnnaannnnnnnnnnnnnnnnnnnnnnnnnnnnnnnnnnnnnnnnnnnnnnnnnnnnnnnnnnnnnnnnnnnnnnnnnnnnnnnnnnnnnnnnnnnnnnnnnnnnnnnnnnnnnnnnnnnngggnnnncggcgggggccgccccccgcccaaaaagagccccgcggggaccgcccnnnnnnnnnnnnnnnnnnnnnnnnnnnnnnnnnnnnnnnnnnnncacatgtggtgcttcttctcaaagaaaccgcccacggccggagaacgttcttgcatccccctccc

SEQ ID NO: 68349 - DNA, 1170 bp, Homo Sapiens
  misc_feature (77)..(94): n is a, c, g, or t
  misc_feature (1144)..(1144): n is a, c, g, or t
gccccaggggggccccacaacccccgtgcaaggctggggataaacccgagggcattaaagaaggaccaaggaatctnnnnnnnnnnnnnnnnnnggggcacctggtcctcgggaccccaggctgcgggaaacaggacagagaaaggcagaggaaatggggaacagcgaagaaagatacgcactacagcacctagatagatacagcaagcccagaatgtactaaaaccacttgttaacagcttgacagcacttcacaagctgtgtttccgctgtgaggaggcccaatgccaggccccaggagtggcggctgcaggacgggctgcccagggactcaccaggctggtggtcctgttctaacccccccacgccccattccctcccaaccgcaggctcattcttgctccttttgaacgacttcctctctaggcctggcacccccgaagatagcagagttgggattggctacttgattgaggggcgtcgcgactgttcgaggtttaagctggagtcgtggtctctgtgctctttcctcttctgtgggttctctgaaatccatgttggatccacggaggggagggccatctctgaagcggctgcccatgggggggcctgttcgccggtcgcctgggcgactacctcccctgccccctaagaagtcatccctgaagcctctgtcatctggtccaccttttctgaatccaaagccacctttatcttgttttctgccttctgcaatgtccacacgaagtgaccgatcgcccaacagtgcaccatcgtatgtcaaggcttccttaagggaatccacttcatcgaattctacatagcagaatcctttaaatttatctgtgtctttgtctctgactagccgtacactccttatgctgagatccttaaagatagcatctatgtcgccctgaaccgtattgaaaggtagatttcctacgtatgctgtgtaggggggctctgtgggcaactccttctggctacgggaaccatggccaccagcactgccgcgggaccctctgccgccgccgaagctgctgtaggcccgatcgtcgtaggtgtcgaagtccgccatttgccgtctcccggacgcgtgggcgacgatatcccggatatccggaccggtacagcctgctttttntaccactggtctatattcacattcga

SEQ ID NO: 68350 - DNA, 1031 bp, Homo Sapiens
ctagctaggtaagcgaggccctgggtgttaaattcggcacgaggctcggagcggagactggcaaatggcggacttcgacacctacgacgatcgggcctacagcagcttcggcggcggcagagggtcccgcggcagtgctggtggccatggttcccgtagccagaaggagttgcccacagagcccccctacacagcatacgtaggaaatctacctttcaatacggttcagggcgacatagatgctatctttaaggatctcagcataaggagtgtacggctagtcagagacaaagacacagataaatttaaaggattctgctatgtagaattcgatgaagtggattcccttaaggaagccttgacatacgatggtgcactgttgggcgatcggtcacttcgtgtggacattgcagaaggcagaaaacaagataaaggtggctttggattcagaaaaggtggaccagatgacagaggcttcagggatgacttcttagggggcaggggaggtagtcccccaggcgaccggcgaacaggcccccccatgggcagccgcttcagagatggccctcccctccgtggatccaacatggatttcagagaacccacagaagaggaaagagcacagagaccacgactccagcttaaacctcgaacagtcgcgacgcccctcaatcaagtagccaatcccaactctgctatcttcgggggtgccaggcctagagagggaagtcgttcaaaaaggagcagaatggaagccctgcggttgggagggaatcggggcgttggggggttaagagcaggaccaccagcttggtgagtcccccgggcagaccgtccttgaagccggcattctgtgccttgcattgggctcctcaccgcgggaaacaccagttgtgagtgcctgttcacctgttacacgtggtgttagacatccggggttggcggaactactaagctgtgggcgtttacttctccgggtccacttcttcgcttgtcgctctgttccacactggtctggacatacgcagggg

SEQ ID NO: 68351 - DNA, 1375 bp, Homo Sapiens
tttcgcttcataaaacgaggagtgtttttaaagttttgggaatcccctctccttcatgttaaaagtcaattggattgccccagcagtaaaaaaaccagggggtatggtgcggtatcttaccccccttgaagaggtaagtaggtcatatgaaagcatgcggtttggaattcccccacataatggcacgtctttcggaagttaagtgttggtgttacacaaatggtttcttatctcagaagcagagaagctgacaggtggaagaaaggagagagagttctgtggattgctgagccttgtaacaagcctcagtagataaagctcaggatgacggctggtgaccaaatactaagcacattccgctgggtgccccaggccaccctggccctgccatcacctggcgagggcctctttcccaggctcctgctgccggccgcccccaaactgctccccataggacagactgggacttgggtactgaaggatttttcatctgttcacacgcaggcgttcaagctcaaaagcctaacccctagcactcccacataactgctgaaccctgcacatgggaacagtccagtgtgtccccaagatgtggccgcagacctagacagctgcagtcctctactgctatctgaaggttcctgacagctctgcatagtacaatttatcaaaggaaatgagtaaagtgccagattctagacccattttggctctgaactgaaggggaggtgggaagcacagtatctcattatgttgcctatactaggaacagatccacacaacacacaggcaacagggatggggggaaacgctgcgtcagcgccgcagtcagcccagtgcagcaccagcaccaccccctccacccccaaagcgccttggcccagcagaaaagaaacccgctggccattcactgcacccagccagagaggccagcctccaccacgcacggcgaaaggagtgaactagctgggacacacacacgtgtgaatgcatgcaagcattcactgcatcttctccgtggactccctaccgctcttccatagccccccctttcagcctcactgtttctcgtgtgagcctatctgcttggacagtccactcgggagggggtcatggagccaggactccctctaaataggaatggaaaggaccctgcagatatttttatcctagttgtgaaaacaaggtgcctctgattctctatatccatcacagctgaataccaacaaggtctctgctgttccctctgtcagtgactctggtttttgttggaagccccagcaatacagaactcaacatgcaggtcagaagagaagcactgagggaatgaaaggaaacgcctgcctcgtgccgaattaacaccagcctgactagc

SEQ ID NO: 68352 - DNA, 1144 bp, Homo Sapiens
tgcaagtactctaacggttataaggtagcgaggcctgggtggcgaattcggcacgaggctcggagcggagacggcaaatggcggacttcgacacctacgacgatcgggcctacagcagcttcggcggcggcagagggtcccgcggcagtgctggtggccatggttcccgtagccagaaggagttgcccacagagcccccctacacagcatacgtaggaaatctacctttcaatacggttcagggcgacatagatgctatctttaaggatctcagcataaggagtgtacggctagtcagagacaaagacacagataaatttaaaggattctgctatgtagaattcgatgaagtggattcccttaaggaagccttgacatacgatggtgcactgttgggcgatcggtcacttcgtgtggacattgcagaaggcagaaaacaagataaaggtggctttggattcagaaaaggtggaccagatgacagaggcttcagggatgacttcttagggggcaggggaggtagtcgcccaggcgaccggcgaacaggcccccccatgggcagccgcttcagagatgggcctcccctccgtggatccaacgatggatttcagagaacccacagaagaggaaagagcacagagaccacgactccagcttaaacctcgaacagtcgcgaagcccctcaatcaagtagccaatcccaactctgctatcttcgggggtgccagggcctagagaggaagtcgttcaaaaaggagcaagaatgagcctgcggttggagaggaatggggcgtggggggttagagcacggaccacagcctggtgagtcccgggcaagcgtcctggagccgcatcctgggcctggcatgggctctcaacacggaacacagtgggagtgtgtcagcgtacacagggtcacgaatccgggctagggaacaccaagccggtgggggcgataacaataaacggagtacccattcatcggcgttaccggccggttccacagccagggtccctgaacaaaggtccggggaaaagcagccagagagaaaccaaggactataaaacgcaaagagtatacacaagatacaagaagtaaggagcgacacaagcaggagagctcgtgatgacaaagacaaacaag

SEQ ID NO: 68353 - DNA, 1367 bp, Homo Sapiens
gagtatgaagtcacggcgcgccgaattcggcacgaggggagcggagacggcaaatggcggacttcgacacctacgacgatcgggcctacagcagcttcggcggcggcagagggtcccgcggcagtgctggtggccatggttcccgtagccagaaggagttgcccacagagcccccctacacagcatacgtaggaaatctacctttcaatacggttcagggcgacatagatgctatctttaaggatctcagcataaggagtgtacggctagtcagagacaaagacacagataaatttaaaggattctgctatgtagaattcgatgaagtggattcccttaaggaagccttgacatacgatggtgcactgttgggcgatcggtcacttcgtgtggacattgcagaaggcagaaaacaagataaaggtggctttggattcagaaaaggtggaccagatgacagaggaatgggtagctctcgagaatctagaggtggatgggattcccgggatgacttcaattctggcttcagggatgacttcttagggggcaggggaggtagtcgcccaggcgaccggcgaacaggcccccccatgggcagccgcttcagagatggccctcccctccgtggatccaacatggatttcagagaacccacagaagaggaaagagcacagagaccacgactccagcttaaacctcgaacagtcgcgacgcccctcaatcaagtagccaatcccaactctgctatcttcgggggtgccaggcctagagaggaagtcgttcaaaaggagcaagaatgagcctgcggttgggagggaatggggcgtggggggttagagcaggaccacagcctggtgagtccccgggcagccgtcctgcagccgccactcctgcgcctgccattggcctcctcacagcggaaacacagcttgtgagtgcatgtcagctgttaacaagtggtttttagtacattctgggctttgctgtatctatctagtgcctgtttgtgcgtttttttctttcttcctcggaggagcagaggtggccgccgtgggggggcgtttgggctgcggtgctgcgtcatttttcctttgctttctctttactttagacactggcccaactcccaggcgtttcctttcattccctcagtgcttctcttctgacctgcatgttgagttctgtattgctggggcttcccacaaaaaccagagtcactgacagaggggacagcagagaccttgttggtattcagctgtgatggatatagagaatccgaggccaccttgttttcacaactaggataaaaatatctgcacggtccctttccatttcctatttaaaggggaggtcgggctcccttgacc

SEQ ID NO: 68354 - DNA, 936 bp, Homo Sapiens
taggtagcgaggcctgggtggcgtattctcggcacgaggagatgacagaggaatgggtagctctcgagaatctagaggtggatgggattcccgggatgacttcaattctggcttcagggatgacttcttagggggcaggggaggtagtcgcccaggcgaccggcgaacaggcccccccatgggcagccgcttcagagatggccctcccctccgtggatccaacatggatttcagagaacccacagaagaggaaagagcacagagaccacgactccagcttaaacctcgaacagtcgcgacgcccctcaatcaagtagccaatcccaactctgctatcttcgggggtgccaggcctagagaggaagtcgttcaaaaggagcaagaatgagcctgcggttgggagggaatggggcgtggggggttagagcaggaccacagcctggtgagtccccgggcagccgtcctgcagccgccactcctgcgcctgccattggcctcctcacagcggaaacacagcttgtgagtgcatgtcagctgttaacaagtggtttttagtacattctgggctttgctgtatctatctagtgcctgtttgtgcgtttttttctttcttcctcggaggagcagacgtggccgccgtgggggggcgtttgggctgcggggctgcgtccatttttcctttgctttctctttactttagacactggcccaactccaggcgtttcctttcattcccccagtgcttctcttctgacctgcatggtgagttctgtattgctggggcctccaacaaaaaccagagtcactgacagagggaacagcagagaccttgttggtattcagctgttgatggatatagagaatccggaggcacctttgttttccccactagggataaaaatatctggcaggggtccttttccattcctatttaaa

SEQ ID NO: 68355 - DNA, 2041 bp, Homo Sapiens
  misc_feature (1627)..(1772): n is a, c, g, or t
  misc_feature (1918)..(1972): n is a, c, g, or t
  misc_feature (2009)..(2009): n is a, c, g, or t
gtcaaggagcgagcctgggtggcgaattccgcacgaggcggagacggcaaatggcggacttcgacacctacgacgatcgggcctacagcagcttcggcggcggcagagggtcccgcggcagtgctggtggccatggttcccgtagccagaaggagttgcccacagagcccccctacacagcatacgtaggaaatctacctttcaatacggttcagggcgacatagatgctatctttaaggatctcagcataaggagtgtacggctagtcagagacaaagacacagataaatttaaaggattctgctatgtagaattcgatgaagtggattcccttaaggaagccttgacatacgatggtgcactgttgggcgatcggtcacttcgtgtggacattgcagaaggcagaaaacaagataaaggtggctttggattcagaaaaggtggaccagatgacagaggcttcagggatgacttcttagggggcaggggaggtagtcgcccaggcgaccggcgaacaggcccccccatgggcagccgcttcagagatggccctcccctccgtggatccaacatggatttcagagaacccacagaagaggaaagagcacagagaccacgactccagcttaaacctcgaacagtcgcgacgcccctcaatcaagtagccaatcccaactctgctatcttcgggggtgccaggcctagagaggaagtcgttcaaaaggagcaagaatgagcctgcggttgggagggaatggggcgtggggggttagagcaggaccacagcctggtgagtccccgggcagccgtcctgcagccgccactcctgcgcctgccattggcctcctcacagcggaaacacagcttgtgagtgcatgtcagctgttaacaagtggtttttagtacattctgggctttgctgtatctatctagtgcctgtttgtgcgtttttttctttcttccgctgcttccccattttccttctgtcctttttctcctgctccttgttttcccagcagcacatggggttcctcggaggagcagaggtggccgccgtgggggggcgtttgggctgcggtgctgcgtcatttttcctttgctttctctttactttagacactggcccaactccaggcgtttcctttcattccctcagtgcttctcttctgacctgcatgttgagttctgtattgctggggcttccaacaaaaaccagagtcactgacagagggaacagcagagaccttgttggtattcagctgtgatggatatagagaatcagaggcaccttgttttcacaactaggataaaaatatctgcagggtcctttccattcctatttagagggagtcctggctccatgaccccctcccgagtggactgtccaagcagataggctcacacgagaaacagtgaggctgaaagggggggctatggaagagcggtagggagtccacggagaagatgcagtgaatgcttgcatgcattcacacgtgtgtgtgtcccaactagttcactcctttccccctgcgtggtggaggctggcctctctggctgggtgcagtgaatggccagcgggtttcttttctgctgggccaaggcgctttgggggcggagggggtggtnnnnnnnnnnnnnnnnnnnnnnnnnnnnnnnnnnnnnnnnnnnnnnnnnnnnnnnnnnnnnnnnnnnnnnnnnnnnnnnnnnnnnnnnnnnnnnnnnnnnnnnnnnnnnnnnnnnnnnnnnnnnnnnnnnnnnnnnnnnnnnnnnntctaaagtgccgaccggatgcccgctgcccccgcgtatcccggcgcgatgtgtagcccccaccccgctcatctgtgatcgcgtgccccccctccgaacgcgtatttctcctcgcctgcgatcgctggccgggttgccgcgcgctgnnnnnnnnnnnnnnnnnnnnnnnnnnnnnnnnnnnnnnnnnnnnnnnnnnnnnnntttgtattcacgccaccgcttgcgccgccacaccggnttcagtcatctcgcgcaagcgccacgactacc

SEQ ID NO: 68356 - DNA, 2172 bp, Homo Sapiens
  misc_feature (1524)..(1586): n is a, c, g, or t
  misc_feature (1616)..(1651): n is a, c, g, or t
  misc_feature (1849)..(1858): n is a, c, g, or t
ccgcgcgtgttatggcacgagggtcccgggtcagtcgccgctcagctacgcgctgcgcgccgccgccgcaccgccagtggtgagaccccgacctggcgggtcagcgctgggcgtgcgtgcgggcaggcgggggcgctgacgagaagcaggaagagggtgcagtgccggcgtgggcggccggccgaggcggaggcgcaggaagggggcggcgagtcgtgcgaggctgcccttctcactcagcattatggatccaagcctgttgagagaaagggagctgttcaaaaaacgagctctttctactcctgtagtagaaaaacgttcagcatcttctgagtcatcatcatcatcgtcaaagaagaagaaaacaaaggtagaacatggaggatcgtcaggctctaaacaaaattctgatcatagcaatggatcatttaacttgaaagctttgtcaggaagctctggatataagtttggtgttcttgctaagattgtgaattacatgaagacacggcatcagcgaggagatacgcatcctctaaccttagatgaaattttggatgaaacacaacatttagatattggactcaagcagaaacaatggctaatgactgaggctttagtcaacaatcccaaaattgaagtaatagatgggaagtatgctttcaagcccaagtacaacgtgagagataagaaggccctacttaggctcttagatcagcatgaccagcgaggattaggaggaattcttttagaagacatagaagaagcactgcccaattcccagaaagctgtcaaggcttttgggggaccagatactatttgtaaatcgtcccgataagaagaaaatacttttcttcaatgataagagctgtcagttttctgtggatgaagaatttcagaaactgtggaggagtgtcactgtagattccatggacgaggagaaaattgaagaatatctgaagcgacagggtatttcttccatgcaggaatctggaccaaagaaagtggcccctattcagagaaggaaaaagcctgcttcacagaaaaagcgacgctttaagactcataacgaacacttggctggagtgctgaaggattactctgacattacttccagcaaatagggaacagttttgccctggaacagagttacagatacacaatcaagagtgttcttgctgatgctcggggtctgaagactgtcttcctatctgcttcttgcggctgaggagaggagcagttcagtttacaaaacaagtgcaaattaccaaactcaaagcttatttgagtagaatgggctcatgggcaatgtgatgttccctgttaaccttctgttactccctgggagaaaggcgctgagcgtggcatgcaggtgtctttgctgtgtttttctccacttctaaatggttcctggttcctttcttcctcgtttgttactttagagcaagtttgcccatagtcttgaatgcaatatttgtttattccaaaagaacatatttataataaaatcactgtagaaggattttnnnnnnnnnnnnnnnnnnnnnnnnnnnnnnnnnnnnnnnnnnnnnnnnnnnnnnnnnnnnnnngagagggcgccgccgccccccaagaaactnnnnnnnnnnnnnnnnnnnnnnnnnnnnnnnnnnnnttttttgcacaacgggggcgccccacatataggggagcgcgctattatataaaaccagcagagcgagcaagaggggcgcgcgcgcttttataaaaacaacaccgtcgctgcccaggggagcaaaacacagcgcgcaggcacaagcgtggggcaccaccttgtgaggaaaaagagagacacctcactaaacatcgcgannnnnnnnnnaggacacacactagggtgcggagacaacacccatcccccccagccgaagagaaaactatcttataacacgcccctctcacaggggcgcggccccaatctatcacaaccgacacccctctccaccacagagccccctgcctacatcgcagcgtgggcggacacccacaaaaacggagcgacacaattaaacgtcgccgccgccggccgcgaccgaaaaaaccctctctgacggcccctcacgcggcgggacactaccaccgccttgcggcacaaaaattatttataaacaccgcgggggcgctacaggagaaaaa

SEQ ID NO: 68357 - DNA, 905 bp, Homo Sapiens
  misc_feature (45)..(188): n is a, c, g, or t
  misc_feature (243)..(243): n is a, c, g, or t
gcctatcttacatatctctcatatgctatgttgtacttattaacnnnnnnnnnnnnnnnnnnnnnnnnnnnnnnnnnnnnnnnnnnnnnnnnnnnnnnnnnnnnnnnnnnnnnnnnnnnnnnnnnnnnnnnnnnnnnnnnnnnnnnnnnnnnnnnnnnnnnnnnnnnnnnnnnnnnnnnnnnnnnnnnaaattaaaaaatgtgttttgttagttgctattgtatagatatgcattgattactnacaagttgatcagaaatagagtgtttctgctaaaccccctgtttctataatttgtctataggctttttgggaattttctttgtaagtagtatcatctgtgaaaaataatagttgtgactttcatttttcaattctaaaaatttttatttgtatttcttatatttgtgctttgtctaggtcctccagaaagttaaatagaagtggttaaatagtggtggttatactatttgtgattttaaaggtgatgcatctgatgtttcaacacaaggaatgatatttattgtctttggtggttattctttatcaagttgaaaaaatttgttttcctttgatatttaaagtttgtgttttaccatgagtatattaatttttttgaccataagtgattggtaattttatcatgtttaagttttaagattttattttatcatgaataagtattgtattttctgcttctgagactgttttctccattaatattttaatgtggtaaatgttgccatggattttaaaatgtaaacattctctttcattcctggaataaaactaatgtattcatcatgtgttatttgagttacataacactggacctagttaatcattttttcataggatgcttacttctagtttatgaataaaattgatctttaattttcctgttc

SEQ ID NO: 68358 - DNA, 603 bp, Homo Sapiens
  misc_feature (227)..(239): n is a, c, g, or t
  misc_feature (435)..(435): n is a, c, g, or t
  misc_feature (542)..(542): n is a, c, g, or t
  misc_feature (553)..(553): n is a, c, g, or t
cagcagtacatgttattatgtaattaggacacatttaaaatttggcaaataatgcatataatgaaatcaatattgtaaggcctgcttttgtaatgaaaatggagagaatgaagagcgctgtgccagtaaatactccccttcacctttctaattattaacttgttttcatggagtggctattcagcattggcagttaccacattctgttcaatttaaccaaactggcnnnnnnnnnnnnnctagtgaagttaaacaaacattgggataccgacacagacaacttgagacagtttttttaatcttttaatcagtgtagctatgtgctgctgctgctcaagagctggatccatacaggttgtgtgtcatctgtcctcttgaggttcaggagatctaaattgaatattccacggtttgggacagcatccggaagtttcncctatgactttatattttgtattatgtcaaatgttatggcagggccaaatagcataccacaagtttggttatgtgggcataaaatctaccaaacccagcatgggagnatttggagaancctgttgtggtgtttaccaataagtgtgagaggaaggaaggacgacataa

SEQ ID NO: 68359 - DNA, 2708 bp, Homo Sapiens
  misc_feature (68)..(102): n is a, c, g, or t
  misc_feature (1895)..(1906): n is a, c, g, or t
  misc_feature (2452)..(2518): n is a, c, g, or t
  misc_feature (2611)..(2657): n is a, c, g, or t
tcatatagggcgtcccgctgtattgcgaacgacgagcgcagcgagtcattgagcgaggaaggcggcgnnnnnnnnnnnnnnnnnnnnnnnnnnnnnnnnnnncagtcgacggtaccggacatatgcccgggaattcggccattacggccggggcagttcttctcttcccgtctgaggtggcggtcggtctcgccttgtcgccagctccattttcctctctttctcttcccctttccttcgcgcccaagagcgcctcccagcctcgtagggtggtcacggagcccctgcgccttttccttgctcgggtcctgcgtccgcgcctgccccgccatgaatgaggagtacgacgtgatcgtgctgggcaccggcctgacggaatgtatcctgtcaggtataatgtcagtgaatggcaagaaagttcttcatatggatcgaaacccttactacggaggagagagtgcatctataacaccattggaagatttatacaaaagatttaaaataccaggatcaccacccgagtcaatggggagaggaagagactggaatgttgacttgattcccaagttccttatggctaatggtcagctggttaagatgctgctttatacagaggtaactcgctatctggattttaaagtgactgaagggagctttgtctataagggtggaaaaatctacaaggttccttccactgaagcagaagccctggcatctagcctaatgggattgtttgaaaaacgtcgcttcaggaaattcctagtgtatgttgccaacttcgatgaaaaagatccaagaacttttgaaggcattgatcctaagaagaccacaatgcgagatgtgtataagaaatttgatttgggtcaagacgttatagattttactggtcatgctcttgcactttacagaactgatgattacttagatcaaccgtgttatgaaaccattaatagaattaaactttacagtgaatctttggcaagatatggcaaaagcccatacctttatccactctatggccttggagaactgccccaaggatttgcaaggctaagtgctatttatggaggtacctatatgctgaataaacccattgaagaaatcattgtacagaatggaaaagtaattggtgtaaaatctgaaggagaaattgctcgctgtaagcagctcatctgtgaccccagctacgtaaaagatcgggtagaaaaagtgggccaggtgatcagagttatttgcatcctcagccaccccatcaagaacaccaatgatgccaactcctgccagatcattattccacagaaccaagtcaatcgaaagtcagatatctacgtctgcatgatctcctttgcgcacaatgtagcagcacaagggaagtacattgctatagttagtacaactgtggaaaccaaggagcctgagaaggaaatcagaccagctttggagctcttggaaccaattgaacagaaatttgttagcatcagtgacctcctggtaccaaaagacttgggaacagaaagccagatctttatttcccgcacatatgatgccaccactcattttgagacaacgtgtgatgacattaaaaacatctataagaggatgacaggatcagagtttgactttgaggaaatgaagcgcaagaagaatgacatctatggggaagactaacagcagtacatgttattatgtaattaggacacatttaaaatttggcaaataatgcatataatgaaatcaatattgtaaggcctgcttttgtaatgaaaatggagagaatgaagagcgctgtgccagtaaatactccccttcacctttctaattattaacttgttttcatggagtggctattcagcattggcagttaccacattctgttcaatttaaccaaactggcnnnnnnnnnnnnctagtgaagttaaacaaacattgggataccgacacagacaacttgagacagtttttttaatcttttaatcagtgtagctatgtgctgctgctgctcaagagctggatccatacaggttgtgtgtcatctgtcctcttgaggttcaggagattctaaattgaatattccacggtttgggacagcatccggaagttttccctatgactttatattttgtattatgtcaaatgttatggcagggcccaaatagcatagccacaagtttggtttatgtgggcataaaattctaaccaaaccccagacatagggagtcatttggagaaagcctgtatgtggtgttttaacctaataaagttgatgagagagaaggggagaggaagcgaacataaagcgggtcaagtgtagtgcatcttttgtatctcaggcgtggcttcttcagtggaccaagctgcaatgcagtattgacttgacagagcctctacttctgtctcaaaatggctccaaatgatttctgtactgcaaaataaagccaaattctggaaactnnnnnnnnnnnnnnnnnnnnnnnnnnnnnnnnnnnnnnnnnnnnnnnnnnnnnnnnnnnnnnnnnnngggcggccgctctaaaaaatccctcaaggggcccaagtttattttttacccagctttcttgaacaaaggggcccctaaagggagtcgaattannnnnnnnnnnnnnnnnnnnnnnnnnnnnnnnnnnnnnnnnnnnnnntgctaccttggaatctttgtaaaggaaccttacttctggggggggacataa

SEQ ID NO: 68360 - DNA, 1004 bp, Homo Sapiens
gtggaccggtccggaattcccgggatatcgtcgacccacgcgtccgcggcggtcggtctcgccttgtcgccagctccattttcctctctttctcttcccctttccttcgcgcccaagagcgcctcccagcctcgtagggtggtcacggagcccctgcgccttttccttgctcgggtcctgcgtccgcgcctgccccgccatgaatgaggagtacgacgtgatcgtgctgggcaccggcctgacggaatgtatcctgtcaggtataatgtcagtgaatggcaagaaagttcttcatatggatcgaaacccttactacggaggagagagtgcatctataacaccattggaagatttatacaaaagatttaaaataccaggatcaccacccgagtcaatggggagaggaagagactggaatgttgacttgattcccaagttccttatggctaatggtcagctggttaagatgctgctttatacagaggtaactcgctatctggattttaaagtgactgaagggagctttgtctataagggtggaaaaatctacaaggttccttccactgaagcagaagccctggcatctagcctaatgggattgtttgaaaaacgtcgcttcaggaaattcctagtgtatgttgccaacttcgatgaaaaagatccaagaacttttgaaggcattgatcctaagaagaccacaatgcgagatgtgtataagaaatttgatttgggtcaagacgttatagattttactggtcatgctcttgcactttacagaactgatgattacttagatcaaccgtgttatgaaaccattaatagaattaaacttttacagtgaatcttttggcaagatatgggcaaaagccccataccctttatccactctattgggccttgggagaactggccccaagggatttgccaaggcttaaaatggctatttttgggagggtaccctatatggtggaaataaaacccatttgaaaaaaatccattggtac

SEQ ID NO: 68361 - DNA, 441 bp, Homo Sapiens
ttggtgagtggtccagagctttaagctacttttccagtagtttgccactttctccgaggtagtttggctgctctttcagtaatgctaattgtgtgtcaaattttgtctacaacagtaggcaacagatgaagataagttggttgaatgtctccagcactatgcatccctattttctatttattgtgtacactcactttcagtaatgtgtttcaaactggtattttttaaaaaacaaatcaatgtaaggactgaagttgaagtagcaatgtaataaagttaatttgtttattttttgtacagttagtttggttattgaaatcttcctatattgtttaaatgtgtatttgcatagacatagtaaagtgttacagcatttcatgtcttaaaaatatctatgaagatatctaaaatatctatttctatgaagaaacagactttaac

SEQ ID NO: 68362 - DNA, 839 bp, Homo Sapiens
  misc_feature (82)..(82): n is a, c, g, or t
atccaacactagttatattatagcgataaatctagtgtataattttaaatgccgtcagtagaagcacacaagttatgatttnttaatactggcttctgattctttcacttctgatccttttcctttttctcagatgtagctgagtcttgatcattttaagacaacgatgggtagaattttgagattaatgttaattttccctttttgttaatttcagtcccctctcactatgcttttgtccagaaggatcaagaattctaccatcccttgggtctttgtgtataaacaatgttaaataaaggtagactcagtctttaagatattagacagtttttttagtccatgggattgtaaatataaacattaactttcctataagaatattttggctttgtaatctatagcctcaaattggtatttattatggattcactagacaaacagctgtttccttattgtcttttttctttagtgtttctgatttgctatcagtagctgtttttaaagccatccaaggaaaataattatttacagtttttgaagtcacttttgagccctcatcaagctctcattgtgatgggagggatacctttttgttgttaaaagcctattattgttaaaggccttttatggaaaccaacttggaaaacaaccttaaatgtggatgtatcagatttggtttatccagccatgggagagaaaacaaacctaagtttactttacttgtacatatacactacaatggatagtatatttgctgtaaactacaatgtaaaacctcaataaaagtgcgctgtacttcttaatgtttattaaaagatgtatttttacaaaaaaaa

SEQ ID NO: 68363 - DNA, 824 bp, Homo Sapiens
cagtcgacggtaccggacatatgcccgggaattcggccattacggccggggttaacctaacgaaatttccatgaagaaccaagtcagggcagcatctccttagtcccagctcaggctctctgccttccagaggccgcttctccagtgactaacctcctcctctggctcctccttgcagacagttatcccttgtttagaacacgaatttccatttacctggtgggaacacgaaacaggagtctcttctgttctgcaagtttgatgggtaagaggtagccttttttcaaagtaggatttcctttttcaactgttccaggaaagaatctctaagactgggtagctcacagccagccaaaggcagctacatttccacagaagcccgtccgctgcctccgtggcttctccagccattgaactggtcccacacgcaccccaggccccactcctcggcagtttcaggtgtagctgtggggcccgttcctaggtctgtactcactttagggaggcttcactgactaggctttcctcctgcatgttgaatttccttcagctttaagaggaagagtggaataaatattctaagtgatttaatgcactttgacttgtataaaactttctgtgttagcgacggtatctatagccctttatacgagcgatggatcttgagctctccttccatgttgtaaatagggattgtattcttgaaaactgctgtagcaaattcatctgtggtgcaatacactttttgattaaagctcttcaatccagatgcaactacaatggatttcactagaaaaacacacaacaaaccaaaaacaacaccc

SEQ ID NO: 68364 - DNA, 2138 bp, Homo Sapiens
  misc_feature (2063)..(2071): n is a, c, g, or t
agaattcggcacgaggtggtgagtgacaagaatcatatgcactttggggctatcacttgtgccatgggtattcgcttcaagtcttactgctccaaccttgttcgcactttgatggttgatccttctcaagaagttcaagaaaattataactttttgctccagcttcaagaggagctgctgaaggaattaagacatggtgtgaagatatgtgacgtgtataacgctgtcatggacgtggttaaaaagcagaagccagaactgctgaacaaaattaccaaaaacctagggtttgggatgggaattgaattccgtgaaggctccctagtaatcaatagcaaaaatcaatacaaactgaagaaaggaatggttttcagcatcaatttaggattctcagacctgactaacaaggaggggaaaaagccagaagagaaaacctatgccctgttcattggtgacacagtgcttgtggatgaggatggcccagctactgttctcacttctgtgaagaagaaagtgaagaatgtggggattttcctaaagaatgaagatgaggaagaagaggaggaggagaaagatgaggcagaggaccttttgggaagaggttctcgggcagcattacttacagaaagaacaagaaatgaaatgactgcagaagcagaagagtcagactattctaaggagtcattgggtagtgaagaagagagtggaaaggattgggatgaactggaggaagaagcccgaaaagcggaccgagaaagtcgttacgaggaagaagaagaacaaagtcgaagtatgagccggaagaggaaggcatctgtgcacagttcgggccgtggctctaaccgtggttccagacacagctctgcaccccccaagaaaaagaggaagtaacttctgaactttggccctgagctccattcttcctccagccaacccctgaaaattttacatgacatagaaactgtatttttcctttcgttttcatttgaagttttgccatttgtgtttatgggtttagggggccatttgtgtggaccaatctactcggggaattccaggcccaccaggacacgtgccaatggccccattcagatggcaagggaggaggtgttcttgaagacaggaggaggctcccgctgttaataaatattgtttcattcttctctcttcctgtcaccttctgccaagacattgatggcttctgacatcttatttggtgtctcaaagctgtatttccaagacagtggtacaaggtgacccttaattacccgtatcatggttcttgaccagcacattcaatcctccaacctaccctactgccatgaccttccgcacatctctaagttttatctttgcaatactcaaggttctcggaaatttgctaatggttgtgataaaccatacagcttgagccagtgaggcagattgggctggtgccttcgtctgagttttcctgctttcctgcctcgtgcagattctgaggtatatctgctgccttggaagacataagaagcagtgatactccctggctcggttattttctccatacaatgcacacatggtacaatgatagaaggcaaaattgccactgtcttcttttttttctcatatatctaaggaagatatatcaggttgtgcctcatgtaccgcttctagtgaaatgtagaggaaggctcaaaggagtcaacatttagatctggaagggacaagtcatgccttgggcctagaataccctgatgagaaaagagaagaggaagggaggccatatctacaacacagcctctcggcactgctgctccttattttaactttgtcttgcattgtcctgtatttatcacagtttctgttgaacagcttttcaagtatttggggagtttatcttgccatcctccccttctggttctctgcacccacctgtcccactgcagttccttccgtgctctgtgactttaagagaagaaggggggaggggtcccggattttatgtttgtttgttttttctccttagcagtaggacttgatattttcaattttggaagaactaaaagatgaataaactgggnnnnnnnnnggtggttggtttttggaaacccaccaaacaaacacctgcacatgaaataaaggacggatatcccacc

SEQ ID NO: 68365 - DNA, 1743 bp, Homo Sapiens
  misc_feature (45)..(79): n is a, c, g, or t
gtcgaacgacgagcgcagcgagtcaagtgagcgaggaagcggcgnnnnnnnnnnnnnnnnnnnnnnnnnnnnnnnnnnncagtcgacggtaccggacatatgcccgggaattcggccattacggccggggagctgaagcaggccaacgaaagggagtgtaaggtgctaaagaaaatctggggctcggcccaggggatggactccatgttaaagtacttgcagaggaagatcgatgagttctgagtgtcgggctgcccactggtgacaccgggatcgggctgagcaggagaacatcaccggctccagttcccctgatccattctcacagcctgaaacaagctcacccgtagcttacgcttggaagcaggactgggaacatccacgctatttattatcgaggagttttaaagtactgtaactttaaaataaataactacaaagcttctttgtccaaacgtcattattttatacttatatacacgcaggtgtaaaagtataaaggtgagcactagactgctcttagaagctctaatttttgttttctttggctagtactgtataaaaaacagaattgtgttttattggttttggatgacagaaaagtctggaataatgtttgttttcctcatttcttccttctagaacacagaatctaaaggggtattagccagcctcgcctccctgccccacgtagagacacagagtgatgtgaggcgttggctttttctccaagaaaggtacagatacctcagattcgggaaactcaaaatcaaaagacttagcttctaggataaatacttctgatgaaaaatccgctgaggagcataccccaaaccagacatatgcttaggatacatagctgagatatcaattggtttcctccttctttttaaaatacgtccagttctatacccagttaacatgaagaaaccactgtctctagaagaaaagcttgttttggcagtattagtgaatcactgaatagcttaagtatgactatctaagttataagtaagccctttaggggggttttaaataattttttctgaccctttctgaaaaataactacataagtgcttcttgttgctgggtgagaaatactactttatagacagttgtggttttctgtttgcagatatgattgatgtatttcaccaaaataaaatatttttatgtttataaagtgtaatttttaggttcacttagaatatattttatttaataagttaaaattcttttggcacactattaaatgcaaaaactcctttcaaaacaaaaaagaactaccttatattcaacatttaatgttcttggcctctgcttttatgtctatacaatatactgagttcagtatggtgtccaagagtgccctgtgtggatagacatgtgcactccttccaggagtgggtactgattccagactccagatgcctattattagttaggcttctgagcttgcaatcatattgaatgtatgaagagcgaaatcaaattcttatttttgtacagttttgaagtttatacttagaactgaccacctccccggccacgcggagagctgtacagtgtgtaaatctgcctttatcttggattgattggtacagtatttttgcatctgtgggacctaccttttcgttcagtagtttgaactatatataaactgtacaatctgtaaagtttttatagaataaatattcagctgtgaaaactggttaaataaaactaatatttcttaacacatt

SEQ ID NO: 68366 - DNA, 582 bp, Homo Sapiens
ccccttggtccttctcctgggtctggccatctccagcgttcccctgctttacagcatcttcctgatcccgccttctaagctgtgtggtccattccgggggcagtcgtccatctgggcccagatccctgagtctatttccagcctccctgagaccacccagaatttcctcttcttcctggggacccaggcttttgctgtgccccttctgctgatctccagcatcctgatggcgtacactgtggctctggctaactcctacggacgcctcatctctgagctcaaacgtcagagacagacggaggcgcagaataaagtcttcctggcacggcgcgctgtggcgctgacctccaccaaaccggctctttgacccccgcagcccacgtcccgctttcagaccccaggcccattgtaagcctaggtcacaacatctgtaaactaggagaactggagaagactccacgcccttccagctttggtatctggagatttccagggcccctcgccgccacgtccctgactctcgggtgatcttccttgtatcaataaatacagccgaggttgctgcctcgtgccgaattcttg

SEQ ID NO: 68367 - DNA, 1025 bp, Homo Sapiens
cccggtcgagagacgagcccatgcacgcttccgggtgcgatcatatcatgcaacagtccgatgagcgcgtggcgcagcatattggtgtcatcatagccccagctacattatctcgctgtatgtgttgatgtggcgatacattacacagaacactgactgatacgattatcgactcatataggattgccctcgagccagaatcggcacgacccggctcacgaggttatggcagaaatcagctcctggtggctggggactgggtcccacctccctgctggctgttgacccttcccagcatggcggttgcttccccttcagggccagcaggactggcctgaatttctccctttctggcgttgaaacaccctctggagggcttcgtgatcgggccatgcccgcctaggatgctctcccttctgatgagctcaagtcaccggttagggtccttaatcacatcgacaacacccaccccacctggcgagtacaacgtgatcagggaagggatgccctgctgcgggaggggccacgggcgtgcacaccaggtgggaatccgggtgggagagggcatcccagagtcctgcctactggagggctggagggagcagagtggagagggtgggttggagggtggtagaagggccagggggccagcggggccagcgtgggtgactcagcagaccctgtctcaacccgtaggtctggagtgggactgactggctccagacagaccatgttctacacagaggtgacagatgcccagcgtagcggtccaggtgggggcctggtggaggagggtgagctcattgaggtggtgcacctgcccctggaaggcgcccaggcctttgcagacgacccggacatccccaagaccctcggcgtcatctttggtgtctcatggttcctcagccaggtggcccccaacctggatctccagtgagactccagggttctagacagaggccagtcttggccactcaccccacaccccgcggaccccaataaaggcttgcatagctccagcaaaa

SEQ ID NO: 68368 - DNA, 711 bp, Homo Sapiens
gcgcccgctcacgctgcattaccgccagaatggtgcccagaagtcctgggacttcatgaagacgcatgacagcgtgaccgttctcttattcaactcttctcggaggagcctggtgttggtgaagcagttccggccagctgtgtatgcgggtgaggtggagcgccgcttcccagggtccctagcagctgtagaccaggacgggcctcgggagctacagccagccctgcccggctcagcgggggtgacagttgagctgtgtgccggcctcgtggaccagcctgggctctcgctggaggaagtggcttgcaaggaggcttgggaggagtgtggctaccacttggccccctctgatctgcgccgggtcgccacatactggtctggagtgggactgactggctccagacagaccatgttctacacagaggtgacagatgcccagcgtagcggtccaggtgggggcctggtggaggagggtgagctcattgaggtggtgcacctgcccctggaaggcgcccaggcctttgcagacgacccggacatccccaagaccctcggcgtcatctttggtgtctcatggttcctcagccaggtggcccccaacctggatctccagtgagactcccagggttctagacagaggccagtcttggccactcaccccacaccccgcggaccccaataaaggcttgcatagctcccacttcagattgg

SEQ ID NO: 68369 - DNA, 361 bp, Homo Sapiens
ggcataaaaagtgcacaagtttgtcctatgtgttaaaacatcttaatttggatgtattttttatccaaaatgatgcatacttggatgcattaaaagcacaccaacaaaaatacacacactaacaataaaaggaatgatttcaaatgagactgggaatgggaacaagaataggttaaaggagagacttccatatttccaaagtcaagagaattgccttttaaaacataaattatatagccatacagaattaatttgaaaatatgaaagctataggaaggacaaacaccaatttgaacaactgttgcaaagtttcataactcaagaaaagatagcttcctggctaggcgctcatgcctgcaat

SEQ ID NO: 68370 - DNA, 886 bp, Homo Sapiens
  misc_feature (38)..(38): n is a, c, g, or t
  misc_feature (51)..(51): n is a, c, g, or t
gacttgttttccagttttaatctagtttcctgtgacgngctttagtctctntacacaaagaaaaggtcttcctttccctcaccaacaagctccccccaacccccaacaccaaagacgagaaaaacagggctgtttttcttcaaatagatcgattttcaaagaaagtgtacaagctacggggaagaaagctgactagcatttagtgctgtaaacattttcaaaagcataaagctagaaccttagctttataaagcaagatcgtctcaagcatcttaactggcttatattagacaagagagacaaagacatacatgcagatgaaggttcggaaaattaaggacatctcagcaacattaacatcaaaactgtactgcgtcaggacagaatggattgggtacttacaatgtaaaaggttttttaaaaactaaaagagtaacaactgctcacaattttttgttgctgccatttcgctagtcctaaagctatatacatttaaaacattaccttgttaaaaagagagaaggagttaataagatggccaggtttaagtgtttaatagaggaaactagatatatttaaaaatttattgttcagtcaagagaatacagattaagacagctccaagctccccccacccacccatagaacaaaaagaggaaaaaaagtatgtcatttacttaggtttttttggaattcaaaactgttaactgctgacatgaatggtgtgctatgacctagttatacaagacaaagatggattccaagtcataaggaaaaatccagatctttttaaaaagtcttctccagtcttccaactgtgagtccttgggcttggccatttaattccattgcagaaaaatggcttccctcatctgttggcctctcc

SEQ ID NO: 68371 - DNA, 1281 bp, Homo Sapiens
tggcttagtacgaggcctcggtgttaaatcggcacgaggagaggcacagatgagggaagccatttttctgcaatggaattaaatggccaaagcagtaaacagtcctcagcgaagccgcctttttgcctacccaaccctggaaagtttgcagaagtggaaggagcagaacgtgagggtgtaacttacaaaaaggttctgggccggagaaggggcgacgttcgggcaccccccgaatggacaatctttccttctgtcaacggcaggggcaggcctagtttgactctgacagtcctcccactaaggaattcctggtgactggaagggggagtgactcaggccctcaacctctagcaggtaagggtgctacctcctgggtgggcatgcccagttcctcagtgggcccagcgcggcccagcctccgaggaagctctgagcagctggcttggctccgaggtatttttagctacagatccagcccccctccatcaccacaacagtcgagtccaaatcaaacgcgctccaggcaggtggggctggggttctgccagcctcctggccagcaggggtgggtgggcagactggggccagtatcagctgttctgcctggacccaggccgggctgggaaggcacacttgtgcttatttcccgcctccacttctgtgcaagcttgtgctgtcataagcagagatcacagccccatttcttggatggagaaagtggacactgaggtctgaggcttttgaggacagtcaggagccctcctatgggctccagtgatgcactcaccagcttctggtcctcttcttccacctcttagagtgccttggctccctcctgtcgtcctggggaacctcggccccagccctgcctccccagccagtcacagctcctccctggtcaccctgagggagctcagggcccggctggtagctgggttgctctgcttctgtccccgactcctgtggagcctggcaggcaactccatgatctgaccccggttaccttgacagccctgcctggcctcccctctcatggcccagccaccccagaacctgaagaggttttctagctgccgtgcatttgccaggctgggttacccaccctactttccctgcctgccctccagtgctgccaggcctagtgtgccagccagcgctcagccttcagtaaagggttcccctgcttccaacctccattgcactgcttcccctaagactgtgacctcctggaaggctggagcacaactgcctctcaataaacgtgttgcaaaaaaggaaaaa

SEQ ID NO: 68372 - DNA, 904 bp, Homo Sapiens
taggctagtacgaaggctggggtgtcgaatttcggcacgaggggcacagatgagggaagccatttttctgcaatggaattaaatggccaagcccaaggactcacagttggaagactggagaagactttttaaaaagatctggatttttccttatgacttggaatccatctttgtcttgtataactaggtcatagcacaccattcatgtcagcagttaacagttttgaattccaaaaaaacctaaagcagtaaacagtcctcagcgaagccgcctttttgcctacccaaccctggaaagtttgcagaagtggaaggagcagaacgtgagggtgtaacttacaaaaaggttctgggccggagaaggggcgacgttcgggcaccccccgaatggacaatctttccttctgtcaacggcaggggcaggcctagtttgactctgacagtcctcccactaaggaattcctggtgactggaagggggagtgactcaggccctcaacctctagcaggtaagggtgctacctcctgggtgggcatgcccagttcctcagtgggcccagcgcggcccagcctccgaggaagctctgagcagctggcttggctccgaggtatttttagctacagatccagcccccctccatcaccacaacagtcgagtccaaatcaaacgcgctccaggcaggtggggctggggttctgccagcctcctggccagcaggggtgggtgggcagacttggggccagtatcagctgttctgcctggaccccaagccgggctgggaaggcacacttgtgctttatttcccgcctccacttctgtgcgagcttgtgctgtccttaggcagagatcacagccccatttctggcatggcaaacgtgcgcctgaggtctgaggctttgaggac

SEQ ID NO: 68373 - DNA, 712 bp, Homo Sapiens
cggggagagccccaggatggactctactgcatcggaactcctctaccaagtcggggaaggtcctggttgtgtgggacgaaacctctaacaaagtgaggaactatcgcatttttgagaaggactctaagttctacctggagggcgaggtcctgtttgtgagtgtgggcagcatggtggagcactaccacacccacgtgctgcccagccaccagagcctgctgctgcggcacccctacggctacactgggcctaggtgatggcagtccatgtggctgccaggccaaggcagtcacaggggccctgaccccaggccacacagacggacatgggcccacatgggagggtgagcaggagcaaggctgtgcttgcctagggcctctgtgatggacatctcgtaggacccagccagtctcatccagcaggttgggttctagggctgaaccaggcgccaggctccagaggacgaagggactctgttgccccacactaacttgccctgtcccaatcccagaaacccaggaccaagctgtgcctgggctccaaggacaggaacactggtccccccatcacactcacccctaagtgggctgggagccaggcagggccagggcagctgggtgggggccggggctggccctgggacccccaggaacgctaagacacaggctccagtaggggctgttgcctccaataaagcagcagtgagctttgc

SEQ ID NO: 68374 - DNA, 1178 bp, Homo Sapiens
  misc_feature (96)..(124): n is a, c, g, or t
  misc_feature (993)..(993): n is a, c, g, or t
  misc_feature (1040)..(1040): n is a, c, g, or t
  misc_feature (1063)..(1063): n is a, c, g, or t
  misc_feature (1120)..(1120): n is a, c, g, or t
  misc_feature (1134)..(1134): n is a, c, g, or t
ggaaaaattccccggccttttacggagctgaactgaaaaggtattaatattcccctttggacatgtccaggacaatccagaaaaattcttgagccnnnnnnnnnnnnnnnnnnnnnnnnnnnnnccagggagaagcttataaaactaaatatggatctcagcatcaacagctgaacagagaaaggaattaaaacgctttaattaaaaaatcacgagtggatgataaagtgtgtagaaactgaaaatttacaaactatttaaaacctggaatcgctgactgttcagaaactacacagatggatcatgggtggtggtgaacagcagaaagggattatggatgaatctgcattgttctagctgctccccatgccacccgtctccgaggaaagcctgacattgattagatattgagccaggctaatgctggcagcagatccagtgatggtaacctgcctatcagtagatccttccactgggttcgcaattttgatctgcgccccagacatctgacggatctcattgattttggcgccttgacgcccgattatgcagccaatcaaatcgtttggaatggtgagttcatgagaagtagtctgagcagatgcatccaaacctgcccaatagcctttcacctctggagagctggattcaatgccactgaatccggtgttgccatgcgtcatgggaaaatgagactgttgcattgccaactggtgcagcttggtcaaatctggctgtggaatggcatactgtccttgaatggtataggcctgaccacctgcaaagatgaccggagagctggacggcttgggccggtacgggatggtcacgcccttccgggggggactgggagagagtctccaacatgaccacgcagatctgtttgacacactcaatgatggatttgtggatgccagcaatagtgatggccgctcagttgagttgggtagcaatccctgccactggactgagccctgtatctctcgtattccntgatctgcatcacctttccatgagaagcaactgacagcaggacacanctcaggtgacggggtctacggantgtgcatggcataagtgctagtctctccactctgcgatctggcccaggcaatctaangagcgataatcgancagtcaacgtccggtgaatgtacgcacatcaaaaacagggagaa

SEQ ID NO: 68375 - DNA, 2184 bp, Homo Sapiens
  misc_feature (1147)..(1175): n is a, c, g, or t
  misc_feature (1177)..(1177): n is a, c, g, or t
  misc_feature (1955)..(1955): n is a, c, g, or t
  misc_feature (1967)..(1967): n is a, c, g, or t
  misc_feature (1982)..(1983): n is a, c, g, or t
  misc_feature (2028)..(2028): n is a, c, g, or t
  misc_feature (2056)..(2056): n is a, c, g, or t
  misc_feature (2116)..(2116): n is a, c, g, or t
aggagagaaaaccacttagactgcacttttctgttccgtttactctgtttacacattttgcacttgggaggagggaggctaaggctgggtcctcccctctgaggtttctcaggtggcaatgtaactcatttttttgtcccaccatttatcttctctgcccaagccctgtcttaaggcccagggggaggttaggagactgatagcatgtgatggctcaggctgaagaaccggggtgctgtttaagtccctgcttttatcctggtgcctgattggggtggggactgtcctactgtaacccctgtgaaaaaccttgaaatataacactccatgcaggcccagctgttgagggttttcttgatgaatgaatggggtaccatacatggttaagataaagccttgggctccggactttatctgaggtgtctggagaagttctcctgcccctccacttttttgcatctactctcactaaatgagtataatgtcaagccccaactttctaaaattataggaataaatggtagcagatacatccttctaacttgttatggaggactataaatgaagttactaaaaacaatagactgaaatttttagtttaaaatatgcaagcctgaacaaggggaccaacattcccaagaaactggaacccagtcagacatatgatcaactgcttaatgtgtatgccatgtatgtcatgtgtcattcctttcccccaccccctccctagtggaagtgcttgcctactcccctaggacaggtaagtcctgggaaagtctaatcctcaatcttttgggcacaagttttataagggccaaccaagcatggagtcagggaaaaataggatcgagggccacaaaaaaagatggaagtggtaaaatagaagaaaacatcttaaccggaataaaggcttccattcaaaacccaagaagggtcctttgagggataaaaggtacaaaaataacagcaagacaagaggaataaaacccacatgaatcactgtggcatccagtttctattcacaaagaaaaagctccagtccatcttttaatttttttgaaaaattcctgacattacagaactaaactgaaatgtattaatattccactcttacatttccatgacaaacagaaaaattcatgagccnnnnnnnnnnnnnnnnnnnnnnnnnnnnncnccagggagaagcttataaaactaaatatggatctcagcatcaacagctgaacagagaaaggaattaaaacgctttaattaaaaaatcacgagtggatgataaagtgtgtagaaactgaaaatttacaaactatttaaaacctggaatcgctgactgttcagaaactacacagatggatcatgggtggtggtgaacagcagaaagggattatggatgaatctgcattgttctagctgctccccatgccacccgtctccgaggaaagcctgacattgattagatattgagccaggctaatgctggcagcagatccagtgatggtaacctgcctatcagtagatccttccactgggttcgcaattttgatctgcgccccagacatctgacggatctcattgattttggcgccttgacgcccgattatgcagccaatcaaatcgtttggaatggtgagttcatgagaagtagtctgagcagatgcatccaaacctgcactgaatccggtgttgccatgcgtcatgggaaaatgagactgttgcattgccaactggtgcagcttggtcaaatctggctgtggaatggcatactgtccttgaatggtataggcctgaccacctgcaaagatgaccggagagctggacggcttgggccggtacgggatggtcacgcccttcgggggggactgggagagagtctccaacatgaccacgcagatctgtttgacacactcaatgatggattggtggatgccagcaatagtgatgggccgctcagtttnagttgggtagcnatcccctggcactgnnactgagccctgtacctctcgtattccttgatctgcatcacctttncatgagaagcaactgacacaggacacanctcagggacggggtcactgcacttgctatgtcaaactctagtctctccattgcagataanaaagctgaaatgatatggtcaccaagaatctcccgcgatctggccaggcatctaagggcgatatcgac

SEQ ID NO: 68376 - DNA, 448 bp, Homo Sapiens
  misc_feature (249)..(278): n is a, c, g, or t
  misc_feature (311)..(311): n is a, c, g, or t
gcgccacataatcaacagaaagatggggctgtcccagccgtaagtcaggctcgagggagactgatcccctgaccaattcacctgataaactctagggacactggcagctgtggaaatgaatgaggcacagccgtagagctgtggctaagggcaagccccttcctgccccaccccattccttatattcagcaagcaacaaggcaatagaaaagccagggttgtctttatattctttatccccaaataatnnnnnnnnnnnnnnnnnnnnnnnnnnnnnncaggagagaaaaccagcttagacctggccaaanctttcgttcgtttactcgttacacattttgcacttgggaggagggaggctaaggctgggtcctcacctctgaaggtttctcaagtggcaatgtaactcatttttttgtcccacatttatcttctctgccctcgtgcc

SEQ ID NO: 68377 - DNA, 1218 bp, Homo Sapiens
caagcagaaagggattatggatgaattctgcattgttctagctgctcggccatgccacccgtctccgaggaaagcctgacattgattagatattgagccaggctaatgctggcagcagatccagtgatggtaacctgcctatcagtagatccttccactgggttcgcaattttgatctgcgccccagacatctgacggatctcattgattttggcgccttgacgcccgattatgcagccgatcggatcgtttggaatggtgagttcatgagaagtagtctgagcagatgcatcctaacctgcccaatagcctttcacctctggagagctggattcaatgccactgaatccggtgttgccatgcgtcatgggaaaatgagactgttgcattgccaactggtgcagcttggtcaaatctggctgtggaatggcatactgtccttgaatggtataggcctgaccacctgcaaagatgaccggagagctggacggcttgggccggtacgggatggtcacgcccttcgggggggactccaacatgaccacgcagatctgtttgacacactcaatgatggattgtggaatgccagcaatagtgatggcccgctcagttgagttgggtagcatatcccctgccacctggacctgagcccctgtactctctcgtatttccttgatctcgcatccaccttttccaatgagagagccacactgactagcagggaccaccagcctcagggtgaccgggggtctactggcagctgtgctattggtcatagagctgcttatgtcctcttccagtttgtcaatgatcatagcaaaggctttgaagatggcattagtgggtccagccaaagtgataattctctcaggacaattcccttctgagatgttgatacgtgcaccactctcctcgcgcatcttcttaactgattctcctttctttccgatgatactgccaacttcctttccatgcataagtagccggatggtgagagtgacatttaatccaccttcaatcacaccggtgtccatgtcgagcagtgttctggggagctggactttgagtggtcaagtctttggtcactggttgggggtgaaagccaaaaactgcaggcgcgaggcgactgaggggaaaaggggagcgggcgggaaggggaagggcgggaggccggcggacgcgtgggtcgacgatatcccgggaattccggaccggtcc

SEQ ID NO: 68378 - DNA, 1379 bp, Homo Sapiens
ttaaggaattaaaacgctttaattaaaaaatcacgagtggatgataaagtgtgtagaaactgaaaatttacaaactatttaaaacctggaatcgctgactgttcagaaactacacagatggatcatgggtggtggtgaacagcagaaagggattatggatgaatctgcattgttctagctgctccccatgccacccgtctccgaggaaagcctgacattgattagatattgagccaggctaatgctggcagcagatccagtgatggtaacctgcctatcagtagatccttccactgggttcgcaattttgatctgcgccccagacatctgacggatctcattgattttggcgccttgacgcccgattatgcagccaatcaaatcgtttggaatggtgagttcatgagaagtagtctgagcagatgcatccaaacctgcactgaatccggtgttgccatgcgtcatgggaaaatgagactgttgcattgccaactggtgcagcttggtcaaatctggctgtggaatggcatactgtccttgaatggtataggcctctagaggtggtccctccaggtcagggttgaggcacatggacggggtggtgtggggaaagctcgcactgtcgctgcctgtgctgtacctgtcctgaccacctgcaaagatgaccggagagctggacggcttgggccggtacgggatggtcacgcccttcgggggggactccaacatgaccacgcagatctgtttgacacactcaatgatggattgtggaatgccagcaatagtgatggcccgctcagttgagttgggtagcatatcccctgccacctggacctgagcccctgtactctctcgtatttccttgatcttgcatccaccttttccaatgagagagccacactgactagcagggaccaccagcctcagggtgaccgggggtctactggcagctgtgctattggtcatagagctgcttatgtcctcttccagtttgtcaatgatcatagcaaaggctttgaagatggcattagtgggtccagccaaagtgataattctctcaggacaattcccttctgagatgttgatacgtgcaccactctcctcgcgcatcttcttaactgattctcctttctttccgatgatactgccaacttcctttccatgcataagtagccggatggtgagagtgacatttaatccaccttcaatcacaccggtgtccatgtcgagcagtgttctggggagctggactttgagtggtcaagtctttggtcactggttgggggtgaaagccaaaaactgcaggcgcgaggcgactgaggggaaaaggggagcgggcgcggacgcgtgggtcgacgatatcccgagaattccggacc

SEQ ID NO: 68379 - DNA, 1053 bp, Homo Sapiens
  misc_feature (973)..(973): n is a, c, g, or t
  misc_feature (1027)..(1028): n is a, c, g, or t
gtccggaattcccgggatatcgtcgacccacgcgtccgcactaatgccatcttcaaagcctttgctatgatcattgacaaactggaagaggacataagcagctctatgaccaatagcacagctgccagtagacccccggtcaccctgaggctggtggtccctgctagtcagtgtggctctctcattggaaaaggtggatgcaagatcaaggaaatacgagagagtacaggggctcaggtccaggtggcaggggatatgctacccaactcaactgagcgggccatcactattgctggcattccacaatccatcattgagtgtgtcaaacagatctgcgtggtcatgttggagtcccccccgaagggcgtgaccatcccgtaccggcccaagccgtccagctctccggtcatctttgcaggtggtcaggacaggtacagcacaggcagcgacagtgcgagctttccccacaccaccccgtccatgtgcctcaaccctgacctggagggaccacctctagaggcctataccattcaaggacagtatgccattccacagccagatttgaccaagctgcaccagttggcaatgcaacagtctcattttcccatgacgcatggcaacaccggattcagtggcattgaatccagctctccagaggtgaaaggctattgggcaggtttggatgcatctgctcagactacttctcatgaactcaccattccaaacgatttgattggctgcataatcgggcgtcaaggcgccaaaatcaatgaggatccgtcagatgtctggggcgcagatcaaaattgcgaacccagtggaaggatctactgataggcaggttaccatcactggatctgctgccagcattagcctggctcaatatctaatcaatgtcaggctttcctcggagacgggtggcatggggagcagctagaacaatgcagattcatccataatccttttctgctgntcaccacacccatgatccatctgtgtagtttctggacagccagcgaatccaggnntttaaatagtttgtaaatttttcca

SEQ ID NO: 68380 - DNA, 908 bp, Homo Sapiens
  misc_feature (256)..(267): n is a, c, g, or t
  misc_feature (405)..(439): n is a, c, g, or t
  misc_feature (616)..(629): n is a, c, g, or t
  misc_feature (856)..(856): n is a, c, g, or t
cccatctttaacaacacctggactgaaccaggccagctggctaacactcaagcttagtcctgatctcagctatgctgctgtctcatcatttttagaagggggttggccagatccatcaagggaccctcgggggctccaggcccacccctttgctctctcagctcctctctgccatgtgcatgttgctggtatggttcatgggcagtgaaacaagactcccaccagtttattaatataacagtagaatactacagannnnnnnnnnnnaatcattaccccaatagcctttcacctctggagagctggattcaatgcctgttaagatacaagtgaaaatgagtttggtggtctcatcctaaccctatcggacaagttattccttatacagaaaagccccaaagacgnnnnnnnnnnnnnnnnnnnnnnnnnnnnnnnnnnncactacacaatttggcacaaatggatggtctctacccaagcctgtgaattgctggtggatagaaagggggtgctgatcatatcaagggggcaacagtcaggatgggctcaaagaaatatcagcctaccctttgcctgacaagcatccccaaacctcacccccaaaccttccagggcnnnnnnnnnnnnnnagaataactgaccccaaatgaaaaccacgttaacaaacacattacctccttgggcttagccatagtagacaggcaagtttaaaccagcaggatgctggataacgaagtttgttttaaacagatgtcaagctgagaccttgggactggcctctctcttgcactacaccttacagaaataaacactgaggtatccataccactgaatccggtgttgccatgcgtcatgngagaatgagactgttgcattgccaactggtgcagcttggtcactctagagtg

SEQ ID NO: 68381 - DNA, 1124 bp, Homo Sapiens
tatcagctcggtaccttcccaccagcaagacacaaaccagaatgagctactccccaaaatgtacaaacagatgatacgcttaactttttggacacctgtgatttgcatactgagcatataaagccatctttacgcacgtccatcggtgaaagaaaacggtctctttcaccactaattaagttttctccagtggaacaaagattgagaaccacaatagcatgtagtcttggagaactacctaatttaaaggaagaagacattttgaataagagccttgatgcaaaagaaccaccgtctgacttgacaagatgaagacgtacccatttaatataactatgatgcacttaaattgaagctatgccacaggatagaaaatgaattacaacttaaatacatgttggaagtgtaacactgtttttcaaggtttaaaaaaattcctaatgccttttagccttctttaatatttttaggtaaggaaagtatgtttggattttttcctctttgtaggtatatgagattgaaatgtgaagtatttggacaacaaacgtcaagcaatgggaagccattttgatttcttgagtaatcttgtaagcattaagtgaatgacaaagtagtagtgtaacttatttcttatgttataacttcagtcaattaatataaggatagtttttgttgtatgttcactaagtggttaatataatagccattgaatatactaatctttcatcttagagaactatacaacttttattgtttcttaatggaacattctggctaaccagaaaaagtgagaaaagtagtaccttgggatgtgtagtcaagatgacaaattttaagactggaaaagctctaaacaggcttaatgattcttcaggtagaatgatcctgagaagtgatgtttgatggaataaagtgcatgtgatgattaagtgaagactggggcagaatgatttaaaaaaaggaaaaagatggaagatgagtagacacttgcaaggaacactgtcaaactataaatccattcagtgggttgtataacatttatatttagtctaatttagactttgataatttaatgctacttttatattttaacaaaaatataaattaaaattttcattagtctg

SEQ ID NO: 68382 - DNA, 418 bp, Homo Sapiens
cctgtactgtctttctgtagaccctagactggtggggcctctgaaatgcatccagacactgtgctgggtgtgttgcatggccctcccaaccaattcagtatttttctccccattttccagggagaaatctaaggcgtcagaatgtaaggttcttattggaacccaggctccagggtccctggttttctgtgacatcatgctgcaggaccctgtttctctctttgctttggctgctggggagctcagaagggagctttaggcttgctctcagtcaccacattagctcaggggtttgggcatttttgtcgccgtctcctttgggctctgtctcctccctgctgtgcttcctgaggagcaggccggatgtaagttatcaactataaataaaaccaagacttccgttctggctctcactctt

SEQ ID NO: 68383 - DNA, 710 bp, Homo Sapiens
gaatcagaaaatgttctcatagccttcagataagatgatccttccagagctctatgtacatgcagatgtgcatgttaaagagataaagtgatcgagacaaggactgactgggtatagaaggaagacagactcctgtcttcactcctaaatgcagttctttggaatcaccctactgtggtgggcgtagtagggagccatcagctaggaagaaacgtgggagatgtgaattccaagagttgcctggacagggcaagtcatgttagcgtgggtcacacttccaagatatttaaagcaaatacaaaacagaacagaggattcaaaccgcaagtatgggagatttaggccctgcagaggcagaccattccttagtatctcacaaagcagagtaatactggaggcagagtagggggtggttggagagcagttagtacaaagaggcagaacagtgtctggtttacttggcatacacagaatctgcactgccggttccagaactgcaaagttggtgaactacaggagatgtgggtatttagactccaaagtttatactgagctcagtgcctgggaccgctccagctgcactgcagccaggggggataccagcttcattcctcagagtaaaccaaccttgggagctgtgtgccagttccagtgtaagcagtaataccatgttgtaagagggaacattaaagcccattttatgacataaa

SEQ ID NO: 68384 - DNA, 877 bp, Homo Sapiens
  misc_feature (46)..(84): n is a, c, g, or t
  misc_feature (87)..(121): n is a, c, g, or t
aaaaagaccagcatgatagatcatatagggcgctactcgctgatannnnnnnnnnnnnnnnnnnnnnnnnnnnnnnnnnnnnnncgnnnnnnnnnnnnnnnnnnnnnnnnnnnnnnnnnnncagtcgacggtaccggacatatgcccgggaattcggccattacggccgggacttagtgcatggctgagtttctacaattcaaggagccaagaaaataggttcaagatggaatatagtacatgcatataaggcagatgcacacatgctggttactttaagattgtgtgtgttgattagtcacaatgatagactataacatgagacaatacaaagttacatttttggaccatattaaaactgcaagaagacaggggtcttactgaagatcttttagaaaacttaaatcctgtcacaggatatttagacatgtgtagaatgtagctcaatttttaaaaagtaactgacctagagggtgaaagttgaaactgacacattttcaaattaagattatgcttattttgtacagaaaacaatgtttaaacacaagcagatctgttgtatgtaataagtaacacagagttttaaaacaaattaattatttagctttattgaagtttgtttttttccttccgaacctggagtatcatattataaacagcagtttcacaccagaatagcagtgccctttctttttgtacatactgattggacctttctttactgttacgtggacactttctatgttagttttgatgcataattctttgaatccttttatacaaactagaatgtatgtgtaagaatacctgtccctgcaatgtagtaactacaaacttatttttaaataaatagaaaacttgtttttctaaaaaagaa

SEQ ID NO: 68385 - DNA, 444 bp, Homo Sapiens
gcctcatcagctgcctagaaccttgtgtgataaggagcagagagaggggagccagggcatctccaagagctcaggttgtttagccatgaaggtgcggccagctgagctatgtgagaaaagagtgggagaggaattggggtttggcagggcactaatgtttgtgccaagctactggcacttggcactgaccagggctcaagggaatggggttagatatgggcataaggttataataatttttcccccagaaactatttcattatttgtgagattattatttaaatgaatacccaaacctaaagcaaaaactgagaatgtcagcttagtacttcagacaattgactttccgtcagcaaaccggggaagacaggttctcctaagttatccaaatgcaaataggaatttattttatctttttatttttgaggcagagtcttgctctgt

SEQ ID NO: 68386 - DNA, 1502 bp, Homo Sapiens
  misc_feature (204)..(205): n is a, c, g, or t
  misc_feature (212)..(212): n is a, c, g, or t
  misc_feature (219)..(219): n is a, c, g, or t
  misc_feature (237)..(237): n is a, c, g, or t
  misc_feature (252)..(252): n is a, c, g, or t
  misc_feature (261)..(261): n is a, c, g, or t
aacattttagagtaattttaacacttttatcttgcccagaacataaaaaaatcttcattttcaatccttataactttgtgtgagggaaattaggcatcagggtgggaaacagaggtgacttttatttgtctaagtctaccaaattgctgaactagtaggtaaaactcccccttcctcttaactgagctgactgattttgcgcannattttcnctttcgngttcctccatttgggttncttcggttcccgggnattccaggngggattcctttttctaaagcacaacctttggggtgtaggttaagagacatttttccctgtgtccccaccaccccttccacacatgtgcaggtctcccctgagtgcccagacagcgcaggaccacgcagtccactccctctgcccctcagagattctgcctctctctcctgacctgtgccacattcttgtgtcaggaccccacctcccgctgcgttttcttcaacatatgagagtctagatgggcacagcatttagaggagctgccctattctggtgtcctggggagagagacgtgcttgtgaccccggctgtgcaggagccctgaacctttctgggagcaccagctgcgggggccatggtgggagctcacttgtggtgacttggctcattcaggtctcctccctccttgctgctgcctctggagggtctgctggccgggctggacatgagctctgtgtagccagtgtggactggacccattgggccctaagtcaatgaatggtgtaccagtccagccgtagggatgcataacaccagagcttcatggattcaaaggcaacgaaggtggcattttactgaccaattacatgtttgccgtacccttatatagagtgagaaagatgtcggtctagttttaagtctttctgaagcagaaatgggctggaatgtatggtgggttgcagctattcttgtgttctttttaaaatatctgaaattatacttagatatggggcaggctttattcctacccaagtagcagcgatcagcgatgctggtgctaacccctggtctttgtctgtttccctattgctgacctcaggcaccacactgtaactcgaggcatcaccaaaggcgtgaaggaggactttcgcctggccatggagcgccaggtctcccgctgtggagagaatctgatggtggttctgcacaggttctgcattaatgagaagatcttgctccttcagactctgacctgagtggagacctttccaccagacacagctcgggcctgtgtaattgtaggagaagacactcagcagtgattgccatggcacagagccgtggtcattgttgctgttacaaagaagaaaaccatctgagttctaactccttggttgcttaaaagtagttcccaagagtctgagaagctatttctatttttaagagtcattttttgtaatttttgtaaaacaaaagtaccaatctgttttgtaaataaaaatcatcctaaaatttgaaaa

SEQ ID NO: 68387 - DNA, 1792 bp, Homo Sapiens
  misc_feature (1575)..(1578): n is a, c, g, or t
  misc_feature (1581)..(1582): n is a, c, g, or t
gggataaaggaagacgaagctatggagatattttgcatagaatgaaggatctctgcagatacatgaacaactttgatagtgaagcacatgcaaaatataaaaaccaagtggtgtattccaccatgctggtcttctttaagaatgcattccagtatgtcaacagcatacagccatctctcttccaaggtcctaatgccccgagccaagttccactggttcttcttgaagatgtatcgaatgtgtatggtgatgtagaaattgatcgtaataaacacatccataaaaagaggaaactagctgaaggaagagaaaaaaccatgagttcagacgatgaagactgttcggcgaaaggaagaaatcgtcacattgtagtcaataaagccgaacttgctaactccactgaagtgttagaaagctttaaattggccagggagagctgggagttgctctattccctagaattccttgacaaagaatttacaaggatttgcttggcctggaagacggatacttggctttggttaagaatcttcctcactgatatgatcatctatcagggtcaatataaaaaggcgatagccagcctgcatcacttagcagctctccagggatccatttctcagccacagatcacagggcaggggaccctggagcatcagagggcgctcatccagctggcgacgtgccactttgcgctaggggagtacagaatgacatgtgaaaaagtccttgatttgatgtgctacatggtactccccattcaagatggaggcaaatcccaggaggaaccctcgaaagtaaagcccaaatttagaaaaggttcggatctgaagctcctgccttgtaccagcaaggctatcatgccatactgcctccatttaatgttagcctgttttaagcttagagctttcacagacaacagagacgacatggcattggggcatgtgattgtgttgcttcagcaagagtggccacggggcgagaatcttttcctgaaagctgtcaataaaatttgccaacaaggaaatttccaatatgagaattttttcaattacgttacaaatattgatatgctggaggaatttgcctacttgagaactcaggaaggtgggaaaattcatctggaattactacccaatcaaggaatgctgatcaagcaccacactgtaactcgaggcatcaccaaaggcgtgaaggaggactttcgcctggccatggagcgccaggtctcccgctgtggagagaatctgatggtggttctgcacaggttctgcattaatgagaagatcttgctccttcagactctgacctgagtggagacctttccaccagacacagctcgggcctgtgtaattgtaggagaagacactcagcagtgattgccatggcacagagccgtggtcattgttgctgttacaaagaagaaaaccatctgagttctaactccttggttgcttaaaagtagttcccaagagtctgagaagctatttctatttttaagagtcattttttgtaatttttgtaaaacaaaagtaccaatctgttttgtaaataaaaatcatcctaaaaattccnnnncannaaaccaaccaacaaacacaccccccttgttcgggccgccctccgggccctccaagaacgctttcctaaaaactatttcgctttgggccgcgcggggcccccactaagggaaaaggggaacacttggggccataagcctggtttacccctaaggagaagactccctgggaccaatggacttaagcggcctttggggattttctccccccac

SEQ ID NO: 68388 - DNA, 429 bp, Homo Sapiens
tcaacggacaaccaaaacctatgaactcagcctttcaggctaaaaatcagcaaccctaataggggtttctactactaaacataaacatcaatcttcttttgtcccagcaacagaaccatagccattaactaacccaaggtcctaccttctcttccctatacacaacaaaaattctatttcatgcaaaaacattttggcagtttctcagttcctgaaatctctggctactttatccaggttccccaacccctcccaggcctcttctcaacacagcaagttggctcttatcattgccactatattaggttacacaaagaaactcctcacctgggcttcattgaaatcttcaaggatatagccagctcctgctcgaagctgggattctgtatactgcttgttgaaaggaggaatttccaaaaattctatatt

SEQ ID NO: 68389 - DNA, 1438 bp, Homo Sapiens
  misc_feature (1371)..(1396): n is a, c, g, or t
aagcgaggcctgggtggcgaattcggcacgaggatggctgtcatcctgtccttggagcaaggaaacagactgagagagcagtatgggcttggcccctatgaagcagtaacacctcttacaaaggcagcagatatcagcttagacaatttggtggaagggaagcggaaacggcgcagtaacgtcagctccccagccacccctactgcctccagtagcagcagcacaacccctacccgaaagatcacagaaagtcctcgtgcctccatgggagttctctcaggcaaaagaaaacttatcacttctgaagaggaacggtcccctgccaagcgaggtcgcaagtctgccacagtaaaacctggtgcagtaggggcaggagagtttgtgagcccctgtgagagtggagacaacaccggtgaaccctctgccctggaagagcagagagggcctttgcctctcaacaagaccttgtttctgggctacgcatttctccttaccatggccacaaccagtgacaagttggccagccgctccaaactgccagatggtcctacaggaagcagtgaagaagaggaggaatttttggaaattcctcctttcaacaagcagtatacagaatcccagcttcgagcaggagctggctatatccttgaagatttcaatgaagcccagtgtaacacagcttaccagtgtcttctaattgcggatcagcattgtcgaacccggaagtacttcctgtgccttgccagtgggattccttgtgtgtctcatgtctgggtccatgatagttgccatgccaaccagctccagaactaccgtaattatctgttgccagctgggtacagccttgaggagcaaagaattctggactggcaaccccgtgaaaatcctttccagaatctgaaggtactcttggtatcagaccaacagcagaacttcctggagctctggtctgagatcctcatgactggtggtgcagcctctgtgaagcagcaccattcaagtgcccataacaaagatattgctttaggggtatttgatgtggtggtgacggacccctcatgcccagcctcggtgctgaagtgtgctgaagcattgcagctgcctgtggtgtcacaagagtgggtgatccagtgcctcattgttggggagagaattggattcaagcagcatccaaaatataaacacgattatgtttctcactaaagatacttggtcttactggttttattccctgctatcgtggagattgtgttttaaccaggttttaaatgtgtcttgtgtgtaactggattccttgcatggatcttgtatatagttttatttgctgaacttttatgataaaataaatgttgaatctctttggttgtagtnnnnnnnnnnnnnnnnnnnnnnnnnnctcggcctcgtgccgaattcgccacccaggcctcgctacctt

SEQ ID NO: 68390 - DNA, 1753 bp, Homo Sapiens
  misc_feature (1689)..(1697): n is a, c, g, or t
cagtcgacggtaccggacatatgcccgggaattcggccattacggccgggggtttccgggagcgccgcgtggttagcgtcggcggcttttggcatggcgactttttctggcccggctgggccaatcctgtcgcttaatccgcaggaagatgtcgagtttcaaaaggaggtggcgcaggttcgcaagcgcataacccagcgaaaaaaacaagaacaacttactcctggagtagtctatgtgcgccacctacctaacctacttgacgaaacccagatcttttcatatttctcccagtttggcactgtgacacggttcaggctgtccagaagtaaaaggactggaaatagcaaaggctatgcatttgtggagtttgagtctgaggatgttgccaaaatagttgctgaaacaatgaacaactacctgtttggtgaaagactcttggagtgtcattttatgccacctgaaaaagtacataaagaactctttaaagactggaatattccatttaagcagccatcatatccatcagtgaaacggtataatcggaatcggacactaacacaaaagctacggatggaggagcgatttaaaaagaaagaaagattactcaggaagaaattagctaaaaaaggaattgactatgattttccttctttgattttacagaaaacggaaagtatttcaaaaactaatcgtcagacgtctacaaaaggccaggttttacgtaagaagaagaaaaaagtttcaggtactcttgacactcctgagaagactgtggatagccagggccccacaccagtttgtacaccaacatttttggagaggcgaaaatctcaagtggctgaactgaatgatgatgataaagatgatgaaatagttttcaaacagcccatatcctgtgtaaaagaagaaatacaagagactcaaacacctacacattcacggaaaaaaagacgaagaagcagcaatcagtgattttcaatgtattatatttcttttgaaaaatataatatttttatgagagtggactttgtatttcactaggtacaatggaatacaacctttgacaagattttcagaggaaaaatacactgtttggtcaagttaaggaaagcagtgtgtaattttggattgcctgcccttggctgaaatacaggggtgcataccagcttgcagtggcttggctgacattgcctctttgtcctggcctctagttttcttttgatatttcatagctctccttagtttactctgcctggatagaaagttgaccactaactgcaggtttaagtactaaactgcagccttttctgtcgccagcaattaaagaccaccaatcttgtttgtccatctacatggtttgtcggggacatttaactcatggaggtgctttagatttcaacatcagatggttgaagctggaagtttaattatatgtagagtgagaaggcagttccagttttagcacagatttgtttatgtgttcagattttaatagagattcaaaaatgactcatttttaccaataatgttaaattagttttggttgtgctagcatgaattaataaccaccattttataccagtatcatcagtgaagaattgtatttcaagattcaaacaataaccagcaattaaacttttttctacaatgtatttgtttgcgagtaggacttgggagtcattgggnnnnnnnnntaataaattttccccttcattaacgaattcagactcattaaaaacattgccatcag

SEQ ID NO: 68391 - DNA, 1259 bp, Homo Sapiens
agagaaccttacaaatgtaatgagtgtggcaagtcttcagtcacaagtcatccttagtaaatcactggagaatccacactggagagaaaccttacaaatgtaatgaatgtggcaaggtcttcagtcgcaattcataccttgcccaacatctgataattcatgccggtgagaaaccttataagtgtgatgaatgtgacaaagcattcagtcaaaattcacatcttgtacaacatcacagaatccatactggagagaaaccttacaaatgtgatgaatgtggcaaagtcttcagtcaaaattcataccttgcatatcattggagaattcatactggagaaaaagcttataaatgtaatgaatgtgggaaggtcttcggtctaaactcatccctagcacatcatcggaaaattcacactggagagaaacctttcaaatgtaatgaatgtggcaaagcttttagtatgcgttcaagcctcactaatcatcatgcgatccacactggagagaaacatttcaaatgtaatgaatgtggcaaactcttccgcgacaattcatatcgtgtacgtcatcagagatttcatgccggaaagaaatctaacacatgtaattaatgtggcagagtgttcagttagcattaaagccttgtaagacatacaataatttatactggagaaaaactttgcaagtataatgaatgtagcagagcctttagtttttgttcaaggcttaataaccgttagctagaccatagaggacagaaactttactaatgtactgaatgtggcaaggtcttaaggtaaaatctgagaccaggattcttcaaagaattcttgctggtgagaaacctaacaaatgtaatgaatgtggcaaggtcttctggcacaattctcacattgtacaatattgcaaaaattcatgcttgagagaaacaaaaacactgagagtgggaaaccattatgacttcaaacattcatcaacatcagagaatccatactaaagagcatttataataattatatgtgatagagattttccgcaggccaaagtctcactaggcatcaaaaacttttttgatgaaaccatacaaatgtaacgtgcatgcttaagcttttacccaggcatcaaaaccggaacatcacagggtttatactggagagtaactacacaaagataatgtaataagcctttcagtgtaatattcatgattttgtcgtgagagatccactcaataaaaaccaggcaaatgtagtgaatctgaa

SEQ ID NO: 68392 - DNA, 1080 bp, Homo Sapiens
  misc_feature (166)..(166): n is a, c, g, or t
aaagcaggctggtaccggtccggaattcccgggatatcgtcgacccacgcgtccggtccaggtgaagaggatacatgagtacaagcgacagctctgaactgtctgcatgtgatcacgatgtacaaccgcattaagaaagaccctaagaagttattccgtgccaagngacagttatcattggtggtaaagctgccccaggatatcacatggccaaaatgatcataaagctgatcgacttcagtggcagatgtggtgaacaatgaccctatggttggaagcaagttgaaagtcatcttcttggagaactacagagtatctcttgctgaaaaagtcattccagccacagatctgtcagagcagatttccactgcaggcaccgaagcctcggggacaggcaatatgaagttcatgctaaatggggccctaactatcgggaccatggatggggccaatgtggaaatggcagaagaagctggggaagagaacctgttcatctttggcatgaggatagatgatgtggctgctttggacaagaaagggtacgaggcaaaagaatactatgaggcacttccagagctgaagctggtcattgatcaaattgacaatggctttttttctcccaagcagcctgacctcttcaaagatatcatcaacatgctattttatcatgacaggtttaaagtctttgcagactacgaagcctatgtcaagtgtcaagataaagtgagtcagctgtacatgaatccaaaggcctggaacacaatggtactcaaaaacatagctgcctcggggaaattctccagtgaccgaacaattaaagaatatgcccaaaacatctggaacgtggaaccttcagatctaaagatttctctatccaatgaatctaacaaagtcaatggaaattgaactctagaattgtctctagaaaacatagcttcttactgaacttgaacatttttacaacattcactggtttttgttttgttagctaataatctataatagttgagtatctctgggaatggggagggaaattatatgtaatagagcttaaaaataaagtgtcaatttccaagggct

SEQ ID NO: 68393 - DNA, 1055 bp, Homo Sapiens
  misc_feature (342)..(356): n is a, c, g, or t
tatcaatcagactgatctaatgtgaaatgtaagtatccttaaaaacaaagcatctattttggcagaaattgtgttcttaaattcagtcatttgatattcggtgagacttcatatttctcatccctttattgctttttagcaaacataagaaaccatgagtcattttgtcatttagagtattctgataaaatctcttgaaaatactgaaatcaaaaggttaatgattttttgttcattctgatttgtcattttattatctgttatcggtctaaagtgctaatttacccatttgatttttctgctagacagataacttttaatttttcaaatttggcagacacnnnnnnnnnnnnnnngaaaatctttccttccagatctgttgcccactgaacagccacccgtccctcactgtcctggtgtccgattgggctggatggtgttggggcatgatgtgtggaggaactggaaggtgctttaggtctggttcagggtcgggcattctttgttgtttgcacatctttttaaattttacaccttttcttaagaattctaatgccgtcttaagtttttataccaataatgctgagctttaagtgtaggatctggtagtacagacagtgtgatggatgatgctgctggttgtaaatttcatcgtgtgtgtctaattttttttcctgttgaatgggtaaaaacaaaacaaaactttttttagaagatgaatttgctgtcatgttttgtggaatgagggaccgttgagctcactaccacctggagtttgagttgaagcatgaaaatggtgcccatgcctgacgctccagcgcctggatctgcacgtgcccttgtagaggatccttaccgtcctagagagcagacgctttctgaaaactacttgctccaaaagaccctctgagttaacgtttcagctgtatcattagacttgtatttagagcgtgtcacttcctctgaactgttactgcctgaatggagtcctggacgacattgggtttttcctctaggagaatacaagccttaataaacaatactatttagcaaaa

SEQ ID NO: 68394 - DNA, 950 bp, Homo Sapiens
  misc_feature (91)..(125): n is a, c, g, or t
aaagagaactttggaataactatagggcgcctagctcgcctgtaatgcgaacgaccgagcgcagcgaagtagtgagcgaggaagcggccgnnnnnnnnnnnnnnnnnnnnnnnnnnnnnnnnnnncagtcgacggtaccggacatatgcccgggaattcggccattacggccgggggtatggtggggttacacgcgggttcaacatgcgtatcgaaaagtgttatttctgttcggggcccatctatcctggacacggcatgatgttcgtccgcaacgattgcaaggtgttcagattttgcaaatctaaatgtcataaaaactttaaaaagaagcgcaatcctcgcaaagttaggtggaccaaagcattccggaaagcagctggtaaagagcttacagtggataattcatttgaatttgaaaaacgtagaaatgaacctatcaaataccagcgagagctatggaataaaactattgatgcgatgaagagagttgaagaaatcaaacagaagcgccaagctaaatttataatgaacagattgaagaaaaataaagagctacagaaagttcaggatatcaaagaagtcaagcaaaacatccatcttatccgagcccctcttgcaaggcaaagggaaacagttggaagagaaaatggtacagcagttacaagaggatgtggacatggaagatgctccttaaaaatctctgtaaccatttcttttatgtacatttgacaaatgcccttgggatacttggaactgctaaattatttatcttttacatacggtcacttacatgcaaaagcgattaaaagacatctttcctgcattgccatctacattaatatcagattattacggattgttagattcgcatctcagtgttaaatctttactggatagatgtacttaagtaaatcattgaaacttctacttgtaatattagacgtgaa

SEQ ID NO: 68395 - DNA, 935 bp, Homo Sapiens
  misc_feature (43)..(85): n is a, c, g, or t
  misc_feature (89)..(123): n is a, c, g, or t
ggaggatcgtataaactcactatagggcgctagcgcctttatnnnnnnnnnnnnnnnnnnnnnnnnnnnnnnnnnnnnnnnnnnnccgnnnnnnnnnnnnnnnnnnnnnnnnnnnnnnnnnnncagtcgacggtaccggacatatgcccgggaattcggccattacggccgggggttttttcggtggggttacacgcgggttcaacatgcgtatcgaaaagtgttatttctgttcggggcccatctatcctggacacggcatgatgttcgtccgcaacgattgcaaggtgttcagattttgcaaatctaaatgtcataaaaactttaacaaagaagcgcaatcctcgcaaagttaggtggaccaaagcattccggaaagcagctggtaaagagcttacagtggataattcatttgaatttgaaaaacgtagaaatgaacctatcaaataccagcgagagctatggaataaaactattgatgcgatgaagagagttgaacgaaattcaaacagaagcgccaagctaaatttataatgaacagattgaagaaaaattcaaagagcctacagaaaggtcaggaatatcaaacgaaagtcaaggcaaaacatccatcttatccgagcccctcttgcaggcaaagggaaacagttggacagagcaaaatggtacagcagttacaagagcgatgtggcacatggaaagatgctccttaaaaatcttctgtaaccatttcttttatgtacatttgaaaatgccctttggatacttggaactgctacattatttgatatttaacataaggtcacttaaatgaaaagcgattaaaagaaatctttcctgcattgccatctacataatttcagattattacggatgtcagactgaatctcagatgttaaatctgtactgatagattgtatttgagtaaatcatga

SEQ ID NO: 68396 - DNA, 1700 bp, Homo Sapiens
  misc_feature (62)..(100): n is a, c, g, or t
  misc_feature (104)..(138): n is a, c, g, or t
  misc_feature (1564)..(1564): n is a, c, g, or t
  misc_feature (1566)..(1574): n is a, c, g, or t
  misc_feature (1579)..(1579): n is a, c, g, or t
  misc_feature (1581)..(1582): n is a, c, g, or t
  misc_feature (1590)..(1591): n is a, c, g, or t
  misc_feature (1680)..(1680): n is a, c, g, or t
aataatacgaaacttcaaaccttaaataaggcgggggcccggcccttaagctgcgctgaagnnnnnnnnnnnnnnnnnnnnnnnnnnnnnnnnnnnnnnnccgnnnnnnnnnnnnnnnnnnnnnnnnnnnnnnnnnnncagtcgacggtaccggacatatgcccgggaattcggccattacggccggggcctctcaagcttggcgtttgtttggtggggttacacgcgggttcaacatgcgtatcgaaaagtgttatttctgttcggggcccatctatcctggacacggcatgatgttcgtccgcaacgattgcaaggtgttcagattttgcaaatctaaatgtcataaaaactttaaaaagaagcgcaatcctcgcaaagttaggtggaccaaagcattccggaaagcagctggtaaagagcttacagtggataattcatttgaatttgaaaaacgtagaaatgaacctatcaaataccagcgagagctatggaataaaactattgatgcgatgaagagagttgaagaaatcaaacagaagcgccaagctaaatttataatgaacagattgaagaaaaataaagagctacagaaagttcaggatatcaaagaagtcaagcaaaacatccatcttatccgagcccctcttgcaggcaaagggaaacagttggaagagaaaatggtacagcagttacaagaggatgtggacatggaagatgctccttaaaaatctctgtaaccatttcttttatgtacatttgaaaatgccctttggatacttggaactgctaaattattttattttttacataaggtcacttaaatgaaaagcgattaaaagacatctttcctgcattgccatctacataatatcagatattacggatgttagattgcatctcagtgttaaatctttactgatagatgtacttaagtaaatcatgaaaattctacttgtaactatagaagtgaattgtggacgtaaaatggttgtgctatttggataatggcactaggcagcatttgtatagtaactaatggcaaaaattcatggctagtgatgtataaaataaaatattctttgcagtaaaatattccctttgttaatgttatagaaggggggatacaaaaaggaactaacaatttgtatggcagtgtcagatatttttattttagtatttcctgttttggtttatttgcatcttagaagagcataatgacattgtttgatgaagcctaattatgctggactgttttgacctggtttaacccttctgataggtagttgtggatgctggggatgagaactgaataatctttgcctggagtgacactacactctagaatttccactttggagaatactcagttccaacttgtgattcctgatagaacagactttacttttctagcccagcattgatctagaagcagaggaatcccagcgccttttaaaagttgttatgtggttttcttttaaaaagctcctgtttttggaaagtagaatttatgggtacaacgtatgttcattatttgtacataaaataaaaccatttaaaaaantnnnnnnnnnaaaanannaaaaaaannaaaccttgtcgggcccgccttcggccctccgagaagcttttcctagaccaattcgttttgggcgcggcgggcccccagtaagggtaagnggaaccttggggttcttaaa

SEQ ID NO: 68397 - DNA, 642 bp, Homo Sapiens
  misc_feature (82)..(116): n is a, c, g, or t
aaaaaatccctctaggtagtttaggtgaaaaatgtcccttttattttggctttggttgtgatttcagagcataatgctatgnnnnnnnnnnnnnnnnnnnnnnnnnnnnnnnnnnnaagtccgtaagtgcatacagttttctctaatttttaaaccctttcctcctcccattttgacatttgcacttggagaacacttgagttgtgaaggttttgggcatccaccccagaaagtgggaatttgattttatccttccgaactggaagaacatttttatgaagaatttttgtctaggagaatataacagtgttacccaaggttgtgtctttaagggtggttcattttctctgaccttttgttactcaaagtaaagtactaggagtcctaagaaatgttctgttcttgtacattatactgattaagtcaggattaatttgatttcaaagctgagaacagtggtaaaaactcgtttacagaaatgcattttggaagagaaaaatactgtaaaacgtgtcgtgaatgtttcttcagtttcttgttcagccaatgaggaaagggcattgcctttctttttaccattaatcacttctcaataaacgtgagatcctgttgagcatcaaaaaaaacctcgtgccgaattct

SEQ ID NO: 68398 - DNA, 654 bp, Homo Sapiens
gacgactgcccaatagaactcagcaaagtacagagtgtgaaggctgtggccaagaaacgcagggaccgctctctcccccgggctttcgaaatcttcacagacaataaaacctatgtctttaaggccaaggatgagaagaatgcagaagaatggctccagtgcatcaacgtggcagttgcccaagccaaagaaagggaaagtagagaagtaaccacatatctgtagggatttataagtcagccatgacaattatacaccacaggcattgtattatcattgccaatgtcaagaaaaagagctaaatttaccaagccatgttgttttttactaaataccaatggaattgttgtcctttaagaagaagggcctaaaatggcaggattcttagtaaatgtcatactctaacagctttagtattgacttcagaatatatctgatgcccacaaaaataaaataaaataaatgagctacagagtatgccctcagatagtgtggggccaggaagggaaaagtcactgataaaagaacttctgtagatatgtcatttaaaactgtgagaaaacaacatgaaaagatgcctgaactctccatcctgaggaaagattagcacttctgatgaaaatcacagtctgtcaaaggtattaaaagaaaact

SEQ ID NO: 68399 - DNA, 743 bp, Homo Sapiens
aaatcattaaattagctctttttatttaaatgtttataaggcagatctatgagaatgatagaaaacatggtgtgtaatttgatagcaatattttggagattacagagttttagtaattaccaattacacagttaaaaagaagataatatattccaagcagatacaaaatatctaatgaaagatcaaggcaggaaaatgagtataactaattgacaatggaaaatcaattttaatgtgaattgcacattatcctttaaaagctttcaaaagaaagaattattgcagtctagttaattcagacagtgttaaatggtatcaggataaagaactgaagggcagaaagaattaattttcacttcatgtaacacacccagatttacaatggcttaaatgcaggaaaaagcagtggaagtagggaagtagtcaaggtctttctggtctctaatctgccttactctttgggtgtggctttgatcctctggagacagctgccagggctcctgttatatccacaatcccagcagcaagatgaagggatgaaaaaggacacatgctgccttcctttgaggagacttcatctcactggccaacactcagtcacatgtacacctaactgcaaggacagctgaggaatgtaatgggcagccgcttttaaagaagtagagtcaataggaagacaaattccagttccagctcagtctgggtatctgctcgcgagccgggatcctctagatcactcacaa

SEQ ID NO: 68400 - DNA, 675 bp, Homo Sapiens
ccttagcttgttgcaatacttgaataaagtgtgtactcgcaaaagaatttctgtagcacagcattagagactcataacttttctgcaagaaatacaaacttacatcttccttttactaccttaagaatactagtgaataaaacattaattcaaagagcaaattatagaaactacaatgacatttaatgcaaattgtaggaatttacatgtttacaaatcatcttcaactggttgtgcagcaattcaataaaatatctttgtattataaaaatgtgaagaaaaaatgtaaactgatgtaaaggaggtactgtcattttaattaacctatgtttaatagcttttccttctggactttgcaaagccttcttggcaaacacattgcaaagcattctctgggaggttcagcctccttgtgtgtactgtactgtgcagacatgaaaaaataaacccgtttactgtgtgcgtgtaaatagcctggtcatcaggccattttcagccaatagtcacatccagtgcaattttgcaccgaacacttaagggtgtggtttgtaagtacgatctgtaaaataactgggatgaattcccatgtatacctgtgtaaatagatttgttaactgaaatatactttaagaaagataaaatctgtaaataaactgatttataaattaaaaaaaa

SEQ ID NO: 68401 - DNA, 733 bp, Homo Sapiens
catgaggacaggaagtaaatcagcccttaggagagaggctcagcctccctttcccagatctcccagtgagtttaaagggaagcagggagcccagagtgctaagttctaacagccagaaggaagcttatagatttctgaaaaccgcccctttgtttttaaaaagatcaacacaatttgactttctcaaggtcaaaacgaactagaatccagatctgctcatggcaaaaatgggggtgttctgagaattccagctttgggccgcactgtacagcagtctggatagagtgtgatctgagaagggaatgggtctgggttgttccaccccttccgagttccaaaaagagggaactggttttcttggttctcagcccagcagcacctatcctggctcttggtcctggcctgcagccaagtgctgttcctagcctgaggcttgagacaggtggggttggctcctcaccaaccccagttccgtcccatcctgagggcaagatcctgggctcataggcagtccctttcacttccttgtcttgctccctgctatgctggagatgaatgtgactaaaagggccatcttgctggcttaatgtgtggctggagagaccagcctggagacaatgtggcaaaatggggcgcttcatccagtctgtctaagccctgtcgacttggggaggtgatttctttcctggttctatatgtgaagcaaaataaatgttttaaaattaaaagcaaa

SEQ ID NO: 68402 - DNA, 719 bp, Homo Sapiens
ccccccctttggtgaactcgcagtacttgggctgagcccgaaatctcgcgagatgctgcaggcgtcagtgcggcttcccactaggcgcgtggtacccgaggccgggccggagccgcaggccagccgcgattccttcgggcgatgctgggggctttccggtcggggccgcagccgcttccggagccgcgggcgaggtgcgttccccagcctggtttgctctgggctctgacccgccgccgcgaatctccgctcgtaactccgggcctgaacctggaggagggaggatttcctctgtgcagctttcgagcggtagactcaccctgccaggcagacctagattggcataaccagagatcagttccagttgtgatgcagtgggtgtctacacacttctgatgacacctttattttaaaagctgatgttccaaggtgagaagggagcttctttgagacgtcatgttgtttcaagacgagttttaatttaaggcatttccaaaagtgatatgcagctcatctctcagaatacaatgccggcaataactacccgtggagtccttaccaggaggtttctgcgtgatttgggttgtgcagaattcctctgcttatatagaaacagaaaggtactcctctgcaggtctagtttctcttcgggtacaatgtaagggaatatcactgtgttcccactttcttagcagcagaatttttaacctcgtgccgat

SEQ ID NO: 68403 - DNA, 1057 bp, Homo Sapiens
  misc_feature (547)..(629): n is a, c, g, or t
  misc_feature (658)..(703): n is a, c, g, or t
  misc_feature (705)..(705): n is a, c, g, or t
tcccgggatcttcccctaggcgcgtggtacccgaggccgggccggtagccgcaggccagccgcgattccttcgggcgatgctgggggctttccggtcggggccgcagccgcttccggagccgcgggcgaggtgcaagcggtcttctctgtcttctttatggccagtaaaattctccagaagagatttatggcagcctcactcccagtagtttctgcatttagtgagataaggaatggattttcttctgtgtattgctgacacgaacaggagacggaaatactgagtagaagagggcggttccctggctaaggccccaccctcaagcctggatacccgcggccctaaatgagaagaggcgtttctgtttggggcccaaaaagttgccttttgacccaccacgccccctatcctgcccccatataaaccccaaaccccaacctccagagcataccagcaggtgaggagatacgaggcaagccgactgacggcaaaacgacgtagcagagaaagagagaagaggagggacgtctggacaccgagagatgnnnnnnnnnnnnnnnnnnnnnnnnnnnnnnnnnnnnnnnnnnnnnnnnnnnnnnnnnnnnnnnnnnnnnnnnnnnnnnnnnnnccacccttccagctccccatccatcctgnnnnnnnnnnnnnnnnnnnnnnnnnnnnnnnnnnnnnnnnnnnnnncnaaaaagaaagaggaagcgagaagaggaagaagggccagagacagctccgacgtggaccaacaggggggggcgctctaaagaatccctcaagggccccaagcttacgcgtacccaacttttttgaacaaaggggtcccctatagcggggccttatataaagctagggactgggccggcgtttttacaacgtcgggattgggaaaaaccgccgaatttggggactttttgtgaaggaaaccttatttttggggggggtggccatacttgggcaaccctcccctcaggaattttagacgctccaggggaaatataacaattttctagaggaactagcgggtacaacccagctccg

SEQ ID NO: 68404 - DNA, 1381 bp, Homo Sapiens
  misc_feature (787)..(796): n is a, c, g, or t
  misc_feature (892)..(906): n is a, c, g, or t
aaaaacagcagcattaaacttagtgacatgacaccgacatgattaataccatcttaacacactcagaattccgcctttcacattataatcaagcatagtggtaaactgttataaaagtgactttgctacgagagacaggttagggaacaaacaacctgacttatggtagaaacccatagctctgttcagattgcaataaaccatacacattttaaacacaacgtaacactgtaacagctggtacagggaaagaagaaatcttcactcaagtagtgtctctttgagcacaacacggtggtagacaagtaaaattggctgtagactttcattacaaacacaagcacacagagagcgacattcacaccagtgtgttcactttgtgtctctctgaagcaacaggctaaaaaaggatgatggaagtaaaaagttggtttcagaaaaagctttttgtccatttcgtacgtcatattttttcagtttcatatggtttgacttcttcctctctcttccacttattttcatttctatttggacaacaagcactgcatatatgtatttacgtgacgctgtttattacatatatacacactattttgggagtttgattcctcccataagatcagggtgaaacattctgcccttggtttatatgcagagcagtttacaaaagtggggtgaatgcactgctggctgctcctgctgcgggccggagacagagtgaggctggctggggaggaagtgtcgtttagggtgaaagtgagaaaagctgggaagaagcaaaatttcnnnnnnnnnncaaaaccatatgactgtcaccagtgttgtaaaaaaaaggtcaaatacacagttttaaagattcagtaaacattgcacacagcaagtattcagtgtnnnnnnnnnnnnnnngcacgcaccaacatttaagtttgtctgaaggtttaaattacatgtatcatacatataagcctgttgttgaaccaggagaccagaggctcaaaagcattgcattctttcttgttttggacattggtacaagaaaaatgaaaaatcccaactgcatagaaatctaggaaatgtatagacaaagaaacaaaatacctttcctttcctcccctccacaccccatgactccccacacttgagtgtattaagtaggcaagctttactcgtttcagtctgcagaatccaacgtatcattagaaggggggaggggaggtgcgtatctcagtctgtaagtgcctaaaatgggaaagacagaactaagtcaccgcttacaagcaaacgtcatcacaaaccactacgtacaagctatcacacgggcatgctctccacaaggcaccttcgtcagctctagtgccactccaaatggccaatccgctca

SEQ ID NO: 68405 - DNA, 630 bp, Homo Sapiens
  misc_feature (75)..(91): n is a, c, g, or t
ggaaagaaaacttgatgtgattgccataggtggaataatccaacataaattgccatagatagaaggtatctgtannnnnnnnnnnnnnnnnaaatgaaatatatgtttcattttagagaaataactattactttagatctttccaaatctgagaaagggaggctagcatgtgttcaaggttagcacgcaacagaatttcctaaaatcagaagaattggaagatcctccccttttgaaatggccctgctgtgtcagtttccctgtggccttttgaactgtacatctcacatgttgggaaacgctggccactgggaaatcattagaaaggaggctgtagaatatttgccgagcctctactgtataccaggggctaactcaccaagcacattctaggaattgggccctgctcatgaggagccttagtggagattccaggtgaatatttatgaaaaagtcaacattagaactgaaaatggaaataaactgcttgaaaagacgatggtgcctctgggtcatttctgctcagcatccgtttgtgttgtgtagatgcgtcttaatcgcagggtgagcatgccttttaagcttgttctcttaaggcaaaaatgtcggtagcattaaacagtagtgcag

SEQ ID NO: 68406 - DNA, 1109 bp, Homo Sapiens
cagtcgacggtaccggacatatgcccgggaattcggccattacggccggggtgtgagaaggagtttcttaatgagtttacacgtttaaatcaagcatattataagttatatgccatgtgttgaaggcttttctatttatatatataaagatttttagtatttgtttttagtgtccttgtgttgcaataatttaactcctttgactcagttgctgaaaatatttcttctattaagaagtgctcttgacttcaacacccaaacactgaaaatcatgtcaatgttacccaaagataagtttttatacagatacacaccttataagttctgatttattttcttactcattatgctgtgttctaaataaatcatgaatgagaagagtgctttattgtgaaattatttaaaactgtcctttaaaagaaaaagaggaaacgatgaacaaaaactaatctaattgccaagttagaattcattatttaatttacctcctatgcaatgattaatgctgcaaaatgtatggttatgttaccgtatattcacaaaagaaatattattacaaggtttcagaggtagccaattgcattcttttggaaatttactgtactgtttcaatgtgttaagtgccttgttgtaaagtaaaattttaagtctagattcattattttcctgacatatatttttcattatgatatctactgtatgctattgtgatagttttatgaaatgcttacattttaatcaaatatgtaaatttcagaagctcttttttcctacccaccagtaccttaatcattggtttatcacattggattcaaattcaggttccttttttgataaagaggaaatttgttttccatgcttgtgattttgtgtttgtaaacatttcaggaggaatttaggagtgtaactatagtttatacttctataatgttgtcttacatttacatttttaagtgcctaattgttaaaactgatttatgtttctcttctaaagaggatatgtgtacttggtttctaatctctttggttttgctttttaaaaaatgcaagagcctatactttgtatttacctaataaaccacagtgacatcaacagtcttttcaaaatt

SEQ ID NO: 68407 - DNA, 540 bp, Homo Sapiens
ccaagctcccaggcccttcctctatcatggatgctgggtgactttgggaagtcaccacctcttcccaagcctgtttcccatatcacagatgtggggccatggcctcgatgatggtctccacaggtctttccacctctgtgagtccaagtcaggtcaatcagcaaggacccatctctgccctgggtcagctcctcagaaccaacccccagcatctctaaagcaaaagcctcacctcaagggctgctcagaagagagcaccttcagcatgagttgttgctggaagatctaataagctgtgtttcctgggaagtggtgctttacttagccctgtggacaacttctctatgcatctgtgtgagcagatgatcattgtattaccttttatcggtagtaagcttggaaaaataatttaagaatacaatggagaaatgtaaataagtatctatgtaaatttgtttaaaataaactgaatgtatttaatggtccatttatatgttcttttatgtaacatgtagtttaataaagttcctgtttatgaga

SEQ ID NO: 68408 - DNA, 899 bp, Homo Sapiens
  misc_feature (571)..(602): n is a, c, g, or t
ggcagcatacacagtgatcacataaacgatgacagctatggggcacacaggccatttgcttacatgcctcgtatcatgattgattactgctttgttagaacacagaagagaccctattttatttaaggcagaaccccgaagatacgtatttccaatacagaaaagaatttttaataaaaactataacatacacaaaaattggttttaaagttgactccacttcctctaactccagtggattgttggccatgtctccccaactccacaatatctctatcatgggaaacacctggggtttttgcgctacataggagaaagatctggaaactatttgggttttgttttcaacttttcatttggatgtttggcgttgcacacacacatccaccggtggaagagacgcccggtgaaaacacctgtctgctttctaagccagtgaggttgaggtgagaggtttgccagagtttgtctacctctgggtatccctttgtctgggataaaaaaaatcaaaccagaaggcgggatggaatggatgcaccacaaataatgcattttctgagttttcttgttnnnnnnnnnnnnnnnnnnnnnnnnnnnnnnnnggtaataacatggccaatttgttacataaaatgactttctgtgtataaattattcctaaaaaatcctgtttatataaaaaatcagtagatgaaaaaaatttcaaaatgtttttgtatattctgttgtaagaatttattcctgttattgcgatatactctggattctttacataatggaaaaaagaaactgtctattttgaatggctgaagctaaggcaacgttagtttctcttactctgcttttttctagtaaagtactacatggtttaagttaaataaaataattctgtatgcaaa

SEQ ID NO: 68409 - DNA, 1658 bp, Homo Sapiens
  misc_feature (828)..(858): n is a, c, g, or t
  misc_feature (1577)..(1598): n is a, c, g, or t
gcgcgtgtgaatatagaccgtgggttaagaaagcaggctgtacccgtccggatttcccgggatatcgtcgacccacgcgtcgatgacaaggtaccctgagagagaaagggacagagagagagatgtggatcgaagaggatcgcttcagaatgacctagggatgaaggtggctggagaagaggaccagctgaggaatcttcaagctggagagactcaagtcgccgggacgatagggatagggatgaccgtcgccgtgagagggatgaccggcgtgatctaagagaaagacgagatctaagagacgacagggaccgaagaggacctccactcagatcagaacgtgaagaagtaagttcttggagacgtgctgatgacaggaaagatgaccgggtggaagagcgggaccctcctcgtcgagttcctcccccagctctttcaagagaccgagaaagagaccgagaccgagaaagagaaggtgaaaaagagaaggcctcatggagagctgagaaagatagggaatctctccgtcgtactaaaaatgagactgatgaagatggatggaccacagtacgacgttaagtctcaagataatggatttaaactggtgtcttaaataggtttgatcacattcaaggattattatacttgtgcttcaaccaatctaaattggattctttaatgttgtttcaccataacacaaaaagcatgaacttgtattaatcctatataatagattgatcatgcaccatatccacaggaggttggaaaaaccatgccattttctggaatttaagggtgttgcattatttcatcaatcatttgttgacnnnnnnnnnnnnnnnnnnnnnnnnnnnnnnntgtgaaccttcaggtattgagtaacacctttatcttggtatagaactgatacttttttttgattttgaaatatctgataataatttggaatgaagtaaggttctgttaaaatatatttgaagaccctttaaagcagtgaatctgaaacaattttcacacccttaagtggttgatacgtacctattttaggtattttgaggtatttaccataaactaaatttagaaattttttagattcacttgaagtaaacattacaaacattggatacggtggggttttctttagattttacttgagagaaggtgagtacaaagcaatttgcagttgttgtaatgacaagattactgcgcaagtgtgaatccaaacagtatagcttttaaattttaaagcatttggtaaattatcgctgagtttttttctgttgccaatagcaaactgcttttccattaatggagaattcatgcctttcaagcattttaaatatgacaatatttataaatgtatggtttggaggaatcgtttaaattctctttcctaattttctttcttttgaagatagattctttcaacaagtaatttgtagtaatgactgtgttgacttcaattttggagcgcagtagctatgttaaagatgaactatttggtctcattgaagccaacacagaacttgctgctgtgttttttcttcagtgataaataaaatacttacagaatttgnnnnnnnnnnnnnnnnnnnnnngcctacagccgcggccgcaagcttattccctttagttgagggttaatttgagcatggcac

SEQ ID NO: 68410 - DNA, 630 bp, Homo Sapiens
  misc_feature (87)..(118): n is a, c, g, or t
  misc_feature (457)..(508): n is a, c, g, or t
gaaattattatcagatatttcaaaatcaaaaaaaagtatcagttgtataccaagataaaggtgttactcaatacctgaaggttcacnnnnnnnnnnnnnnnnnnnnnnnnnnnnnnnngtcaacaaatgattgatgaaataatgcaacacccttaaattccagaaaatggcatggtttttccaacctcctgtggatatggtgcatgatcaatctattatataggattaatacaagttcatgctttttgtgttatggtgaaacaacattaaagaatccaatttagattggttgaagcacaagtataataatccttgaatgtgatcaaacctatttaagacaccagtttaaatccattatcttgagacttaacgtcgtactgtggtccatccatcttcatcagtctcatttttagtacgacggagagattccctatctttctcagctctccatgaggcnnnnnnnnnnnnnnnnnnnnnnnnnnnnnnnnnnnnnnnnnnnnnnnnnnnngaaagagctgggggaggaactcgacgaggagggtcccgctcttccaccccgtcatctttcctgtcatcagcacgtctccaagaacttacttcctcacgttctgatctgaatggagccctcct

SEQ ID NO: 68411 - DNA, 832 bp, Homo Sapiens
  misc_feature (355)..(406): n is a, c, g, or t
  misc_feature (745)..(767): n is a, c, g, or t
gaatgacaaggaccctgagagagaaagggacagagagagagatgtggatcgagaggatcgcttcagaagacctagggatgaaggtggctggagaagaggaccagctgaggaatcttcaagctggagagactcaagtcgccgggacgatagggatagggatgaccgtcgccgtgagagggatgaccggcgtgatctaagagaaagacgagatctaagagacgacagggaccgaagaggacctccactcagatcagaacgtgaagaagtaagttcttggagacgtgctgatgacaggaaagatgaccgggtggaagagcgggaccctcctcgtcgagttcctcccccagctctttcnnnnnnnnnnnnnnnnnnnnnnnnnnnnnnnnnnnnnnnnnnnnnnnnnnnngcctcatggagagctgagaaagatagggaatctctccgtcgtactaaaaatgagactgatgaagatggatggaccacagtacgacgttaagtctcaagataatggatttaaactggtgtcttaaataggtttgatcacattcaaggattattatacttgtgcttcaaccaatctaaattggattctttaatgttgtttcaccataacacaaaaagcatgaacttgtattaatcctatataatagattgatcatgcaccatatccacaggaggttggaaaaaccatgccattttctggaatttaagggtgttgcattatttcatcaatcatttgttgacnnnnnnnnnnnnnnnnnnnnnnngaccgcgaatgcggccgcaagctttttccctttagtgagggttaatttcggcatggcactggccg

SEQ ID NO: 68412 - DNA, 519 bp, Homo Sapiens
  misc_feature (104)..(155): n is a, c, g, or t
  misc_feature (498)..(498): n is a, c, g, or t
gggaacgtgaagaagtaagttcttggagacgtgctgatgacaggaaagatgaccgggtggaagagcgggaccctcctcgtcgagttcctcccccagctctttcnnnnnnnnnnnnnnnnnnnnnnnnnnnnnnnnnnnnnnnnnnnnnnnnnnnngcctcatggagagctgagaaagatagggaatctctccgtcgtactaaaaatgagactgatgaagatggatggaccacagtacgacgttaagtctcaagataatggatttaaactggtgtcttaaataggtttgatcacattcaaggattattatacttgtgcttcaaccaatctaaattggattctttaatgttgtttcaccataacacaaaaagcatgaacttgtattaatcctatataatagattgatcatgcaccatatccacaggaggttggaaaaaccatgccattttctggaatttaagggtgttgcattatttcatcaatcatttgttgaccaccnccacccaccaacaaaaaacca

SEQ ID NO: 68413 - DNA, 907 bp, Homo Sapiens
gggcgcccgggaggcgccggagcccagcggctggcgccagatccaggctcctggaagaaccatgtccggcagctactggtcatgccaggcacacactgctgcccaagaggagctgctgtttgaattatctgtgaatgttgggaagaggaatgccagagctgccggctgaaaattacccaaccaagagaaatctgcaggatggactttctggtcctcttcttgttctacctggcttcggtgctgatgggtcttgttcttatctgcgtctgctcgaaaacccatagcttgaaaggcctggccaggggaggagcacagatattttcctgtataattccagaatgtcttcagagagccatgcatggattgcttcattaccttttccatacgagaaaccacaccttcattgtcctgcacctggtcttgcaagggatggtttatactgagtacacctgggaagtatttggctactgtcaggagctggagttgtccttgcattaccttcttctgccctatctgctgctaggtgtaaacctgttttttttcaccctgacttgtggaaccaatcctggcattataacaaaagcaaatgaattattatttcttccatgtttatgaatcttgatgaagtggatgtttccaaagaacgtgaggtgctctacttgtgatttaaggaaaaccagctcgatccaagcactggcagtgtgtgtaactggttgtgtgcaccgttttcgaccatcactgggtgtgggttgaacaactgcattcgggccctggaaacatcaggtaattcctcatctacgtccttgacctttgaccggcctcggtgccaccggcggccttgtgagcaccactttctggtccccttggtggtgaatgtccgacttttccaggagcacttcctccatga

SEQ ID NO: 68414 - DNA, 469 bp, Homo Sapiens
cagtcacctctgtaccactcgttagtagtctggttggtggccgccagatacaggacaaacaacaggtagccacccaggaggaagctcagaaccacgacaaagcccagcatgaagacaatccgtggaaaagtcaggaacaggtactaggggcagagaaaaggtagtgctttaggcagctggactgtgacatccatgagagtgaacactggccaaccctgggcctgccacagccaccagcgctgcttcctcagcccacctacttgtgtccagatgtgacaaactgaacataaacagcactgagaagcagcccagaataatcccagtacatacaagagtttcctgtgggatgaatgaagtgttcacactgaaggaaaagggaaagtttacttaggaaatgtgctattccagttagctatttataaaataaatgcagacttcattcatcaaaataaaatccagatgacaaaaa

SEQ ID NO: 68415 - DNA, 1863 bp, Homo Sapiens
  misc_feature (1771)..(1788): n is a, c, g, or t
actagtacgaggcctgggttcaaattcggcagagggtcacgagcccgctggaagtctcgtatcgcgcccgggaggcgccggagcccagcggctggcggtatttctgcctttgactgcaactcttggtcgtcttatgtgggtgttgaattgatctgtctctgcagccagatccaggctcctggaagaaccatgtccggcagctactggtcatgccaggcacacactgctgcccaagaggagctgctgtttgaattatctgtgaatgttgggaagaggaatgccagagctgccggctgaaaattacccaaccaagagaaatctgcaggatggactttctggtcctcttcttgttctacctggcttcggtgctgatgggtcttgttcttatctgcgtctgctcgaaaacccatagcttgaaaggcctggccagggaggagcacagatattttcctgtataattccagaatgtcttcagagagccgtgcatggattgcttcattaccttttccatacgagaaaccacaccttcattgtcctgcacctggtcttgcaagggatggtttatactgagtacacctgggaagtatttggctactgtcaggagctggagttgtccttgcattaccttcttctgccctatctgctgctaggtgtaaacctgttttttttcaccctgacttgtggaaccaatcctggcattataacaaaagcaaatgaattattatttcttcatgtttatgaatttgatgaagtgatgtttccaaagaacgtgaggtgctctacttgtgatttaaggaaaccagctcgatccaagcactgcagtgtgtgtaactggtgtgtgcaccgtttcgaccatcactgtgtttgggtgaacaactgcatcggggcctggaacatcaggtacttcctcatctacgtcttgaccttgacggcctcggctgccaccgtcgccattgtgagcaccacttttctggtccacttggtggtgatgtcagatttataccaggagacttacatcgatgaccttggacacctccatgttatggacacggtctttcttattcagtacctgttcctgacttttccacggattgtcttcatgctgggctttgtcgtggttctgagcttcctcctgggtggctacctgttgtttgtcctgtatctggcggccaccaaccagactactaacgagtggtacagaggtgactgggcctggtgccagcgttgtccccttgtggcctggcctccgtcagcagagccccaagtccaccggaacattcactcccatgggcttcggagcaaccttcaagagatctttctacctgcctttccatgtcatgagaggaagaaacaagaatgacaagtgtatgactgcctttgagctgtagttcccgtttatttacacatgtggatcctcgttttccaaacctactcatacaccggcgcggcccgctcttacgagcttctcccctcggcaggggcgcccacgcttctcaccgcttccccgcgcttccgtcggttccacacccgtggccccctttttcttgccgctcggcttttctctaacgctgcgccgtctgcccgctcgcttcttacacacacgtccgccgaccgtgcgccacgacccctcgcactacacttctgcgcatccaccacgctcacacgagcacccctcttcacttctcatgctgcctgctgaccccttactcctccggcgccaccacttgccgccacacagcacgactcaccgccctcacacgggccccatctnnnnnnnnnnnnnnnnnngtctaccggttgtccaccctaccccgccaccgcctcgccgacgcacctccgcccccccgcccaccctcctcaccc

SEQ ID NO: 68416 - DNA, 785 bp, Homo Sapiens
  misc_feature (71)..(98): n is a, c, g, or t
  misc_feature (118)..(142): n is a, c, g, or t
tgggctaggtagcgaggcctgggtggtgaattcggcacgaggcgtggacgccgtgccgttactcgtagtcnnnnnnnnnnnnnnnnnnnnnnnnnnnnatagcgcacagcgcgccttnnnnnnnnnnnnnnnnnnnnnnnnntcggaggtacccccgccgtcgcagcccccgcgctggtgcagccaccctcgctccctctgctcttcctcccttcgctcgcaccatggctgatcagctgaccgaagaacagattgctgaattcaaggaagccttctccctatttgataaagatggcgatggcaccatcacaacaaaggaacttggaactgtcatgaggtcactgggtcagaacccaacagaagctgaagtgcaggatatgatcaatgaagtggatgctgatggtaatggcaccattgacttccccgaattttgactatgatggctagaaaaatgaaagatacagatagtgaagaagaaatccgtgaggcattccgagtctttgacaaggatggcaatggttatatcagtgcagcagaactacgtcacgtcatgacaaacttaggagaaaaactaacagatgaagaagtagatgaaatgatcagagaagcagatatgatggagacggacaagtcaactatgaagaattcgtacagatgatgactgcaaatgaagaactactttcaactcctttttccccctctagaaaatcaattgatctttaccttactctggcaaaagaaaagaaaagtccttttcctcggtctaatagcaactgggggtgagc

SEQ ID NO: 68417 - DNA, 1843 bp, Homo Sapiens
  misc_feature (93)..(164): n is a, c, g, or t
  misc_feature (765)..(786): n is a, c, g, or t
  misc_feature (1052)..(1082): n is a, c, g, or t
  misc_feature (1550)..(1565): n is a, c, g, or t
  misc_feature (1588)..(1687): n is a, c, g, or t
  misc_feature (1689)..(1690): n is a, c, g, or t
  misc_feature (1694)..(1695): n is a, c, g, or t
  misc_feature (1706)..(1720): n is a, c, g, or t
aacggccagtaactctaacggttctaaggtagcgaggcctgggtggcgaattcggcacgagggtcgtggacgccgtgccgttactcgtagtcnnnnnnnnnnnnnnnnnnnnnnnnnnnnnnnnnnnnnnnnnnnnnnnnnnnnnnnnnnnnnnnnnnnnnnnntcggaggtacccccgccgtcgcagcccccgcgctggtgcagccaccctcgctccctctgctcttcctcccttcgctcgcaccatggctgatcagctgaccgaagaacagattgctgaattcaaggaagccttctccctatttgataaagatggcgatggcaccatcacaacaaaggaacttggaactgtcatgaggtcactgggtcagaacccaacagaagctgaattgcaggatatgatcaatgaagtggatgctgatggtaatggcaccattgacttccccgaatttttgactatgatggctagaaaaatgaaagatacagatagtgaagaagaaatccgtgaggcattccgagtctttgacaaggatggcaatggttatatcagtgcagcagaactacgtcacgtcatgacaaacttaggagaaaaactaacagatgaagaagtagatgaaatgatcagagaagcagatattgatggagacggacaagtcaactatgaagaattcgtacagatgatgactgcaaaatgaagacctactttcaactcctttttcccccctctagaagaatcaaattgaatcttttacttacctcttgcnnnnnnnnnnnnnnnnnnnnnngttcatttattcattctgtttctatatagcaaaactgaatgtcaaaagtaccttctgtccacacacacaaaatctgcatgtattggttggtggtcctgtcccctaaagatcaagctacacatcagttttacaatataaatacttgtactaccttaatgataaggactccttaaagttccatttgctaatgattaatacactgtttgggctggccagtttttcatgcatgcagcttgacgattgagcacagtcaggcctttgtattnnnnnnnnnnnnnnnnnnnnnnnnnnnnnnncctattcaaatgggttctagttcaatttgtttagtataaattgtcatagctggtttactgaaaacaaacacatttaaaattggtttacctcaggatgacgtgcagaaaaatgggtgaaggataaaccgttgagacgtggccccactggtaggatggtcctcttgtacttcgtgtgctccgacccatggtgacgatgacacaccctggtggcatgcccgtgtatgttggtttagcgttgtctgcattgttctagagtgaaacaggtgtcaggctgtcactgttcacacaaatttttaataagaaacatttaccaagggagcatctttggactctctgtttttaaaaccttctgaaccatgacttggagccggcagagtaggctgtggctgtggacttcagcacaaccatcaacattgctgttcaaagaaattacagtttacgtccattccaagttgtaaatgctagtcnnnnnnnnnnnnnnnnccaataaaaagaccattaacttnnnnnnnnnnnnnnnnnnnnnnnnnnnnnnnnnnnnnnnnnnnnnnnnnnnnnnnnnnnnnnnnnnnnnnnnnnnnnnnnnnnnnnnnnnnnnnnnnnnnannaaanntttttgggggnnnnnnnnnnnnnnntaaaaaatttttctaaaactttcctttgggcggccggggccccaaaagggaaaggaaaagggggcaaacgttgtttccataagaaaacccggggcaataaaaaggggtttgaaattccccacc

SEQ ID NO: 68418 - DNA, 423 bp, Homo Sapiens
gcacgaggaggaaaagggacatagctggcagtttcctgaatgtgtgctaactctagatagtgggtaatgggatccgaaaaaaccaccagtgaacttttaaaccctcttgagaggaatcaaaccagcacaattagccctgaaacggagctgtacacgaaaacaggcctcttctctctccctcagaaaccaatccctttgcctgaaagaacaccattcggagatcagagagagaggaggcaccttaccttttactgctaatggaatgaagctagacctgtgtttccaatcattagctggtttactgagctgtctttcatcatagattccaaattctgttggattctttcaactattgttaaccaataaattgtatgttgtggatagtcgatgaacttgaaataaaagatttctttttccttccag

SEQ ID NO: 68419 - DNA, 657 bp, Homo Sapiens
taagccctaaaaaaatacgctaggtagcgaggcctgggtgtgaaaatcggcacgagggaccggcagccttgctcagttcagcatagcggagcggatccgatcggatcggagcggatcggagcacaccggagcaggctcatcgagaaggcgtctgcgagaccatggagaacggatacacctatgaagattataagaacactgcagaatggcttctgtctcacactaagcaccgacctcaagttgcaataatctgtggttctggattaggaggtctgactgataaattaactcaggcccagatctttgactacggtgaaatccccaactttccccgaagtacagtgccaggtcatgctggccgactggtgtttgggttcctgaatggcagggcctgtgtgatgatgcagggcaggttccacatgtatgaagggtacccactctggaaggtgacattcccagtgagggttttccaccttctgggtgtggacaccctggtagtcaccaatgcagcaggagggctgaaccccaagtttgaggttggagatatcatgctgatccgtgaccatatcaacctacctggtttcagtggtcagaaccctctcagagggcccaatgatgaaaggttcggagatcgtttcccttgccatgtctgatgcc

SEQ ID NO: 68420 - DNA, 2007 bp, Homo Sapiens
  misc_feature (1505)..(1611): n is a, c, g, or t
  misc_feature (1623)..(1686): n is a, c, g, or t
  misc_feature (1702)..(1782): n is a, c, g, or t
tcggctaggtagcgaggctgggttgtgaatcggcacgaggccagacccggcagccttgctcagttcagcatagcggagcggatccgatcggatcggagcggatcggagcacaccggagcaggctcatcgagaaggcgtctgcgagaccatggagaacggatacacctatgaagattataagaacactgcagaatggcttctgtctcacactaagcaccgacctcaagttgcaataatctgtggttctggattaggaggtctgactgataaattaactcaggcccagatctttgactacggtgaaatccccaactttccccgaagtacagtgccaggtcatgctggccgactggtgtttgggttcctgaatggcagggcctgtgtgatgatgcagggcaggttccacatgtatgaagggtacccactctggaaggtgacattcccagtgagggttttccaccttctgggtgtggacaccctggtagtcaccaatgcagcaggagggctgaaccccaagtttgaggttggagatatcatgctgatccgtgaccatatcaacctacctggtttcagtggtcagaaccctctcagagggcccaatgatgaaaggtttggagatcgtttccctgccatgtctgatgcctacgaccggactatgaggcagagggctctcagtacctggaaacaaatgggggagcaacgtgagctacaggaaggcacctatgtgatggtggcaggccccagctttgagactgtggcagaatgtcgtgtgctgcagaagctgggagcagacgctgttggcatgagtacagtaccagaagttatcgttgcacggcactgtggacttcgagtctttggcttctcactcatcactaacaaggtcatcatggattatgaaagcctggagaaggccaaccatgaagaagtcttagcagctggcaaacaagctgcacagaaattggaacagtttgtctccattcttatggccagcattccactccctgacaaagccagttgacctgccttggagtcgtctggcatctcccacacaagacccaagtagctgctaccttctttggccccttgctggagtcatgtgcctctgtccttaggttgtagcagaaaggaaaagattcctgtccttcacctttcccactttcttctaccagacccttctggtgccagatcctcttctcaaagctgggattacaggtgtgagcatagtgagaccttggcgctacaaaataaagctgttctcattcctgttctttcttacacaagagctggagcccgtgccctaccacacatctgtggagatgcccaggatttgactcgggccttagaactttgcatagcagctgctactagctctttgagataatacattccgaggggctcagttctgccttatctaaatcaccagagaccaaacaaggactaatccaatacctcttggattttatttaatgtcataatgttgtcagaataaagagaaagatgaaatnnnnnnnnnnnnnnnnnnnnnnnnnnnnnnnnnnnnnnnnnnnnnnnnnnnnnnnnnnnnnnnnnnnnnnnnnnnnnnnnnnnnnnnnnnnnnnnnnnnnnnnnnnncttgggggcccnnnnnnnnnnnnnnnnnnnnnnnnnnnnnnnnnnnnnnnnnnnnnnnnnnnnnnnnnnnnnnnnagggccaatatttttnnnnnnnnnnnnnnnnnnnnnnnnnnnnnnnnnnnnnnnnnnnnnnnnnnnnnnnnnnnnnnnnnnnnnnnnnnnnnnnnnacccaaagggggtttggggggcttttcgggatttttcaaagggagccccaggggatccaaattaaaattcccccccgcccttgcatctttcggaggatgggtgaaattccttaaaccttttcgcccacgggggaaccctttccaaaggcggtttggaagaacctgaaatccgcacggggaatccaaaccctttggccccccttgggataaaaaatttttcgcccc

SEQ ID NO: 68421 - DNA, 1433 bp, Homo Sapiens
  misc_feature (207)..(227): n is a, c, g, or t
  misc_feature (622)..(639): n is a, c, g, or t
ttgtatttcactttcataccaggcttaatgtcaatgacatttttatttttgaagtactctgacacctccaccctctactttattagaattggaaggcaaatttttgtccaaaaacctacagacaagtactttgagagaatttccaatataatattagacataatgataattttttccatactcagaatgaaaaactggatattacgnnnnnnnnnnnnnnnnnnnnngtacaaatttagctaatagctacaggctgagagaattgtaacatagcatgacaaattttgtgttgacttgaaaggaatcacaccattattccttagaagtaattacatgtgttctaacacatttgagacagggttggactcccatttctcatccgagaaattacttaacccttcctggcgctgtacagtcatcttttattctatttcctctttgctgtttgtagtagagacattttgaatgaaacttggcactgcttgattcaaaactgtggaaaccagatctgtttagtctcctgtttgtatgcgtttgctaatggtagctaaataaccagtttttgttgtaaatgcaccaattctgaaggcactttatgtactacatggaggtcatatctggnnnnnnnnnnnnnnnnnnatcatgaacattaaatgtgatgatgatttcttttccctgcacacatctttccggtgcaatatctatcaattgtgaatctggctgctggtgtataaaaacctggatgtaaagctgagcctacagacctgtcctcaccaactgttttgtgatttctactcaactacaaagatttatttaatgtactcttaatctaactgagttttgttaccaatgacctgttgcatgcttcaataccgtgtactgcctgagttgtgcctcttgtgtgctagattaaaagtgagacagagacttgacttgatcctctgagctcaagctattgagctggtagtggcagaggactgagggtacctgcacagtttgattcttttccacgtgtaagtctccattgcagaattgtcgtgctttgagaaaacacctgaggcagtgtgggagttgaacgaccctgctgtcctttttaacctgtgttgtcctagaccctgtcggggcagtcaggggacactagagatttgatctcatgcgagtcatcaataggacaaaaaagttgtggtttggggaggtctgtttgttacataaaaaggacctttcggtgtaagaaattgccgtttttaccctgccctggctggcatgtgagaagccatggaaggttgtggttgtaaatgagttgtctaaaggggtgcagaggcctgaggtttctaaaagaaggtagatttctacagagctgagtgttggttcctttttcttattggttgaaaattacctggtagtgatcagaaaacttagatgctatgtaacta

SEQ ID NO: 68422 - DNA, 1127 bp, Homo Sapiens
  misc_feature (543)..(553): n is a, c, g, or t
gcaatgtgaaatagaacagttgtacaaaaagcaggctggtccggtcggaatcccgggatatcgtcgaccacgcgtcggggaaagaaatggtgggaaactctccccgtaatgcttagccaactttaaagtgtacccttcaatatccccattggcaactgcagctgagatcttagagaggaaatataaccggtgtgagatctagcaatgcattttgaatcttcactccctaccaggctcttcctatttttaatctcttcacctcagaactagacatatggagagctttaaaggcaagctggaaggcacattgtatcaattctaccttgtgctatacgtaggagagatccaaaatttggatgcttctggagactcttagacatcttttcattgttgtccattttaaaagttgatgattgctggaaacattcacacgcttaaaagcaatggtgtgagttattaatgggtaaactaagaagtgttataggcaatgacttgaaatggtttttaaattgtatggattgttaagaattgttgaaaaaaaannnnnnnnnnngggacagcttcaaggagatgttagcaatttcagatatactagccagtttaggtatgactttggaagtgcagaaacagaaggatactgttagaaaatcctaacattggtctccgtgcatgtgttcacacctggtctcactgcctttccttcccacagacctgagtgtgaaagactgagagttgaggagttactttgtggatcttgtccaaatttagtgaaatgtggaagtcaaccagaccaatgatggaattaaatgtaaattccaagagggctttcacagtccacagggttcaaatgacttgggtaacagaagttattcttagcttacctgttatgtgacagtgatttacctgtccatttccaacccaaaagcctgtcagaaagcattctttagagaaaaccactttacatttgttgttaaactcctgatcgctactcttaagaatatacatgtatgtattcataggaacattttttctcaatatttgtatgattcgcttactgttattgtgctgagtgagctcctgtgtgcttcagacaaaaataaatgagactttgtgtttaccgttaaacc

SEQ ID NO: 68423 - DNA, 1096 bp, Homo Sapiens
tggtacggctcggatttccgggatatcgtcgaccacgcgttcggtgtataaccaaatgagcaggcttaggaatttagatgagatgtgtaagattcactctacaggcagtagctgcttctagcatttgcaagatcctacactgttaccttcttgtaagggtgtacattttgatgttgaacatcagtttatcatgtagacttaggactcatgtgcagtaaatataaataagtgtagcatcagaagcagtaggaatggccgtatacaaccatcctgttaaacatttaaatttagctctgatagctgtgttaagacctgacatatctttcctagtaaaaataggatgtgtggaaatatttatatgtactttgatctctccacatcacttataactttatgtgttttatttctccaagtgcggtgttcctgagatgtcactgtatgcttatttttctgtaccacaggcattatctatacctggggccagatttgctgcactttgaaatgtggcctatgccgtaactgtaggttgacttgtctgaattgtggagaggcacttttccaagccaaatcttattagtcacttattgttttaatatcttgctactctgacaggaaagaaacaatacacttaacagcctcctgcaacccatcctccaccatttccttaatgtcccatggtatttctgcaacggaatacactttgaaaggtaaaaacaatgcaaaagtatcgattatcataaattcacaaaatatttttgcaaccagaacacaaaagcaggctagtcagctaagggaaatttcattttcaaacgagagggaaacatggggaagtaaaagattaggatggggaaaggttgtcctaaacagaccaaggagactggtccctaatttattctcttgggctggttctctccttgaattatcagaccccaagaggagatattgggaacaggctccccttcatgccaaggggcctttcctaagttaataactgcgaagcattggaggcccccattaaaacctcctttttttcctttcgaaaaagaatttttcaggggtaaaaggggaaaagaaatgggcggggaaacttttcctc

SEQ ID NO: 68424 - DNA, 2347 bp, Homo Sapiens
  misc_feature (34)..(34): n is a, c, g, or t
  misc_feature (44)..(44): n is a, c, g, or t
  misc_feature (49)..(49): n is a, c, g, or t
  misc_feature (85)..(85): n is a, c, g, or t
  misc_feature (91)..(91): n is a, c, g, or t
  misc_feature (241)..(241): n is a, c, g, or t
  misc_feature (249)..(250): n is a, c, g, or t
  misc_feature (262)..(263): n is a, c, g, or t
  misc_feature (267)..(268): n is a, c, g, or t
  misc_feature (270)..(270): n is a, c, g, or t
  misc_feature (295)..(295): n is a, c, g, or t
  misc_feature (306)..(307): n is a, c, g, or t
ttcagttccaagcctcagtgagggttacacctcntagtcgtcancagtntgtgagatgcatcaaagtgcttataaaggagattcntagcanggatatggagtcattcattgtataagtatctgtgataatccgtgtcaagggtagccatctggtatctggtatagcaaactgtaaatctgccacctcatacatggaacagagcttgtgggatgctatagtttagtgaagtatacatgattnaattctanntaatcttatgtnntctnntnaaggatggtggtgtattgctctttntcagcttattnnttaagagtacagtcaggaaaccaacaaggggcctaagagtggctgcccctgcttgggacattacagcaagtgaaacaaagttaatgtgacaagctttgctttgttatcattggtcttcactagaggataccttttacatgtacttctctcttggatcaaatatgtctttaactgtacatctcagtggctggaggccatgccttttaagcatgtgtaaaatttttaaagaaatgaacatacacatagttattttagtaatatttcctgaaagaaaaaccaaattctgctataagtcttgatcttcaatgaacttttaaataatgcatttagctggaaaacaagactttcccagcttgtattacctagaagcgtgaatgtataggatacctgactactaagactatattctcagccctgccctgtcttttatttgcgggtctaatctaatattagaatatattaaccgcttaaggcattgaagccatatgggatggggaatgcatttcttcagtgtttctccgagagactttccatttccttggagttatggcggcaagtaagtatcatagtattaagaaatttgcctaaatctgagttgtgcctttctttactcacaaggcatgggctttgtcctggtgatcagtttgtaagccttcttccttcccagctccttaataaaagcaaagtgattgagtaggtaatgttcaaagtgtctgcctgtgtacatgtacttgtattgattatgtagttcagtaagatgtgcccaagtcatttcagaaagaaagacccttcagttttgatgcattttgctgaacacttgggtagtgagtgggatcctatccagttgaggaatgcttgcaatgctcattgaagggatttgctttgggactttgtcatcttccagaaaggaaacatattgtatatttggcccagtgtgattgattgctttatctttggtaacttttacttgaatgggatttgctgaattaatgactattgaatttaaaactaattatgagttgacaaataaataaaaggtagtgtttatgtctgagcttattgtgtttgagctaacaccaggttactcagtaaccatgacctgctcctccatttccatttattctcaacattaaatagttttatcttgttgttgccagaaatgcacttgtgccaggtattgtccctgctgtatgaaaagcttcttggcaatgaattctgtaatagtgccctacattatggttttctggtggaattgttttaacagtgacaacccaggatttccaatatatttttgttttattgttattaccaaaaattccactatgattgatgttcagtgattttctatagcaacttttttggtaactctttgggtttctgatttgttttagctaaaattttggggatatgatttgggtctttgattaatgtcagctgaacttggatttctagttcatgaagaaatctctcccaatacccatttatcctatttttagcaataattcgttaatgattccacttgattttcagaatattgtcctggttgattttgatttgacagcatacattatgaaatttgaaagtaggttaccattttgaggcagttggatataaattatgtaaatatgtatgattatgatttttataaatggcataacatgagtgtactaactaccttctatgctggccatgctacagattttctggaggtatgacaatagtatttttttatgctcagattaaaaatcagcttttcacctctccagtttttccaagtgatactcccagttctagagcaatctacagctgtttatgtgaggtgcccaacacccattcatctcaagtgcttcagtctttggtttatttcatgcactgtgccttcaaaatgaaatttttaaaagggactttaaatgaagttgaatagtagtttttaaaagtcaatttgtaatttatgtgaaatctaactgtaatgaggtcctttctgttttttatatgtaaacagatctactaatcctgtataaaagttattttacgatgaaa

SEQ ID NO: 68425 - DNA, 545 bp, Homo Sapiens
ccgagcaggttctcctcctgaggtcctcaacgcctgccgacagcctgtcgcggcccggccgcctgcggcactgccttccgtgacgtcgccgttgcactatggacagttgctcttaagagaatatatatttaaatgggtgaactgaattacgcataagaagcatgcactgcctgagtgtatattttggattcttatgagccagtcttttcttgaattagaaacacaaacactgcctttattgtcctttttgatacgaagatgtgctttttctagatggaaaagatgtgtgttattttttggatttgtaaaaatatttttcatgatatctgtaaagcttgagtattttgtgatgttcgttttttataatttaaattttggtaaatatgtacaaaggcacttcgggtctatgtgactatatttttttgtatataaatgtatttatggaatattgtgcaaatgttatttgagttttttactgttttgttaatgaagaaattcctttttaaaatatttttccaaaataaattttatgaatgacaaccaaa

SEQ ID NO: 68426 - DNA, 785 bp, Homo Sapiens
  misc_feature (28)..(28): n is a, c, g, or t
  misc_feature (40)..(40): n is a, c, g, or t
ggcacgaggagatgccattaaggacatntgtgattcatgngagaaggtcaaaatatcaacattaacaggagttcagaagacattgacctcaaccctgatggatgatcttgaggggttcaagacttcagtggacgaagtaactgcagatgtggtggaaatagcaagataactagacttagaagtggaacctgcatatgtgactgaattgctgcaatctcatgataaaacgtgaacaaatgaggagttgcttctaatataagagccacaaaagtggtttcttgagatggaaactactcctggtgaagatcctgtgaccattgttgaaatgacaacaaaggacttagaatattacataaacttagttgataaaacagcagcagagtttgagaggattgacttcaattttgaagaatgttccactgtgggtaaaaggctatccaacagcaacacatgctacagataaatctttcggaaaggaagagtcagttgatgttgcagccttccttgttgtctcatttaaagaaatctctagagccacactaaccttcagcaaccaccacaccgatcattcagcagccatcaacagtgaggcaagactgtcttccagcaacaaagactcactgaagacttagattatcgttagcatcttttagcaataaaatatttttaaattaaagtatgtacattgtcagatataatgctattgcaaacttaatagactataatatagattaaacataacttttataggtactggaaaataaaaataattgtgtgactccctt

SEQ ID NO: 68427 - DNA, 465 bp, Homo Sapiens
aaactttaacagatgaggagttgtttcttatggatgcgcaaagaaagtggtttcttgagatggaatctacacctggtgaagatgctgtgaacattgttgaaatgacaacaaaggatttagaatattacataaacttagttgataaagcagcagcagggtttgagaggattgactccaattttgaaagaagctctactgtgggcaaaatgctatcaaacagcatcgcatgctacagagaaatctttcatgaaaggaagagtcaactcatgcgaaaagcttcaccgatgtcttattttaggaaattgccacagccaccccaaccttcagcagccaccaccctgaccagtcagcaaccatcaacctcgaggcaagaccctccaccagcaaaaagagtacgactcaccgaaggctcagattgataatcagcattttttagcaataaagtatttttaaatttaaaaaaaa

SEQ ID NO: 68428 - DNA, 587 bp, Homo Sapiens
atgaaattgctgtaaactcatgatgaaacttgaacaaatagggagttgcttcttatggatgagcaaagaaaatattttcttgagatggaatataatccaggtggagatgctatcaacattgttgaaatgacaacaaaggatttagaatattccataaacctagttgataaagcagcagcagggtttgagagggtttactccaattttgaaagaagttctactgttgataaaatgctgtcaaacagcatcacatgctacagggaaatcttttgtgaaaggaacaaacttcattgttttaaaaaattgacacaggcttccaaccttcagcagcccccacactgattagccagcagtcatcaatatagaggcaagactctcaccagcaaaaagattatgacttggtaaggctcagatattcattagcattttttagcactgacgtattttaacttaaggtatgtacacagttttttagacatgctattaattactaattaataattattaaatactcattagactacaatatagtttaagcataacttttataagcactgggaaataaaatgtttatgcaactaaaaaaa

SEQ ID NO: 68429 - DNA, 1616 bp, Homo Sapiens
  misc_feature (321)..(321): n is a, c, g, or t
  misc_feature (464)..(492): n is a, c, g, or t
cagtcgacggtaccggacatatgcccggtaattcaggccatttaaggccgtgggggtgatctgtgacgtacgtgcagcaggttaaaattgtggcaatgtgtgtcatgtaacaagttcacgtggagacaccacgtgtagaagtgtgctaggagcaatgaggtacttgacctccattcaagttcgctactagaagtaaaggctcccagatcctgaagagggatcaagaaggagctcctggatagctacgagtatgatgaaatcatcatccatacagtcagtctggtaagacctacgtgtcatcagaatatgtgacacgcagancggagatccttggtcagatgatgaatccaagtcagaaagtgatttggaagaaacagaacctgtggttattccaagagattctttgcttaggagagcagcagccgaaagacctaaatacacatttgatttctcagaagaagagnnnnnnnnnnnnnnnnnnnnnnnnnnnnncaataatgatttagaggaattgaaagttaaagcatctcccataacaaatgatggggaagatgaatttgttccttcagatgggttagataaagatgaatatacattttcaccaggcaaatcaaaagccactccagaaaaatctttgcatgacaaaaaaagtcaggattttggaaatctcttctcatttccttcatattctcagaagtcagaagatgattcagctaaatttgacagtaatgaagaagattctgcttctgttttttcaccatcatttggtctgaaacagacagataaagttccaagtaaaacggtagctgctaaaaagggaaaaccgtcttcagatacagtccctaagcccaagagagccccaaaacagaagaaagtagtagaggctgtaaactctgactcggattcagaatttggcattccaaagaagactacaacaccaaaaggtaaaggccgaggggcaaagaaaaggaaagcatctggctctgaaaatgaaggcgattataaccctggcaggaaaacatccaaaacaacaagcaagaaaccgaagaagacatcttttgatcaggattcagatgtggacatcttcccctcagacttccctactgagccaccttctctgccacgaaccggtcgggctaggaaagaagtaaaatattttgcagagtctgatgaagaagaagatgatgttgattttgcaatgtttaattaagtgcccaaagagcacaaacatttttcaacaaatatcttgtgttgtccttttgtcttctctgtctcagacttttgtacatctggcttattttaatgtgatgatgtaattgacggttttttattattgtggtaggccttttaacattttgttcttacacatacagttttatgctcttttttactcattgaaatgtcacgtactgtctgattggcttgtagaattgttatagactgccgtgcattagcacagattttaattgtcatggttacaaactacagacctgctttttgaaatgaaatttaaacattaaaaatggaactgtgttctctgtctctttactgaagataaaggtgtagtaaaagctcccacacacctttaaaataaatatattttattctttgcaaaa

SEQ ID NO: 68430 - DNA, 1180 bp, Homo Sapiens
  misc_feature (1086)..(1096): n is a, c, g, or t
gctacccccaagtgttatgatgtctgtgtggaaagcggctgtgcagacattcaattgttattattatgtcctacaagcattaattaattaacacactttagtaggtatgttcgcctgtaatattgaacgtaggtgcgataaataacaggatgaggcaggaatcaaagacagatactgcgacatagggtgctccggctccagcgtctcgcaatgctatcgcgtgcacaccccccagacgaaaataccaaatgcatggagagctcccgtgagtggttaatagggtgatagacctgtgatccatcgtgatgtcttatttaaggggaacgtgtgggctatttaggctttatggccctgaagtaggaaccagatgtcggatacagttcactttagctacccccaagtgttatgggcccggagcgaggagagtagcactcttgtgcgggatattgatttcacggaggatggtggtcaagggacccctatctgaggggggtcatccatggggacgagaagggatttgactgtaatgtgctatgtacggtaaatggctttatgtactatgtactgttaagggtgggtaggtttgttgatatcctagtgggtgaggggtggctttggagttgcagttgatgtgtgatagttgaaggttgattgctgtacttgcttgtaagcatggggagggggtttttgatgtggattgggtttttatgtactacaggtggtcaagtatttatggtaccgtacaatattcatggtggctggcagtaatgtacgaaatacatagcggttgttgatgggtaagtcaatacttgggtggtacccaaatctgcttccccatgaaagaacagagaatagtttaaattagaatcttagctttgggtgctaatggtggagttaaagactttttctctgatttgtccttggaaaaaggttttcatctccggtttacaagactggtgtattagtttatactacaaggacagggccatcttgagcctgtgagacacaggctcaagatggagacacaggctcagatggggatggaaaaggtagataaaagggcctagctccctttttatctgccgnnnnnnnnnnnaagtcccagaggagctgagtttcttttctcttcttttctgttgatgggaagctctgggagggttgagagctggttcttgccccc

SEQ ID NO: 68431 - DNA, 435 bp, Homo Sapiens
  misc_feature (71)..(95): n is a, c, g, or t
gcacgaggcatgaccttggatttggcaatggtttcttagatatggcaccaaaagcacaagcaacacccgcnnnnnnnnnnnnnnnnnnnnnnnnnctcaaaattaaaagcttctacatatcaagggacactatgaagaaagtgaaaagacaacccacagaatgggagaaaatatttgtaaatcttacatatctggtaaggaactaatacctagaatatataaggaactccgatgctcgacaacaaaaagacaaaccaattttaaaatgggcaaaggacttaaatagacatttctctaatgaagatatacaaatggccgacaagcacatggaaagcactcaacctcatcagtcattatgcaaatcagcgccacaagaagataccacttcacacctattagaatgacgaaatagacctaggatctaaacctacagga

SEQ ID NO: 68432 - DNA, 1085 bp, Homo Sapiens
  misc_feature (31)..(31): n is a, c, g, or t
  misc_feature (104)..(104): n is a, c, g, or t
  misc_feature (120)..(120): n is a, c, g, or t
  misc_feature (127)..(128): n is a, c, g, or t
  misc_feature (135)..(135): n is a, c, g, or t
  misc_feature (144)..(547): n is a, c, g, or t
  misc_feature (600)..(620): n is a, c, g, or t
  misc_feature (649)..(663): n is a, c, g, or t
  misc_feature (808)..(941): n is a, c, g, or t
cgccccgaggactccacagaaaccttgattntattgtctgtcggttcccacctttgatttagctcgattttggatgctctcagggggccgacctttgaaaaacnccagcacgccgccttntacgtcnntgccctntgctgcccnnnnnnnnnnnnnnnnnnnnnnnnnnnnnnnnnnnnnnnnnnnnnnnnnnnnnnnnnnnnnnnnnnnnnnnnnnnnnnnnnnnnnnnnnnnnnnnnnnnnnnnnnnnnnnnnnnnnnnnnnnnnnnnnnnnnnnnnnnnnnnnnnnnnnnnnnnnnnnnnnnnnnnnnnnnnnnnnnnnnnnnnnnnnnnnnnnnnnnnnnnnnnnnnnnnnnnnnnnnnnnnnnnnnnnnnnnnnnnnnnnnnnnnnnnnnnnnnnnnnnnnnnnnnnnnnnnnnnnnnnnnnnnnnnnnnnnnnnnnnnnnnnnnnnnnnnnnnnnnnnnnnnnnnnnnnnnnnnnnnnnnnnnnnnnnnnnnnnnnnnnnnnnnnnnnnnnnnnnnnnnnnnnnnnnnnnnnnnnnnnnnnaagaattcggcacgaggaccattctgatgttggagcgcccgcggctgtaggcnnnnnnnnnnnnnnnnnnnnnagcctttttagatttttctgctcaggctnnnnnnnnnnnnnnncagtttctaaaaattttttttcctggattgtgtaaatccttaatatatggaatttttgtgatgcagagaaatactttatgatagttgacaacatttcagtattaaataaacatctaaaatagtctgtttaaaatgtttgattcannnnnnnnnnnnnnnnnnnnnnnnnnnnnnnnnnnnnnnnnnnnnnnnnnnnnnnnnnnnnnnnnnnnnnnnnnnnnnnnnnnnnnnnnnnnnnnnnnnnnnnnnnnnnnnnnnnnnnnnnnnnnnnnnnnnnncaacacatataccatctgaaaatgttagaattctgagttgtgattttattgacttgttgcttgctttttcttaggctttgtaacttgtaatatgttaaagtgtactatcctaataaactgaatactttggtatcttagagaaaa

SEQ ID NO: 68433 - DNA, 2253 bp, Homo Sapiens
  misc_feature (2082)..(2082): n is a, c, g, or t
  misc_feature (2207)..(2207): n is a, c, g, or t
caggctggtaccggtccggtattcccgggatatcgtcgaccacgcgtccgggggaccgcagaggtgagagtcgcgcccgggagtccgccgcctgcgccaggatggagttcgtgaaatgccttggccaccccgaagagttctacaacctggtgcgcttccggatcgggggcaagcggaaggtgatgcccaagatggaccaggactcgctcagcagcagcctgaaaacttgctacaagtatctcaatcagaccagtcgcagtttcgcagctgttatccaggcgctggatggggaaatgcgcaacgcagtgtgcatattttatctggttctccgagctctggacacactggaagatgacatgaccatcagtgtggaaaagaaggtcccgctgttacacaactttcactctttcctttaccaaccagactggcggttcatggagagcaaggagaaggatcgccaggtgctggaggacttcccaacgatctcccttgagtttagaaatctggctgagaaataccaaacagtgattgccgacatttgccggagaatgggcattgggatggcagagtttttggataagcatgtgacctctgaacaggagtgggacaagtactgccactatgttgctgggctggtcggaattggcctttcccgtcttttctcagcctcagagtttgaagaccccttagttggtgaagatacagaacgtgccaactctatgggcctgtttctgcagaaaacaaacatcatccgtgactatctggaagaccagcaaggaggaagagagttctggcctcaagaggtttggagcaggtatgttaagaagttaggggattttgctaagccggagaatattgacttggccgtgcagtgcctgaatgaacttataaccaatgcactgcaccacatcccagatgtcatcacctacctttcgagactcagaaaccagagtgtgtttaacttctgtgctattccacaggtgatggccattgccactttggctgcctgttataataaccagcaggtgttcaaaggggcagtgaagattcggaaagggcaagcagtgaccctgatgatggatgccaccaatatgccagctgtcaaagccatcatatatcagtatatggaagagatttatcatagaatccccgactcagacccatcttctagcaaaacaaggcagatcatctccaccatccggacgcagaatcttcccaactgtcagctgatttcccgaagccactactcccccatctacctgtcgtttgtcatgcttttggctgccctgagctggcagtacctgaccactctctcccaggtaacagaagactatgttcagactggagaacactgatcccaaatttgtccatagctgaagtccaccataaagtggatttactttttttctttaaggatggatgttgtgttctctttatttttttcctactactttaatccctaaaagaacgctgtgtggctgggacctttaggaaagtgaaatgcaggtgagaagaacctaaacatgaaaggaaagggtgcctcatcccagcaacctgtccttgtgggtgatgatcactgtgctgcttgtggctcatggcagagcattcagtgccacggtttaggtgaagtcgctgcatatgtgactgtcatgagatcctacttagtatgatcctggctagaatgataattaaaagtatttaatttgaagcaccatttgaatgttcgtaatagtagaaaatgatgtgaattttctttctgttcggctcctatttttctcatcattttgttttctttaattgggttgaatggagtagatagaaatatttatggtttaggtaacagttagatgtttcctaagaatgcaaactgccttttccacacaaaggctgggaataaaattctgggtattctcgtattctcatttaaaggagtttagctttcagagagaaacagcaggattgcttttgaccttttagaagattggtctccagtaaaggtggacatttttgagatttttataataaagaatttaattgctctgcatttgtcaagtacagttcgcttgaaagcctgcctgactntgggaaaagatgggagctcaagaatgggagttgatggcccagcgtgggtggcctcatgccccgttaatccccagcacttttggggaggcctgaggcgggtcggatcacgacattagggggatccnagacccatcctggggctaacacgggtgaaacccccgtcttctactt

SEQ ID NO: 68434 - DNA, 914 bp, Homo Sapiens
  misc_feature (74)..(108): n is a, c, g, or t
gatgatagactcatataggggctgggcgtttagcgaacgacgagcgcagcgagtagtgagcgaggaagcggcgnnnnnnnnnnnnnnnnnnnnnnnnnnnnnnnnnnncagtcgacggtaccggacatatgcccgggaattcggccattacggccgggggagaggtgagagtcgcgcccgggagcccgccgcctgcgccaggatggagttcgtgaaatgccttggccaccccgaagagttctacaacctggtgcgcttccggatcgggggcaagcggaaggtgatgcccaagatggaccaggactcgctcagcagcagcctgaaaacttgctacaagtatctcaatcagaccagtcgcagtttcgcagctgttatccaggcgctggatggggaaatgcgcaacgcagtgtgcatattttatctggttctccgagctctggacacactggaagatgacatgaccatcagtgtggaaaagaaggtcccgctgttacacaactttcactctttcctttaccaaccagactggcggttcatggagagcaaggagaaggatcgccaggtgctggaggacttcccaacgatctcccttgagtttagaaatctggctgagaaataccaaacagtgattgccgacatttgccggagaatgggcattgggatggcagagtttttggataagcatgtgacctctgaacaggagtgggacaagtactgccactatgttgctgggctggtcggaattggcctttcccgtcttttctcagcctcagagtttgaagaccccttagttggtgaagatacagaacgtgccaactctatgggcctgtttcctgcagaaaacttgctacaagtatctcaatcagaccagtcgcagtttcgcaactgtttatccaggcgctggatgggggaat

SEQ ID NO: 68435 - DNA, 1024 bp, Homo Sapiens
taacttacggctaggtagcgaggcctgggttgcgaattcggcacgagggccggccggtgagcgcctggggaccgcagaggtgagagtcgcgcccgggagtccgccgcctgcgccaggatggagttcgtgaaatgccttggccaccccgaagagttctacaacctggtgcgcttccggatcgggggcaagcggaaggtgatgcccaagatggaccaggactcgctcagcagcagcctgaaaacttgctacaagtatctcaatcagaccagtcgcagtttcgcagctgttatccaggcgctggatggggaaatgcgcaatgcagtgtgcatattttatctggttctccgagctctggacacactggaagatgacatgaccatcagtgtggaaaagaaggtcccgctgttacacaactttcactctttcctttaccaaccagactggcggttcatggagagcaaggagaaggatcgccaggtgctggaggacttcccaacgatctcccttgagtttagaaatctggctgagaaataccaaacagtgattgccgacatttgccggagaatgggcattgggatggcagagttttggataagcatgtgacctctgaacaggagtgggacaagtactgccactatgttgctgggctggtcggaattggctttcccgtcttttctcagcctcagagtttgaagaccccttagtggtgaagatacagaacgtgccaactctatgggcctgtttctgcagaaaacaaacatcatccgtgactatctggaagaccagcagaggaagagagtctggcctcagaggttggggcacgtatgtcagaagttaggggatttcgctaagccggagatattgactggccggcgtgcctgatgaacttataccagggacttgaccatcccgaggtttccctccttggatcaaccagggtgtactccgggattcccggggcatccctggcgcgtcacacccggtcagggcgcacatcaagggccccggggcacagccggcttcg

SEQ ID NO: 68436 - DNA, 901 bp, Homo Sapiens
tccctataccggtctaaggtagcgaggcctgggtggcgaattcggcacgagggtccagccggccggtgagcgcctggggaccgcagaggtgagagtcgcgcccgggagtccgccgcctgcgccaggatggagttcgtgaaatgccttggccaccccgaagagttctacaacctggtgcgcttccggatcgggggcaagcggaaggtgatgcccaagatggaccaggactcgctcagcagcagcctgaaaacttgctacaagtatctcaatcagaccagtcgcagtttcgcagctgttatccaggcgctggatggggaaatgcgcaacgcagtgtgcatattttatctggttctccgagctctggacacactggaagatgacatgaccatcagtgtggaaaagaaggtcccgctgttacacaactttcactctttcctttaccaaccagactggcggttcatggagagcaaggagaaggatcgccaggtgctggaggacttcccaacgatctcccttgagtttagaaatctggctgagaaataccaaaacagggattgccgacatttgccggagaatgggcattggggatggcagaagtttttggataagcatgtgacctctgaacaggagtgggacaagtactgccactatgttgctgggctggtcggaaattggcctttcccgtctttttctcagcctcagagtttgaagacccccttagttggtggaagacaccgaacggggccacctctatggggcctgttttctggcagaaaccaaacttcatcccgcggactatcctgggaaagacccccccaggggaggaaaaagaagttcttgggccttcaaaaagtgtttgggagaccaggttattgttttaaaaaagtttagggggggatta

SEQ ID NO: 68437 - DNA, 1080 bp, Homo Sapiens
aggtctttatatttgtaagttacttacactctagatatcaaacgaaatgtaactcacatgaagtgcttcaatgttgaatagtgaggaacgcacagcggaaacatattcttgcagcccatcagatcatccacagttacacggaaagcatggttcaaaagaaattaactgagggagagcaagatgaggcctcaaatgctgccatgttacttgagaaagaaactcaaaatgagaacaacagctaagattgtgatttttttgtaaaagaagctgtacgaatcatcataaataattccaatagtctgcacttctcccaaggtgtgcactgctcataaacttgccagtgtgtgattcatgagaaaggagatttattttccttaaacatccaataatttaaaatgattttcaataataataatcaaatgaaaaagcttcattctcttcagtgtcttctagatgccctacttaaagagaacattttcttatgtctcatttcaatattttgttaactatgaggatgtgctggtttgttgaatcaaacaaaaggaaatgttgtggaatatttttccaagtagttttggttcactattcacaggacattggcattatctactaaggctgaaaatgtgcatattccatgactcaggattttatctcctagatatatattcaacagaaatgcatgagtatgtgcaccaacaggcatgacaaaaatatttatagtagtggtgttcacaatagtcccaaactggaaacccaagtgtccatctccatcggaacagaaaactatactttggtctgcttctacagtggcacatcaacccacctttgagctttagatctaagaagtgtgttcatgcaacagccatagagatggtgctattgaaaggcaatctgcccatcctgtgtattgacaagcatcaggattccaggaggattcttcctgattcaaagactgtcaaataggaaaaaagaaaacagtaaatgaacaaaaacatcaacatggagtccaagtaatgaatttatagaggaaaatgtatgctactctgaaaacaaagcttatgttagagaatatcttactgt

SEQ ID NO: 68438 - DNA, 662 bp, Homo Sapiens
  misc_feature (489)..(503): n is a, c, g, or t
attcggcacgaggcggcacgaggagttttcacacagcctgcacatcgttctgacatgccctttttttccctggagatttatcctcatgacatacaaggggacaaaaatatttattgggactgtctttgaatttagtagaatcactgtatcattaacagtttggggaagtactgctttgcagtcctttatttgaaaacttaggtctagctgtgttttgcatcaaaatttttgagctattcaaaaactaataggatctgtgtaaaatatttcactcaaaactactaaaaaaaagtctgggatggcagctcattatcaaatatactcctatttttgtggtgatttatgaacatccccactaagtataactaaagatcataaagagcctcagatcaagtttggtcaggttttgtcaccaagctttgtaaataaactggttttcatagctttttggagatgagaattgaggataagaaattgtgtctctgtccnnnnnnnnnnnnnnngttaagtcttacatgtattttactgtaacatcttttgaattggatatttaactaattcaacatatttttcctctttgcagaatgggcagttcatgttaaaatcacttttcatggaaagagctctatgtaacagcataataaaactgcctacctagcagc

SEQ ID NO: 68439 - DNA, 510 bp, Homo Sapiens
ggggaaatcccagtcgatttttccaagcagtactccgcttcctggatgtgtttgtctctcttggctgcactggcctgctctgctggagacacatgggcttcagaagttggcccagttctgagtaaaagttctccaagactgataacaacctgggagaaagttccagttggtaccaatggaggagttacagtggtgggccttgtctccagtctccttggtggtacctttgtgggcattgcatacttcctcacacagctgatttttgtgaatgatttagacatttctgccccgcagtggccaattattgcatttggtggtttagctggattactaggatcaattgtggactcatacttaggggctacaatgcagtatactgggttggatgaaagcactggcatggtggtcaacagcccaacaaataagaatgggcagttcatgttaaaatcacttttcatggaaagagctctatgtaacagcataataaaactgcctacctagcagcaaaaa

SEQ ID NO: 68440 - DNA, 1097 bp, Homo Sapiens
  misc_feature (23)..(23): n is a, c, g, or t
  misc_feature (121)..(121): n is a, c, g, or t
  misc_feature (156)..(156): n is a, c, g, or t
  misc_feature (995)..(1021): n is a, c, g, or t
cccgacagttgctgatcgattanagatccatagaactggcctggacaaaatcgccggggatgtgctagggtcaaaaaccaagatagcctatctcggccccaggtgaaaaaatgacggcatncaatcaccatgcttcataacccaatatcacgagcntacccaaacccgtgtgatgactcgaaggatctttctgtggggaaacctgatctcgacaaaattagagaatttgtcagcggtatttcggctggaacagaacgaagacagatgatctctgtttcctgtattaaagcaactcgatgcccagcagacacagctccgaattgattccttctttagattagcacaacaggagaaagaagatgctaaacgtattaagagccagagactaaacagagctgtgacatgtatgctaaggaaagagaaagaagcagcagccagcgaaatagaagcagtttctgttgccatggagaaagaatttgagctacttgataaggcaaaacgaaaaacccagaagagaggcataacaaataccttagaagagtcatcaagcctgaaaagaaagaggctttcagattctaaacgaaagaatacatgcggtggatttttgggggagacctgcctctcagaatcatctgatggatcttcaagtgaagatgctgaaagttcatctttaatgaatgtacaaaggagaacagctgcgaaagagccaaaaaccagtgcttcagattcgcagaactcagtgaaggaagctcccgtgaagaatggaggtgcgaccaccagcagctctagtgatagtgatgacgatggagggaaagagaagatggtcctcgtgaccgccagatctgtgtttgggaagaaaagaaggaaactaagacgtgcgaggggaagaaaaaggaaaacctaattaaaaaatatgtatcctctataattagttatgacagccatttgtaatgaatttgtcgcaaagacgtaataaaattaactggtagcacggnnnnnnnnnnnnnnnnnnnnnnnnnnngcctacagccgcggccgcaagcttttccctttagtgagggttaatttcgagcatggcactggccgtcgttacaacc

SEQ ID NO: 68441 - DNA, 973 bp, Homo Sapiens
  misc_feature (131)..(131): n is a, c, g, or t
  misc_feature (138)..(138): n is a, c, g, or t
  misc_feature (181)..(181): n is a, c, g, or t
  misc_feature (185)..(185): n is a, c, g, or t
  misc_feature (259)..(259): n is a, c, g, or t
  misc_feature (266)..(266): n is a, c, g, or t
  misc_feature (280)..(280): n is a, c, g, or t
tctgtctacatgagacagtcactcattgaatccactccttaggataggattcacttgttgattacgacagtcatagtggcgtgtcgtcagctattatctgttgtgtagacacccctcacctttcctttgtntgagccntgcctagtacctgaggttaggagtctgacacacacgtgagagntatntagttggaaactgagtaaagtccagagcaggatgacctgctgtgcgtggttgggaaagctcacaggaagaaccntgcagantcaggggtggaggngagccccttgagtgctctccagggaagaggggctggggtttaaatagcatgcttggaggaagattttccttcaatttttcctaagtccttgaattcaccagtagatttttgtaaacaaaatgtaagtcgatgttttctctcaattatcctaggagtgacctttatatgtgtggaagattaatggtatatgctccttatgtcactgtttttgagtaaaatccatttcctttctctgtttcagcctatgacaaaattgatgtttacaggcctgctttttgcttataattgacaacatgtgcaaaaataccaaatttgtgtcctgtgcagtatgaagaattcagtgaatattcattaatgtattagcttgttttgctctctgttcatatatggctctattcttagaaatataatttgaatgtgatctttcaatagtctgaatattttacaaattatagctatgtcttgtgaaaataacctcaaaaagaaaaatacgactctgttgtcttacttgatatttcttgccctagtaatgtacttgacatttatgttcctaagcagtgtaagtaccagtagaatttctctgtcaaactcaatgatcatttagtacttttgtcttctcccatgtgcttgaaggaaaaataaagtgtcactaccgtatttcttgttttcatcaaaaaataaaaataatttaaa

SEQ ID NO: 68442 - DNA, 902 bp, Homo Sapiens
  misc_feature (680)..(680): n is a, c, g, or t
ttttaaggaatgaagacaaacaatttaatctctatattatcatattatcagtcaattaatacagttggactttcaaactataactgttggtagtaaaataatctgatcacatttcatacagcaattaaaaataacagaaacagagtctcacctatacaatcagagcatctcctgatatgaacaacagttaagcccacatacattttaaagatgctacccagactacaatctatctcaaaagcaaccatggcataatgcattttataaaatgcctacctaaaaatacattgtattttgtaatgtttattaccaatgtgggaggcatttctagcctaaacactataaccaaactattcaacagtaagccggtagtagtcttacaataagaaatttcacatatacttgttattataaatagcattttatgttcattatttcagccatctctcaaactaagacaattttcaacagttaccagaagacactgagctagagtcaacagaccagatatctagttccagctctgcctctacctacctgtgagacacggggaaagttctcttaaccttcgtaaggcctcagatttctcaaccatagaacaaaggggctgaacaaaatgaattctaaagagcattcccataaaacgggatttggctaaattttcaagaacttaatttctntaaaaaaagatagctatgagataccaaacttggtatttaccaccaataatattgattatataagagctttaagccaaggaattactgattctgcatttatggggtgaaaatataagactatttttagcatgcttttccagttaccagaaaaggggagagggggatttttacaaagacagtaaagcatacagcaatggcagtaaagcatgcagcatagcatgc

SEQ ID NO: 68443 - DNA, 1062 bp, Homo Sapiens
ctcacactcttaatgacttttaacatttatactgagcatccatagatatattcctagaagtatgagaagaattattcttattgaccattaatgtcatgttcattttaatgtaatataattgagatgaaatgttctctggttggaacagatactctcttttttttcttgcaatctttaagaatacatagatctaaaattcattagcttgacccctcaaagtaacttttaagtaaagattaaagcttttcttctcagtgaatatatctgctagaaggaaatagctgggaagaatttaatgatcagggaaattcattatttctatatgtggaaacttttgcttcgaatattgtatctttttaaatctaaatgttcatatttttcctgaagaaaccactgtgtaaaaatcaaattttaattttgaatggaataatttcaaagaactatgaagatgatttgaagctctaatttatatagtcacctataaaatgttctttatatgtgttcataagtaaattttatattgattaagttaaacttttgaattgatttgaggagcagtaaaatgaaagctatatctattctaaaccttatttagacattggtaccagttacccaggtgaaaatatggagtaactttgttttgtatggtaaggtttaggaatggtggatgaagggtatctctatataaataaagtgctcaacaatgtgcaatgattgtaaatttagtaagatattacagccatttcatgaatgctttaccattcaacatagtatctattacaaaacacctttcttgtatccatatacttcaggtgttgctgttaacatttactatgatatttattttaaccaaaatgttactcacattaaatgtttattctttaaaatgaatgtattatgtttttaacccacaaatgcatacttaccctgtgcctcatatttcaatagtactgtaatatggacatcttttgtgaaatacttttattttgttatgctttaaatatacatacaaaaagatttctgttattagctttgaaaattgtataatatcctaatataaac

SEQ ID NO: 68444 - DNA, 1462 bp, Homo Sapiens
aaagatgaatgccttttattatgaaaattgctgttacattacagccaacattccaaaacagtattttaataaacacttgtcttgattataaagtagagcaaaaaccatgatcctttttcaaaagtaattaacatcttctcagtcacttaacacaaatcaggacactctgtatgctcaccacggtgtaggagatgagatgaggaagagcacctatgttattcaaaacagctactagtgttacttatacagtattgaccaacaacttacaatagggcattttttaaaaagcaaaacactgaaatgttgaggtgccacaatacttttgagatggaaaaagccaaagcttgtttcctttttcttcccatcctgagttcagtgtgaagtatagggaagaacaacaccaggctggggatcgatgcagttttttgcttatttcccagttgttagtcctgctcgaaaacacagcctgcgtgcaaaactaccacattctgtccccaaaatgtggaatgcatccaaataggagtcttctgcctcttaacttaaaagaacataggaattttgtttttggtttctttatcatgctacagagagtgaatacactggaattcagacaccgactctgagctgctaggaacctcatttgtccatgtgcaaacgctgtattccaaggcctgtgaatggcagcctgaggaagttttgcatgcaggctgtgttttcgagcaggactaacaactgggaaataagcaaaaaactgcatcgatccccagcctggtgttgttcttccctatacttcacactgaactcaggatgggaagaaaaaggaaacaagctttggctttttccatctcaaaagtattgtggcacctcaacatttcagtgttttgctttttaaaaaatgccctattgtaagttgttggtttatactgtataagtaacactagtagctgttttgaataacataggtgctcttcctcatctcatctcctacaccgtggtgagcatacagagtgtcctgatttgtgttaagtgactgagaagatgttaattacttttgaaaaaggatcatggtttttgctctactttataatcaagacaagtgtttattaaaatactgttttggaatgttggctgtaatgtaacagcaattttcataataaaaggcattcatctttatgtggttgttttatgattgtagaagaaatgaacagggcagcctaaaagatgaaaggaaacccagacttagtatttctttagcccacattgtaatccatgcctctaagtattggcctcaaaagtccctctggggttttagaaatctctgtctttaaaataaacgtaaaccaatagttatagcaccctttctagcaaagagcaaattaactttctgaccccaataacccaaggacacgggtctccaaagaaatctattatttctttgaataaaaagcatattttgatagtt

SEQ ID NO: 68445 - DNA, 578 bp, Homo Sapiens
  misc_feature (41)..(59): n is a, c, g, or t
  misc_feature (301)..(316): n is a, c, g, or t
ccctcaactaaagggaataagcttgcggccgctgctcaggnnnnnnnnnnnnnnnnnnnggagggagaggtccctgcaaggtcccttcccgggcaggggagggatggaaatgccgtcacagtagtagggactggagcgtctacaaggatggaggggagctactcaggcctaacgttagctacaaggaaaaaggacgccttccgtgacagatccttgaggtgtctgtgtctgccccaagtggccggcagtggccttccctccgggcccaaggcctgcagccacctgctctaactcttgagtnnnnnnnnnnnnnnnnacctgcaggggctcggggacaggacagcagcaagaggcaggggccgaggacggaggccttcccgacagtggggtgggttgtacattcaagtgtgaggtgaaccctttggtggggagggggcccctgaagcctcggcggggccacccctccccgcggcgcctctgagtctagggagaggggctgctggctcggcccggccggcctggcttcacagagggtctgcggattgacactggttcttttcataaaaaaataaaattaa

SEQ ID NO: 68446 - DNA, 1622 bp, Homo Sapiens
  misc_feature (1404)..(1406): n is a, c, g, or t
  misc_feature (1409)..(1409): n is a, c, g, or t
  misc_feature (1411)..(1411): n is a, c, g, or t
  misc_feature (1419)..(1420): n is a, c, g, or t
  misc_feature (1456)..(1464): n is a, c, g, or t
ggaagaaaaggaaactgagcttgaattgcaaatgaaactgtggatgtataataagaaaacacaagggtttattcttaacactaaaattaacatgccacacgaagactgcattacagctctctgtttctgtaatgcagaaaaatctgaacagcccaccttggttacagctagcaaagatggttacttcaaagtatggatattaacagatgactctgacatatacaaaaaagctgttggctggacctgtgactttgttggtagttatcacaagtatcaagcaactaactgttgtttctccgaagatggttctttactagcagttagttttgaggaaatagtcacaatatgggattctgtaacatgggaacttaaatgtacattttgccaacgagctgggaaaataaggcacctttgctttgggagattgacgtgttcaaagtatctacttggtgctactgaaaatggcattctttgctgttggaatctgctgagctgtgcattggagtggaatgcaaaattaaatgttagagttatggaacccgatcctaattcagagaatattgctgcaatctctcagtcttcagtggggtcagacttgtttgtatttaaacctagtgagccaaggccattgtatattcaaaagggtatctccagagagaaagtccagtggggagtgtttgttccacgagatgtccctgaatccttcacctcagaagcttaccagtggctaaatagatcccagttttacttcctaacaaaatcacagagtttattgacattcagtacaaagtctccagaagaaaaactcacaccaacaagcaaacagctgctagcagaagaaagtcttcccacaaccccattttatttcatattgggaaaacacaggcaacagcaggatgaaaaactaaacgaaactttagagaatgagctggtacaactacccttaacagaaaacatacccgcaattagtgagcttcttcacactccagcccatgtcctgccatctgctgctttcctgtgctccatgtttgtaaattcattgctgctgtctaaagagactaagagtgctaaggaaattcctgaagatgtagatatggaagaagaaaaagaaagtgaagattcagatgaagaaaatgattttaccgaaaaagtccaggatacaagtaacacaggtttaggagaagacattatacatcagttgtcaaaatctgaagaaaaagaactgagaaaatttaggaaaatagactacagctggatagctgccctttaagccttggagatggggaggatccttggactttgtgtttttgattgtatgttgatattctaaaaacatctattttaatgttatttctgttctaaaaataagataataaatattaacaaactttgcttttttaaaannnaancnaccccacnnacaccaaacccccggccacgaacacacacacaaaannnnnnnnncgccttaaaagtatcccctcaggggggcccaggcttacgcgtacccagcttttcttgggacaaggggggcccccaaaaggggaggcggaattataagcctaggcaccggggccggccgttttaaaaccctcgggaacgggggaaaactgcgtcacctg

SEQ ID NO: 68447 - DNA, 427 bp, Homo Sapiens
taaagactccaggctggagtgcagtgagccaggattggccattgcactccagcctgggcaacaagaacaaaactccatctcaaaaaataaaaatcccaatcccaagtcgaaatcacctcttgttttaaacaagaatgaatcattactgtgtatgttagggtattaaaactgtttcaccagtacagtgaaagttgtttcaacattttaaacaaacagtggttatagactctttctttaaccattgtatattttcttccattcttgtcattggtcaataggggagggtagattagctgctccagaattcaataaagtgtaatatttctaacggtgactttgacctattctgtagtacaactgtaatagctattggtcttcaagtgggtttagatttggtgacatcagtttgatattctcttaaaggaaa

SEQ ID NO: 68448 - DNA, 717 bp, Homo Sapiens
  misc_feature (20)..(20): n is a, c, g, or t
ctgtaatgcatcctctgacntatgcagaaacgttgatagattaccatctatgctctcaccccaagtacaaattcaccaaagagtcccgccacgggtccagcattcctgtcacccaaaagcagtttctccatcacacggacattattcccggaataatgcactggaaaagcttccagtccctggttctctcctccctgccggacccctccaagatggagaccacaaagagctgcgattccttcaattcatttatgcttccgatagacgtccctgccatccttgatgccttaccagaagaggacagactagaaacagtagaacgtgagctctgtgagcagaatgtagaagttatgttgactccagaaatgatcaaagtggaattccctatgttgaactacaaggacatcaggaaggagaaagaagtgaaagatcaagcacaaccagcagagaaggccggagagaagctgctcgaggagatgaggaacctgcggggcaaagcactcaacacatacctgattctagaatgaaagtcaccagtaggtcagtcccttccatttgctttccgtgggccactgtggccccttgcgtccatttacatgccagccatctctgcaattaaagtttctggataaaaaaatgaaatgtagaggatgtatatatcttttaagtgataattataaatcttatatttaaaaataaaatggagttaggatgatg

SEQ ID NO: 68449 - DNA, 524 bp, Homo Sapiens
ctgacctatgcagaaacgttgatagattaccatctatgctctcaccccaagtacaaattcaccaaagagtcccgccacgggtccagcattcctgtcacccaaaagcagtttctccatcacacggacattattcccggaataatgcactggaaaagcttccagtccctggttctctcctccctgccggacccctccaagatggagaccacaaagagctgcgattccttcaattcatttatgcttccgatagacgtccctgccatccttgatgccttaccagaagaggacagactagaaacagtagaacggagcacctggatctgctgctgtatctgtgacgacagagtcggggtatagcacaaagaaggccaccagccctgcatgacaagagctccggcacattaggaagactcttggtcccagagttcctccctacccgctatttcctgaactcctgttactgaaccacccattcctttaactttgccccttgtttctattaaactacctctgggaagaaaaaa

SEQ ID NO: 68450 - DNA, 545 bp, Homo Sapiens
tacctcattcataaagatgaaaaaccagccagcattgactgagcacttagaagacctcacaccaggatctctgtgaataagatctcatttcaccttcgctacaatgctgggagatgggaattacaccattcgcacatcaggaaacaggggctgtggattcttgggtaacttgcccatgctcagaaactgatgcagctgaggccagaagccaggtttgaatcattcataagctgagtgttttcactgagaagtgaaagatcaagcacaaccagcagagaaggccggagagaagctgctcgaggagatgaggaacctgcggggcaaagcactcaacacatacctgattctagaatgaaagtcaccagtaggtcagtcccttccatttgctttctgtgggccactgtggccccttgcgtccatttacatgccagccatctctgcaattaaagtttctggataaaaaaatgaaatgtagaggatgtatatatcttttaagtgataattataaatcttatatttaaaaataaaatggagttaggaaaatg

SEQ ID NO: 68451 - DNA, 1675 bp, Homo Sapiens
  misc_feature (77)..(111): n is a, c, g, or t
tgtataactcactatagggcgctagctctcagagcgaacgacgagcgcagcgaagtagtgagcgaggaagcggccgnnnnnnnnnnnnnnnnnnnnnnnnnnnnnnnnnnncagtcgacggtaccggacatatgcccgggaattcggccattacggccgggggcaggagaagatggcggtctccacaggagttaaagttcctcgtaattttcgcttgttggaagaacttgaagaaggacaaaaaggagtaggcgacggtacagttagctggggccttgaagatgatgaagatatgacacttacaaggtggacaggcatgattattgggccaccaaggacaaattatgaaaacagaatatatagcctgaaagtagaatgtggacctaaatacccagaagctcctccgtcagttagatttgtaacaaaaattaatatgaacggaataaataattccagtgggatggtggatgcccggagcataccagtgttagcaaaatggcaaaattcatatagcattaaagttgtacttcaagagctaagacgtctaatgatgtccaaagaaaatatgaagcttccacagccaccagaaggacaaacatacaacaattaattttagtggatctcaaacttgtcttaaatcaacaaccttctactcatgttaatgtcttgattaaatatcacaatgcaaaatacacattaagtaaaagaattccagctggtaaacatgacctggacatttgtaagaatatatttaatatatgtacacccattatgttttcaggtaacaggaggaaaaatgcagcacaattttttttctcttgaaaggcactgtcatttaaacataaacctggagtactcgaaatagaattcaggtttacaagatgaaagcgtgtggagaagtgtcagatggcagtggaagcatgtgtgtttctaaaaagtaaaaatctcaagaaaacagaaatggcatgctttacccatcttacttagtgaaagagagctgcagttgaaattgtttaaaaagtagcaggtacaatgaatattgtcacagatgtgttaatttttgaagcaatgtgggtgctgactactagtagtatcaaaaatatgttcaggattgttttgatacctgtatttataataaaaaatgttggggggagttgatgaattcctgttaaaagctgttcttgtgtgttacatgtaacagacatggtaaatatttgtttacagtctttgtttaacaaaccatgcatttaagtttaagtgaagtcaacaaaaaggaaataggtgtatggatatgtgattttgagattaaagttagtcttaaaatgtaaataaaatgtgaaacgtgtcctcagagactgtgccatttctattatgttgatgtatatgtacagtaccttgccagggaagcaaaaattggaattattgtagcttttcatgtatacacacttttatttaccctattttgtgtacttcttgtgaattataatttgcagactatttcagaaaagaaattatctagtttaatttcttctttggacaaggagtcctaggtattatattttgagtttgatttcaccagaaataataatattaaaaagatctttgcattctggcagttcttttaggattataggttgcaaattatccaaaatatatatcccattttttaaagcat

SEQ ID NO: 68452 - DNA, 991 bp, Homo Sapiens
  misc_feature (85)..(116): n is a, c, g, or t
tgatccatcactattagggcgctagcttcgctcgtagcgaacgaacgagcgcagcgagtagtggagcgaggaagcggccgcatannnnnnnnnnnnnnnnnnnnnnnnnnnnnnnncagtcgacggtaccggacatatgcccgggaattcggccattacggccggggggctgcgtcgggctgcaggagaagatggcggtctccacaggagttaaagttcctcgtaattttcgcttgttggaagaacttgaagaaggacaaaaaggagtaggcgacggtacagttagctggggccttgaagatgatgaagatatgacacttacaaggtggacaggcatgattattgggccaccaaggacaaattatgaaaacagaatatatagcctgaaagtagaatgtggacctaaatacccagaagctcctccgtcagttagatttgtaacaaaaattaatatgaacggaataaataattccagtgggatggtggatgcccggagcataccagtgttagcaaaatggcaaaattcatatagcattaaagttgtacttcaagagctaagacgtctaatgatgtccaaagaaaatatgaagcttccacagccaccagaaggacaaacatacaacaattaattttagtggatctcaaacttgtcttaaatcaacaaccttctactcatgttaatgtcttgattaaatatcacaatgcaaatacacattaagtaaaagaattccagctggtaaacatgacctggacagttggtaaggaatatatttaataatatggacaacccatttatgttttcagggtaacaggaggaaaaacatgcagcacaattttttttctccttgaaaaggcactgtgcatttaaacattaaacctggagttcctccggaaatagaattcaggtttaacaagatgaaaagcgtgtgggagaagtggtcaagatggcagtggaagcatgtgtgttctaacaagttaaaatcttaagaaa

SEQ ID NO: 68453 - DNA, 413 bp, Homo Sapiens
cccgaaaagaaaatcccaaagcaaatttgtgctagggttctttgaacttggctcttttacctcatggttgaagatcttgaaagaagtatgtaggataccactgggtgatgtacttgtcaaggccctgaaaagtagcctaccatgccattctcccccactctcaagtagcacttttatgttatgggaatcaaggggtgggaggtatcattattcctggtagttatgggtttttaataaatatcattactgcaatatcagacttcaatcttgccagaacttcaaaaaacattattcaatttttgtcttacgaaacacttaaaaaaaagactatcacttgagaattttctttgcaatttcctgtaaatgaaaacatttgttaaaaagttcatctatgaaaagttctcacatatctt

SEQ ID NO: 68454 - DNA, 705 bp, Homo Sapiens
cctttaatagactttaatatagctcatttacaatcgtatgaaaatccatcaagatcaatcatgttgcacaatccctaaaggataaaactgagggaagtcatggataattttcacagcttcattgtaaagtccaagatcaaaaggatggctatcttctttaaactggacataagatgtacacaagatggtggccttggcggttactcttccaaccacttccacaattccagagatttcttcatcaagctaagacacagaacaagacatcgatttggtgatatcacattttcagttgacaattattttggaaaactgttatacaggtaactaatctatcacttcaagtaacaaagtaatcttaagaattaccagtgtaaaagttaaaatgtaacttgtttaacaaatgtttgagaacttaactgtcagcatgttaaaattcctgctacctttagtagtagcttcaagtccaaagctacaattcaagttaaagacaaaatcactattgaaaacgtccagcatttctataagcagtaatatcctatgagaggaatcttctataatctgtatttcacaatgtgttctgtatacattaacaaaacagcatatggatttgtcttcacaaaataccaaaaaaagttttaagtatgttaaacataaaatgcaaacataaataagtaaaaactggaaatatatgaacaaaaatag

SEQ ID NO: 68455 - DNA, 437 bp, Homo Sapiens
  misc_feature (365)..(365): n is a, c, g, or t
cctcaaacaagaagggcttcctttaatagactttaatatagctcatttacaatcgtatgaaaatccatcaagatcaatcatgttgcacaatccctaaaggataaaactgagggaagtcatggataattttcacagcttcattgtaaagtccaagatcaaaaggatggctatcttctttaaactggacataagatgtacacaagatggtggccttggcggttactcttccaaccacttccacaattccagagatttcttcatcaaggggttccatcaactcgatggttccatttattccttcaccatctgaaagaataaacatttttccggtgggatgaatctttctgcgatcacaggattcccgngcggtgacttgaccccggaagtgggggtgtgaagctccggtgcctggtgcggcgggggactgcggggccagc

SEQ ID NO: 68456 - DNA, 470 bp, Homo Sapiens
  misc_feature (103)..(103): n is a, c, g, or t
gcgcacagtttcagtcgtccgtgggtttcccgccagccgcagtcttggaccataatcatggtggacatgatggacttgcccaggtcgcgcatcaacgccggcnatgctagctcaattcatcgacaagcctgtctgcttcgtagggaggctggaaaagatggagaaggaaaaaatggaaccatcgagttgatggaaccccttgatgaagaaatctctggaattgtggaagtggttggaagagtaaccgccaaggccaccatcttgtgtacatcttatgtccagtttaaagaagatagccatccttttgatcttggactttacaatgaagctgtgaaaattatccatgacttccctcagttttatcctttagggattgtgcaacatgattgatcttgatggattttcatacgattgtaaatgagctatattaaagtctattaaaggaagcccttcttgtttgagggagaaaa

SEQ ID NO: 68457 - DNA, 827 bp, Homo Sapiens; identical to SEQ ID NO: 6119
  misc_feature (708)..(712): n is a, c, g, or t
  misc_feature (714)..(722): n is a, c, g, or t
  misc_feature (729)..(730): n is a, c, g, or t
  misc_feature (733)..(733): n is a, c, g, or t

SEQ ID NO: 68458 - DNA, 943 bp, Homo Sapiens
ttatgcgatatcgtcgaccacgcgtccggtggcattgaggcggacgcgtctagaggtccgtctgaccgcggcgtcgggacctggtttccgggcatgagctgagagcaccacgccgaggccacgagtatttcatagacattgatggaagcagaaaccaaaactcttcccctggagaatgcatccatcctttcagagggctctctgcaggaaggacaccgattatggattggcaacctggaccccaaaattaccgaataccacctcctcaagctcctccagaagtttggcaaggtaaagcagtttgacttcctcttccacaagtcaggtgctttggagggacagcctcgaggctactgttttgttaactttgaaactaagcaggaagcagagcaagccatccagtgtctcaatggcaagttggccctgtccaagaagctggtggtgcgatgggcacatgctcaagtaaagagatatgatcataacaagaatgataagattcttccaatcagtctcgagccatcctcaagcactgagcctactcagtctaacctaagtgtcactgcaaagataaaagccattgaagcaaaactgaaaatgatggcggaaaatcctgatgcagagtatccagcagcgcctgtttattcctactttaagccaccagataaaaaaaggactactccatattctagaacagcatggaaatctcgaagatgatggttgtgaattactgtagcagcaaaagcaaattggtctccacacctaaaatcgtctgcctgtgtactttgtagatgtgaatggtactattcaacggagcacaatcacatgttagcatttggtaacataatgtttttggatgttcttatggatgtttcttccctaaactatgtatggaattgagcatcatccagaataaatagcgttgtatcccactccaaactgaaag

SEQ ID NO: 68459 - DNA, 1597 bp, Homo Sapiens
  misc_feature (12)..(12): n is a, c, g, or t
atttcggcacgngggcgggggcggctgaggcagctgtagcggccgtggaggaggtcggctcagccgggcagtttgaggagctgctgcgcctcaaagccaagtccctccttgtggtccatttctgggcaccatgggctccacagtgtgcacagatgaacgaagttatggcagagttagctaaagaactccctcaagtttcatttgtgaagttggaagctgaaggtgttcctgaagtatctgaaaaatatgaaattagctctgttcccacttttctgtttttcaagaattctcagaaaatcgaccgattagatggtgcacatgccccagagttgaccaaaaaagttcagcgacatgcatctagtggctccttcctacccagcgctaatgaacatcttaaagaagatctcaaccttcgcttgaagaaattgactcatgctgccccctgcatgctgtttatgaaaggaactcctcaagaaccacgctgtggtttcagcaagcagatggtggaaattcttcacaaacataatattcagtttagcagttttgatatcttctcagatgaagaggttcgacagggactcaaagcctattccagttggcctacctatcctcagctctatgtttctggagagctcataggaggacttgatataattaaggagctagaagcatctgaagaactagatacaatttgtcccaaagctcccaaattagaggaaaggctcaaagtgctgacaaataaagcttctgtgatgctctttatgaaaggaaacaaacaggaagcaaaatgtggattcagcaaacaaattctggaaatactaaatagtactggtgttgaatatgaaacattcgatatattggaggatgaagaagttcggcaaggattaaaagcttactcaaattggccaacataccctcagctgtatgtgaaaggggagctggtgggaggattggatattgtgaaggaactgaaagaaaatggtgaattgctgcctatactgagaggagaaaattaataaatcttaaacttggtgcccaactattgtaagaaatatttaattacattgggagcagttcatgatttagtcctcagaaatggactaggaatagaaaattcctgctttctcagttacatgttttgtgtatttcacaatgtcgtgctaaataaatgtatgttacatttttttcccaccaaaaatagaatgcaataaacatcttcaaattattaacaataattgtatgaaaaaagtgtatctttacagcagtattaaacatacagctactataattaacccaccttaaatctctttttcttagtacatgagtatcttctagcagttaagaaaggcagtcttcagaaaatggagaactgtggcggaatgcagtacacaacagtatttaggacaactcctttgccaacacaatggctcccctcgctggtgaaagatctctttacagcttaggaaaaacaacggaaattagtttctgatgtcattgctgagctcggcacttggtacattgcagaggcagtgtaggatgtctgcaggtttagagactcatttcacaaggcaccagtagtgaattatcaagaaacatt

SEQ ID NO: 68460 - DNA, 693 bp, Homo Sapiens
gcaccccagcagcagtgggggccatgcaggacaaatctgctgagcacaaaaagaactcaatattcctgctattgctgcaaactgagtatgaaagaaggtgacccagccatctatgccgaaagggctggctatgataaactgtggcacccagcttgttttgtctgcagcacctgccatgaactcctggttgacatgatttatttttggaagaatgagaagctatactgtggcagacattactgtgacagcgagaaaccccgatgtgctggctgtgacgagctgatattcagcaatgagtatacccaggcagaaaaccagaattggcacctgaaacacttctgctgctttgactgtgatagcattctagctggggagatatacgtgatggtcaatgacaagcccgtgtgcaagccctgctatgtgaagaatcacgctgtggtgagaagtgttctaaggatatggttgcctcagcctgctttaggacttgagtttatgcttttcttaaagcctcttacaaatgggaaacagaaagcagtcctcctaagtagaaagcaaattattcctaccacagggtgttaaaatcaaggcaattcaaaaacaatacatgcattgactatgagccacctcaagatttctacttgtgaaatttacaatatcaattataggtactgcttaataataaaatcctcactt

SEQ ID NO: 68461 - DNA, 698 bp, Homo Sapiens
ggggccatggaggacaaatctgctgagcacaaaagaactcaatattcctgctattgctgcaaactgagtatgaaagaaggtgacccagccatctatgccgaaagggctggctatgataaactgtggcacccagcttgttttgtctgcagcacctgccatgaactcctggttgacatgatttatttttggaagaatgagaagctatactgtggcagacattactgtgacagcgagaaaccccgatgtgctggctgtgacgagctgatattcagcaatgagtatacccaggcagaaaaccagaattggcacctgaaacacttctgctgctttgactgtgatagcattctagctggggagatatacgtgatggtcaatgacaagcccgtgtgcaagccctgctatgtgaagaatcacgctgtggtgtgtcaaggatgccacaatgccatcgacccagaagtgcagcgggtgacctataacaatttcagctggcatgcatccacagagtgctttctgtgctcttgctgcagcaaatgcctcattgggcagaagttcatgccagtagaagggatggttttctgttcagtggaatgtaagaagaggatgtcttaggaggagggcacccagaagtatcgagccatagctatccaaagtggtctgcatttctactgtaaaatgcaatttgaaaaaaataaaacgca

SEQ ID NO: 68462 - DNA, 553 bp, Homo Sapiens
  misc_feature (114)..(124): n is a, c, g, or t
cttcagggtccaacaatcaagatatccggagttcaggttaatgtgaaatccattatccaacatgaatgaggagtttgagatgctgcataaatctatccctgtggaccctgaagnnnnnnnnnnntactgcttaacctgtcgtgtcaaagctgcacattttgatgtagagtggggggtggaagatgattctcgcctgttgctggggatttatgaacatggctatggaaactgggagttaattaaaacagacccagagcttaaattaactgacaaaattctaccggtggagacagataaaaagcctcaggggaagcagctacagacccgagcggattacttgttgaagctgctcagaaagggtctggagaagaagggggctgtgacaggtggggaagaggccaaattaaagaagcggaagcctcgggtaaagaaggaaaacaaagtgcccaggctgaaagaggagcatggaattgagcgttcatctcctaggcattcagataatccatcagaagagggagaagtgaaagatgatggcttggaaaaaagtccaatg

SEQ ID NO: 68463 - DNA, 379 bp, Homo Sapiens
gggccgaccgggcaacttccccccttgtgtccctctaccctgctttggagtgccgggccctcattcagcagatgtccccctctgcctttgcaggtctgaatgactgggatgatgatgagatcctagcttcggtgctggcagtgtcccaacaggaatacctagacagtatgaagaaaaacaaagtgcacagagacccgcccccagacaagagttgatggagacccagggattggacaccatctcccaaccccagtactcctgctctccggtgccacctcaccttctttggcttcttccctcttgcctccttctgttctttctgctctcccctcttttccctcctccacacttccctctggctacccacaacaccttaaag

SEQ ID NO: 68464 - DNA, 716 bp, Homo Sapiens
acatttttggagaaagctgctttctggagcagtttcagttttatttttgtatttaaggctgaaggacagtttcaataaacatgcttcttcccagagggatttcaaagaaagatcgtttttgcatgtcatataggggagaatgaggacatgagacaccaagaagatgaagttttcaggagcagaggagaaactttacaccaacatgtctgaacttcattgactcactacctggagccattttttagctgttgagttaagaaacagaaaaaggagcctggggcttctgactctttcaccaggcttaggggagtgagaggagggtttagacacgggtagggcctcttggccccttggtgcagccccgctgagccatctcctcctttggctgggtgactcctttctgctgccttgacaactcctggaggagaaacagatggggcctctgggctcctcccagccctgtagggtggggctcctgccctccttcttgaagtttacctgttgctgccacaagttctgctcccttcgtctttcctttgaatcctgggtggtgcaggaactagccttgttcagtggacttggggagaactggaggggaaattcgctgtgttttctgttaagccagcactgaccccaacaactcccctctctagtccaacttcccaaaagtctaaactgaaaacaataaactcaccttctcatgaatcagattctgc

SEQ ID NO: 68465 - DNA, 2818 bp, Homo Sapiens
  misc_feature (860)..(880): n is a, c, g, or t
  misc_feature (958)..(966): n is a, c, g, or t
  misc_feature (1571)..(1588): n is a, c, g, or t
cgctaggtacgaggcctgggtgtcgaatcggcacgaggcgctgccgcagcgggctgctccacgtcctgggccttagcttcctgctgcagacccgccggccgattctcctctgctctccacgtctcatgaagccgctggtcgtgttcgtcctcggcggccccggcgccggcaaggggacccagtgcgcccgcatcgtcgagaaatatggctacacacacctttctgcaggagagctgcttcgtgatgaaaggaagaacccagattcacagtatggtgaacttattgaaaagtacattaaagaaggaaagattgtaccagttgagataaccatcagtttattaaagagggaaatggatcagacaatggctgccaatgctcagaagaataaattcttgattgatgggtttccaagaaatcaagacaaccttcaaggatggaacaagaccatggatgggacaggcagatgtatctttcgttctcttttttgactgtaataatgagatttgtattgaacgatgtcttgagaggggaaagagtagtggtaggagtgatgacaacagagagagcttggaaaagagaattcagacctaccttcagtcaacaaagccaattattgacttatatgaagaaatggggaaagtcaagaaaatagatgcttctaaatctgttgatgaagtttttgatgaagttgtgcagatttttgacaaggaaggctaattctaaacctgaaagcatccttgaaatcatgcttgaatattgctttgatagctgctatcatgacccctttttaaggcaattctaatctttcataactacatctcaattagtggctggaaagtacatggtaaaacaaagtaaannnnnnnnnnnnnnnnnnnnnggtcacaggagtagacagtgaattcaggtttaacttcaccttagttatggtgctcaccaaacgaagggtatcagctannnnnnnnnaaattcaaaaagaatatcccttttatagtttgtgccttctgtgagcaaaactttttagtacgcgtatatatccctctagtaatcacaacattttaggatttagggatacccgcttcctctttttcttgcaagttttaaatttccaaccttaagtgaatttgtggaccaaatttcaaaggaactttttgtgtagtcagttcttgcacaatgtgtttggtaaacaaactcaaaatggattcttaggagcattttagtgtttattaaataactgaccatttgctgtagaaagatgagaaaacttaagctttgttttactacaacttgtacaaagttgtatgacagggcatattctttgcttccaagatttgggttgggggcactaggggttcagagcctggcagaattgtcagctttagtctgacataatctaagggtatggggcaaggatcacatctaatgcttgtgttccttatactctattatatagtgttattcatgattcagctgatcttaacaaaattcgtagcagtggaaccttgaaatgcatgtggctagatttatgctaaaatgattctcagttagcattttagtaacacttcaaaggnnnnnnnnnnnnnnnnnnctagacttaataaaagcttaggattaattagaagaagcaatctagttaaatttcccatttgtattttattttcttgaatacttttttcatagttatttgtttaaaaagatttaaaaatcattgcactttggtcagaaaaataataaatatatcttataaatgtttgattcccttccttgctatttttattcagtagatttttgtttggcatcatgttgaagcaccgaaagataaatgatttttaaaaggctatagagtccaaaggaatattcttttacaccaattcttcctttaaaaatctctgaggaatttgttttcgccttacttttttttcttctgtcacaatgctaagtggtatccgaggttcttaatatgagatttaaaatcttaaaatgtttcttattttcagcacttacatcatttggtacacagggtcaaatagggcaaataattttgtctttgtataatagatttgatatttaaagtcactggaaataggacaagttaatggatgtttttatattttaatagaatcatttatttctatgtgttatgaaattcacttaatgataaatttttcaacatacttgccattagaaaacaaagtattgctaagtactataacatattggccactaaaattcatattgagattatcttggtttcttggaagagataggaatgagttcttatctagtgttgcaggccagcaaatacagaggtggtttaatcaaacagctctagtatgaagcaagagtaaagactaaggtttcgagagcattcctactcacataagtgaagaaatctgtcagataggaatctaaatatttatagtgagattgtgaaagcaaccttaaagttttgaagaagactgatgagactaggtgctttgcttcctttcatcaggtatctttctgtggcatttgagaacagaaaccaagaaacatggtaattactaaattatgaggctttgctttttgtttgcttttaagtagaaaaacatgttggcaacattgagttttggagttgattgagataatatgacttaactagttttgtcattccatttgttaaagatacagtcaccaagaatgttttgagttttttgaaagaccccaatttaagccttgcttatttttaaattatttccattcagtgatgttggatgtatatcaattatttagtaaataatctcaataaattttgtgctgtggcctttgctaaaaaaaa

SEQ ID NO: 68466 - DNA, 1266 bp, Homo Sapiens
  misc_feature (43)..(77): n is a, c, g, or t
aaacgacgagcgcagcgagtctagatgagcgaggaagcggcgnnnnnnnnnnnnnnnnnnnnnnnnnnnnnnnnnnncagtcgacggtaccggacatatgcccgggaattcggccattacggccgggctccctccagccctcgctatgtgcctctgccatcttcacccatcatggagcagaggtgaggagaggcagcctgggaatatggagaccagtgaaggaccaggcctggagagcacagggtcctacctgggcatccagcagaggagcccctaaaggccaggagcaccccaagaggagggagggcagccagcctccattgacggcgagcctccagccctctcctactttgatcaccatttctctccaggctttctgcctccgagatgtggcaccatagtgcggtgccctgtggcttcaccgccctacttccacctccgcccagcctgtaatgtttatataagcagcctcaaggaccaagaaccatctgcgaaaggacacacacaggaaattcataaaagaaatctgaatggataaaaccatgaaaaaaagtatgcttcattagtaattaaagaaaggcaaatagagctggaagcatttttcccttagcaaaccataacagaaaaaaataagacccaatattggcaaagagactactgaaaaaacattcccatacattgcgtgtgggagtatacatcggtgcaggcttcctggatgacagttgggtgatatgtgtcatgtggcctaaaagcctccatgtcatttgacctacgaattctatctttgggaatttatcctaagaaaatacttaaggatttagttagtgataagatgttcatcccagcattgcaatggagaaaaatgggaagcaatggtttggttgggaatttattccttttctgctgtaacgaaagtttgcaataggggattgcttaagtaaattattgtatctccatccagatggtggagtaccgcgcagacattaaaagtcatgtaaaagaacatctgactgaaagaaaaatgctccttgaatattaaaaggttgtaaaaatagtgcatgttatgtgatttcaattttgttttttaaaatatgggtgtatgcttgtatacgtagagcagataaaaaagacggaaggcatactaaaaaatgttgagtggttatctttgtatggtggaacaaagtcactgtaattttcatctttggtttttctgtaatttccaaattttccacattttgtatttcatataataaatataattaagaa

SEQ ID NO: 68467 - DNA, 741 bp, Homo Sapiens
  misc_feature (116)..(116): n is a, c, g, or t
  misc_feature (663)..(663): n is a, c, g, or t
  misc_feature (681)..(681): n is a, c, g, or t
gacaggtcaggacagctggaagtgtgaaatgaatgcagccctgcatagctgtcaaaggatcaagctgtctgcagcggccgactgaccatgcacacacacactcggcagcacccggntaggcattacctacttcaccaccgatgtagaagtcagtgtttgtcgggtgaacgacagcatcactgtcgatcgaggcaatgtcagcctgtacaacttgcaactataacagatgcttctggtgttatattcagaaatgtttcattggaaaagaagctattttggcgggctctgcttcagctagccaggaagaccccctcagtggcctgtatctgactctcttcgcgggagaaccacctgctctgtctaggggaatgggattctctgggggaaacttggatttgctgaaggaagggagcagttgcgaacagaactcaagctcatggagaattctcagcttcctttggactcactaccttcccttctgaccagaggcatccccactcttggaagtgcagactacagtacctcagggagccactactactcagcattgaggatttcctgccaaccaagtgctgtttcactcttcacatctgtggatgaggctagagctgtgattttccaactatgctctgctatgcactggggctcagcagaagtcctcangggtatgcagctgagccnacaaaagtttttttgctgtaaaatgtgtacaaatatgtatttttaaacaatcttgactag

SEQ ID NO: 68468 - DNA, 661 bp, Homo Sapiens
agaattcggcaagaggccaggtctgccaaagcaggagtcatctttcccgtggggcggatgctgcggtacatcaagaaaggccaccccaagtacaggattggagtgggggcacccgtgtacatggccgccgtcctggaatacctgacagcggagattctggagctggctggcaatgcaggcgagagacaacaagaagggacgggtcacaccccggcacatcctgctggctgtggccaatgatgaagagctgaatcagctgctaaaaggagtcaccatagccagtgggggtgtgttacccaacatccaccccgagttgctagcgaagaagcggggatccaaaggaaagttggaagccatcatcacaccacccccagccaaaaaggccaagtctccatcccagaagaagcctgtatctaaaaaagcaggaggcaagaaaggggcccggaaatccaagaagcagggtgaagtcagtaaggcagccagcgccgacagcacaaccgagggcacacctgccgacggcttcacagtcctctccaccaagagcctcttccttggccagaagccgccccagtgatgcaactttgccaggacgccatggttttgtaaaagacaattcacttttattgaaaataaaaatgatgcaaaggcttttaagacctca

SEQ ID NO: 68469 - DNA, 1091 bp, Homo Sapiens
  misc_feature (515)..(537): n is a, c, g, or t
  misc_feature (763)..(763): n is a, c, g, or t
  misc_feature (876)..(876): n is a, c, g, or t
  misc_feature (966)..(966): n is a, c, g, or t
tgtgcctcgtgcacttggagtgtccactgtcctttacctgtatcccaaggctccttctctgagacttcccagctctcctgttatttcccacctcatgcttttctttgcagctgaaccttattcacagtgaaatcagtaatttagccggctttgaggtggaggccataatcaatcctaccaatgctgacattgaccttaaaaatgacctaggtaattggggacggggttcggcaccaccagctgtcagatgaaaagttatggaacccagaatttaggcatttcatcttcccagactttacagtggtcaagccaaatttccaaatccaagattgatatttgagtgtagacgctgaatatcaacttactccaggccattccaagtgtaaacggtctgtttcattaagtgtgattggctactctctcctcaattgcaaatacattgccatctgaattctcttccataatgatcaaactgactgctggttacttggggagggatttttaaacgtgttggnnnnnnnnnnnnnnnnnnnnnnnactttagaactgaaaaatctcaggtaactacaaaatgatagtttctccatttaaaccttaattagaaatgacaaagcttgaaagagaagacaggccacatcagtatgctattaagctgtctttagtccacaatttactaccatcacttcaacttttctttagaactgaaaacagtatatgactgaatgccaccttcttgaattatttggctagaggatggtattanacagaagggcaatatctccaagtgagttcttatggaggaaaactgccccagagccatggtgtctccctgttcaagatggcagatggttcagggcagactgagaggtgcccctncagtgtcctgcctctatggctttatctttgcatatgtggcactgtcagctcaatggcacgacagggctgctctgctgctcttcgatgtanaagcttgccaggggaaataggcacacagatgcagcctcccttctaaccctcaactggcatctattttgtatcccttgagctctcagcttcctgctggtttttggccagatagcagacttccttac

SEQ ID NO: 68470 - DNA, 1113 bp, Homo Sapiens
taactatagcgcaggtacgaggctgggtgttgaatcggcacgaggctcggcagcggcgccgggcggagggggagagcgcgggccgcgcgggcgggaagcgaagaggcgggcgggccagcgaggagcgcggagagaaaaggcgcgagcggccaggagggctcaggccgagacaccttgcagctgccgccgccgccaccgagccgccgctgtgctcactgatccgcctccagggccaccgccatgtcgagccgcggtgggaagaagaagtccaccaagacgtccaggtctgccaaagcaggagtcatctttcccgtggggcggatgctgcggtacatcaagaaaggccaccccaagtacaggattggagtgggggcacccgtgtacatggccgccgtcctggaatacctgacagcggagattctggacctggctgacaatgcagcgagagacaacaactaagggacgggtcacaccccgccacatcctgatggctgcggacaatgatgacagagctgaatcagctgctaaaaggagtcaccatagccagtgggggtgtgttacccaacatccaccccgagttgctagcgaagaagcggggatccaaaggaaagttggaagccatcatcacaccacccccagccaaaaaggccaagtctccatcccagaagaagcctgtatctaaaaaagcaggaggcaagaaaggggcccggaaatccaagggtgaagtcagtaaggcagccagcgccgacagcacaaccgagggcacacctgccgacggcttcacagtcctctccaccaagagcctctctcttggccagaagctgaacttattcacagtgaaatccgtaatttagccgggtgtgaggtgggaggcctaatcaatcctaccaatggtgtacgattgaccctttaagattacctaggaaaacacgcctggggaacaaagggttgcacgagtttgtggaaccacgtccgggacctcggaaaaaaacgagcctggtagatattggcgccgctgtcacacacagcactggtgtgctgccagcatgtgtctccctgtatataccacgtgggtgcgacaagtgatgaacacgtctagaaagacagatcgtg

SEQ ID NO: 68471 - DNA, 2162 bp, Homo Sapiens
  misc_feature (1886)..(1986): n is a, c, g, or t
ggccaaagtactactaacggttctaaggtagcgaggcctgggtggcgaattcggcacgaggcggagagaaaaggcgcgagcggccaggagggctcaggccgagacaccttgcagctgccgccgccgccaccgagccgccgctgtgctcactgatccgcctccagggccaccgccatgtcgagccgcggtgggaagaagaagtccaccaagacgtccaggtctgccaaagcaggagtcatctttcccgtggggcggatgctgcggtacatcaagaaaggccaccccaagtacaggattggagtgggggcacccgtgtacatggccgccgtcctggaatacctgacagcggagattctggagctggctggcaatgcagcgagagacaacaagaagggacgggtcacaccccggcacatcctgctggctgtggccaatgatgaagagctgaatcagctgctaaaaggagtcaccatagccagtgggggtgtgttacccaacatccaccccgagttgctagcgaagaagcggggatccaaaggaaagttggaagccatcatcacaccacccccagccaaaaaggccaagtctccatcccagaagaagcctgtatctaaaaaagcaggaggcaagaaaggggcccggaaatccaagaagcagggtgaagtcagtaaggcagccagcgccgacagcacaaccgagggcacacctgccgacggcttcacagtcctctccaccaagagcctcttccttggccagaagctgaaccttattcacagtgaaatcagtaatttagccggctttgaggtggaggccataatcaatcctaccaatgctgacattgaccttaaagatgacctaggaaacacgctggagaagaaaggtggcaaggagtttgtggaagctgtcctggaactccggaaaaagaacgggcccttggaagtagctggagctgctgtcagcgcaggccatggcctgcctgccaagtttgtgatccactgtaatagtccagtttggggtgcagacaagtgtgaagaacttctggaaaagacagtgaaaaactgcttggccctggctgatgataagaagctgaaatccattgcatttccatccatcggcagcggcaggaacggttttccaaagcagacagcagctcagctgattctgaaggccatctccagttacttcgtgtctacaatgtcctcttccatcaaaacggtgtacttcgtgctttttgacagcgagagtataggcatctatgtgcaggaaatggccaagctggacgccaactaggctgagcaatgacagaaccagctgcaccatgtaccccaccttcagtttaaaagatcctgtacatccccttcactcctactgggaggtgggacccctttcattttcagttttgctcatctagggaaaataaggctttggtttccagtttaattgtttttgaccttctaaaatgtttttatgttagcactgatagttggcattactgttgttaagcactgtgttccagaccgtgtctgacttagtgtaacctaggagattttatagttttattttaatgaaaccctgattgacgcacagcagtggggagaacagcgtcttttacctgtcaccgaagccaggaagccccgtttgtaagcgtgtgttgtggtgctttattgtacatcctccagtggcgttctttttactctaatgttcttttggtttcccccctcagaagaatcatgaatttgcaacagacctaatttttggttactttttgtcttattgatggatttgaaaatgaaagatttaataaggcaaagcagaatctgttgtccttaattatatttgcaatttggaatttgtgtgagttgatttagtaaaatgttaaaccgttnnnnnnnnnnnnnnnnnnnnnnnnnnnnnnnnnnnnnnnnnnnnnnnnnnnnnnnnnnnnnnnnnnnnnnnnnnnnnnnnnnnnnnnnnnnnnnnnnnnnntaaacattgcggggccccctccggcgccctcgaaaaaatttttcaaaacccatttctgttgggggcccggcggccccccataagggaaaaggaaacctgggcgcccataatttgtgttccaaaaggaaaacccccggggcacgaaaataaagggctttgggatttctcccccaaat

SEQ ID NO: 68472 - DNA, 1209 bp, Homo Sapiens
ggcctgggtggcgtactcggcacgagggcgcgggccgcgcgggcgggaagcgaagaggcgggcgggccagcgaggagcgcggagagaaaaggcgcgagcggccaggagggctcaggccgagacaccttgcagctgccgccgccgccaccgagccgccgctgtgctcactgatccgcctccagggccaccgccatgtcgagccgcggtgggaagaagaagtccaccaagacgtccaggtctgccaaagcaggagtcatctttcccgtggggcggatgctgcggtacatcaagaaaggccaccccaagtacaggattggagtgggggcacccgtgtacatggccgccgtcctggaatacctgacagcggagattctggagctggctggcaatgcagcgagagacaacaagaagggacgggtcacaccccggcacatcctgctggctgtggccaatgatgaagagctgaatcagctgctaaaaggagtcaccatagccagtgggggtgtgttacccaacatccaccccgagttgctagcgaagaagcggggatccaaaggaaagttggaagccatcatcacaccacccccagccaaaaaggccaagtctccatcccagaagaagcctgtatctaaaaaagcaggaggcaagaaaggggccccggaaatccaagaagcagggtgaagtcagtaaggcagccagcgccgacagcacaaccgagggcacacctgccgacggcttcacagtcctctccaccaagagcctcctccttggccagaagctgaaccttattcacagtgaaaatccaggaatttagcccggcctttgaaggtggaaggccataatccatcctaccaatggctggaaattgaccttttaaagatgacctaggaaacaccctgggaaaaagaaacgtggcaacgcagtttgggggaacttgtcctgggaactccggaaaaaagaacgggccccttgggaaagtacctggaagcctgcttgttcaccgccaaggccatgggccctgccctgcccaaatctggggaatcccctggtaattaggcccagcttggggggtgccccacaatttgttgaaagaaccttcctggaaaaaaacaggtgaaaaaacttgccctggccccccgggcttggtggaataaacaagccttgaaaaccccgtgtggcaatttccccatcccataggagaggaagggg

SEQ ID NO: 68473 - DNA, 947 bp, Homo Sapiens
ctggtaccggtccggaattcccgggatgcgcgggccgcgcgggcgggaagcgaagaggcgggcgggccagcgaggagcgcggagagaaaaggcgcgagcggccaggagggctcaggccgagacaccttgcagctgccgccgccgccaccgagccgccgctgtgctcactgatccgcctccagggccaccgccatgtcgagccgcggtgggaagaagaagtccaccaagacgtccaggtctgccaaagcaggagtcatctttcccgtggggcggatgctgcggtacatcaagaaaggccaccccaagtacaggattggagtgggggcacccgtgtacatggccgccgtcctggaatacctgacagcggagattctggagctggctggcaatgcagcgagagacaacaagaagggacgggtcacaccccggcacatcctgctggctgtggccaatgatgaagagctgaatcagctgctaaaaggagtcaccatagccagtgggggtgtgttacccaacatccaccccgagttgctagcgaagaagcggggatccaaaggaaagttggaagccatcatcacaccacccccagccaaaaaggccaagtctccatcccagaagaagcctgtatctaaaaaagcaggaggcaagaaaggggcccggaaatccaagaagaagcagggtgaagtcagtaaggcagccagcgccgacagcacaaccgagggcacacctgccgacggcttcacagtccctctccaccaagagcctcttccttgggcagaaattgcaagttggtacagggctgacattgcctcgatcgacagtgatgctgtcgttcacccgaccaacactgacttctacattcgtgggggaagtaggaaacacctctggaaaagaaaggggggcaaggaagtttgtggaaagctggtcctgaacttcgcgaaaaaaga

SEQ ID NO: 68474 - DNA, 574 bp, Homo Sapiens
  misc_feature (75)..(75): n is a, c, g, or t
gattggattggggacacccgtgtacatggccgccgtcctggaatacctgacagcggagattctggagctggctgncaatgcagcgagagacaacaagaagggacgggtcacaccccggcacatcctgctggctgtggccaatgatgaagagctgaatcagctgctaaaaggagtcaccatagccagtgggggtgtgttacccaacatccgccccgagttgctagcgaagaagcggggatccaaaggaaagttggaagccatcatcacaccacccccagccaaaaaggccaagtctccatcccagaagaagcctgtatctaaaaaagcaggaggcaagaaaggggcccggaaatccaagaagaagcagggtgaagtcagtaaggcagccagcgccgacagcacaacgcgagggcacacctgccgacggcttcacagtcctctccaccaagagcctcttccttggccagaaggtaggcagatgcgcggcctcagtctactacgagggcacccaagggacaggatgggacacaggctacttccactggaagctgtcgggaagtcttgctggtgggaa

SEQ ID NO: 68475 - DNA, 673 bp, Homo Sapiens
cagttctcctgttatgttctggttgaaatcacctgtgtgtcttaatttctcaattcctttttggcaagaatatcaagcaaggtgaatttaacattatgtttatgttttgttttgttgctgtaactaatagttaattggactgattcttacccagccctggtcaagaatctgtgaggcatgtgactgaagtactaaattaaacttattttgaaaccaaacctaatttttaagccaaaaggtgtaatagtgatttaatacaggatgaaaaacactgaatttttaagactgtaggtggactatgttagtagttttcaagcaggatgtctgtattcagcattcaataatgctaaaatccctttcagcatgaaatttgtatgtttttatcctttgctgactaaaataaaataactggtggtttgctaactatttaccatatgggttggctggtttttattaataattgtttagggtatcataagatctgtaagtacaaaggatattctgtttctatctgcaatgcatttgataatcatttctatgaaatgtattttatttaatcagataagctaataagcgaattggttacatcgtttgtatctgttggcctagtggacagctgtgcctggtgcacctctggcttttaataaatactcattggttgaaacaccctgct

SEQ ID NO: 68476 - DNA, 1981 bp, Homo Sapiens
ggcggctagggccggggcctggctgcgcggctgggccaaggcccgcgatggtgatctgctgtgcggccgtgaactgctccaaccggcagggaaagggcgagaagcgcgccgtctccttccacaggttccccctaaaggactcaaaacgtctaatccaatggttaaaagctgttcagagggataactggactcccactaagtattcatttctctgtagtgagcatttcaccaaagacagcttctccaagaggctggaggaccagcatcgcctgctgaagcccacggccgtgccatccatcttccacctgaccgagaagaagaggggggctggaggccatggccgcacccggagaaaagatgccagcaaggccacagggggtgtgaggggacactcgagtgccgccaccagcagaggagctgcaggttggtcaccgtcctcgagtggaaacccgatggccaagccagagtcccgcaggttgaagcaagctgctctgcaaggtgaagccacacccagggcggcccaggaggccgccagccaggagcaggcccagcaagctctggaacggactccaggagatggactggccaccatggtggcaggcagtcagggaaaagcagaagcgtctgccacagatgctggcgatgagagcgccacttcctccatcgaagggggcgtgacagataagagtggcatttctatggatgactttacgcccccaggatctggggcgtgcaaatttatcggctcacttcattcgtacagtttctcctccaagcacacccgagaaaggccatctgtcccccgagagcccattgaccgcaagaggctgaagaaagatgtggaaccaagctgcagtgggagcagcctgggacccgacaagggcctggcccagagccctcccagctcatcacttaccgcgacaccgcagaagccttcccagagcccctctgcccctcctgccgacgtcaccccaaagccagccacggaagccgtgcagagcgagcacagcgacgccagccccatgtccatcaacgaggtcatcctgtcggcgtcaggggcctgcaagctcatcgactcactgcactcctactgcttctcctcccggcagaacaagagccaggtgtgctgcctgcgggagcaggtggagaagaagaacggcgagctgaagagcctgcggcagagggtcagccgctccgacagccaggtgcggaagctacaggagaagctggatgagctgaggagagtgagcgtcccctatccaagtagcctgctgtcgcccagccgcgagccccccaagatgaacccagtggtggagccactgtcctggatgctgggcacctggctgtcggacccacctggagccgggacctaccccacactgcagcccttccagtacctggaggaggttcacatctcccacgtgggccagcccatgctgaacttctcgttcaactccttccacccggacacgcgcaagccgatgcacagagagtgtggcttcattcgcctcaagcccgacaccaacaaggtggcctttgtcagcgcccagaacacaggcgtggtggaagtggaggagggcgaggtgaacgggcaggagctgtgcatcgcatcccactccatcgccaggatctccttcgccaaggagccccacgtagagcagatcacccggaagttcaggctgaattctgaaggcaaacttgagcagacggtctccatggcaaccacgacacagccaatgactcagcatcttcacgtcacctacaagaaggtgaccccgtaaacctagagcttctggagccctcgggagggcctggctactgtgcctcaacggttcggctcctcaacagacagtccctgcggcagaagtgggtgtggccgtgagcctctgcaggctcaagagtgttgtccagatgtttctgtactggcatagaaaaaccaaataaaaggcctttatttttatggctgaggattttgaatatt

SEQ ID NO: 68477 - DNA, 451 bp, Homo Sapiens
  misc_feature (61)..(61): n is a, c, g, or t
gaaattcagcctgaacttccgggtgaatctgctctacgtggggcttcccttggcggaaggnagatcctggcgaatggaagtgggatgcgaatgcacaagctccttgcccgtttcacctcgccctcctccactttccaccacgcctgtgttctgggcgctgacaaaggccaccttgttggtgtcgggcttgaggcgaatgaagccacactctctgtgcattcgcttgcgcgtgtccgggtggaaggagttgaacgagaagttcagcatgggctggcccacgtgggagatgtgaacctcctccaggtactggaagggctgcagtgtggggtaggtcccggctccaggtgggtccgacagccaggtgcccagcatccaggacagtggctccaccactgggttcatcttggggggctccatccctaagttttctaaactccggacacctcgtcaa

SEQ ID NO: 68478 - DNA, 590 bp, Homo Sapiens
gacgtttcaggagagagaactgctccaaccggctgaaagggcgagaagcgcgccgtctccttccacaggttccccctaaaggactctaaaacgtctaagtcccaatggttaaaagctgttcagagggataactggactcccactaagtattcatttctctgtagtgagcatttcaccaaagacagcttctccaagaggctggaggaccagcatcgcctgctgaagcccacggactgtgccatccgatcttccaccctgaccgagaagaagaggggggctggaggccatggacgcacccggagaaaagatgccagcaaggccacagggggtgtgaggggacactcgagtgccgacaccagcagaggagctgcaggttggtcaccgtcctcgagtggaaacccgatggccaagccagagtcccgcaggttgaagcaagctgctctgcaaggtgaagccacacccagggcggaccaggaggccgccagccaggagcaggcccagcaagctctggaacggactccaggagatggactggccaccatggtggcagggagtcagggaaaagcagaagcgtctgccacagatgctgg

SEQ ID NO: 68479 - DNA, 1574 bp, Homo Sapiens
  misc_feature (931)..(947): n is a, c, g, or t
ggggcaaaggcttaagggtgtaacctcagaatggggccctgaatcagctgtgggcgagctcctagagtatcttaattcctgcttcatctctttccattttgcagttgggcaaactgcggctcagaaagataaagaacttctccggagcgaaaaagctgctaagaatgtatccaaaactccgcacgaagtctggaacgtttttttcttagagttccagaattgagactgaagtgtacccagagacacaaagaaatacagaagtccagaatgatcaaatgagatcactacccaatgaaatgataggccgaggagccagaaattgtcctactacctgctttccaggtccagattccacgagagccttctgggctcccaccagagaccctcagtgaagactctgttgaagactttaagaccatgctagaaagcctcccggcagaggttcaggaagttctgctatgaggatgcagctggccccagggatgtcctcaggcatctctaggaccttgctggacggtggtggctgagacctgatatccacacaaaggagcagactgtggaaatgctggtgcaggagcaattccaggctgtcctgcccgaggagctcagagctcaagcacagagatgtcatcctggaatcagaatcactggctaagtcttgctgcttgcttcttgctcagcctgcatatgagaagtcaaccaagcattctcttggatgcaagatccaactgcacccatgggaaatctgaacttccactttctttgagcttgtctttggttgtaataagaatccatcaaaacccatgtctggatctctctttggctgaggcagctttatttcctacagagtttctctgtcctcttgttaggacaatcagcctgctgctttgggcttttccaagagcctatttttcatctgctggatgcctcnnnnnnnnnnnnnnnnngcactttgtgacatgctttaatatatatattttttatgtatccaaagaggtaatcaactttaactttcagaattcatgaatcttggtttggtggcatgaatgaaaggttatgtaaccccaccagtaactcatttggggtgcccttgaaatattaaagtttggtcctcaataaatatgtgctgtggtgattaatcaggttagcgcttagtagtcagcaattggagacaggtgagataattatcaggtgtagatgagagctagcgataagaactatggctgtggtgtttattgtgctgggaaataggaacagtcctggcctttgtattcaaagtcaagatttagattggacagaactgagaaaggggtcaaacggtcataagaggtaagtaacctgtacacaaagctgtttgattggctgtttcaccatgtccatcacctttgttctatagcttgcctttctgcaagagaacttactgtaaagctccccaacactactgtgttttgctttttctgcaacagaggtcatccttgtttttctgtgtgtggagacctgttctgtggctgacagctgacatagagcagtagctgtgtctgtgacaggcagggtaaacagcagctgccttcccg

SEQ ID NO: 68480 - DNA, 747 bp, Homo Sapiens
gcggcccagtgctttttcttactttgtagctacactgtgaagtaagattcaaactgttatcaactcaattgccttattcctgaggatgtagtgaaggaagaaaaagttttctggaattccgtaaactatattttaagcttatttcttcaaaattattttcatatatcacagatatatcattggaagatataatttgcatatatgttcattatcagtgttcctaatttggtattacatgtattctatttttttctgaatgatagcatgaaaagtgtcaaagtggtttgtccgctagcgtctgtctgcagaactttcaggatgactattaattcctctcagatgtcatttttgagtggtccaagcctgctgttttgaacccacagcagtggagatttgtattcttatttacagttgtgtactataaagtgtgtgttacataggttttgtgtaataattatttgtaaatattatttagatttgtatttagacatgatttatatctaatatagatacaaagtctgtgtctaaatattatttaaagaagtgatttttcattctcttggattctttccagtgtggtgccttttatatgcctcacatagtctccttgttctcctactaatattcccaagctccatatgccaattaaagaagaaacaaaaataaaagtttgtcttgcttgtgaaacattaagaagaggctgtcaggtttaataaactttttaatgaatatttcagacataacaaa

SEQ ID NO: 68481 - DNA, 647 bp, Homo Sapiens; identical to SEQ ID NO: 4629

SEQ ID NO: 68482 - DNA, 1084 bp, Homo Sapiens
  misc_feature (62)..(96): n is a, c, g, or t
  misc_feature (499)..(511): n is a, c, g, or t
  misc_feature (968)..(1015): n is a, c, g, or t
tatggcgctgcctgtttagccgaacgacgagcgcagcgagtagtgagcgaggaagcggccgnnnnnnnnnnnnnnnnnnnnnnnnnnnnnnnnnnncagtcgacggtaccggacatatgcccgggaattcggccattacggccgggagaaacagaaggacagcatttctgttagtcatttcctggaaaagtaatattttaaggggaaattatggaaacaatctaatgttcaattgctgtgctagtggtagggtttattttctgggaggtctctcctttgtgtgtctgtatgttgtgtacacacacgtgcccatctgctgtcccagaggggaggggttgtgtgtgcgagtgtatggagttagtgtggaacttaagagctggaagacagctgtagagcaaagcacatccaggagccccagttgtcactgcagtctgggcaaccccagcaatgaaaaggggtgagataacgctcattgctcttcagagagagtggttggagnnnnnnnnnnnnngtatgcttacattattgctcttttagtttgacatggtgtttgggttgtgtttttttgaaaggtctgaaaaggtgaagccccctacccaatggcaatatgaaaccttttgtgcttctcttcagccccttccctgtgtccacctttctctcctcttcccaagcctttttcctactacctttacccagtttgtgtgtttgagctctgcattcaggcagctgcaacattccagtgtttgaactgtcactgattcttgcgccctagacaagctaaccaggtttaccatctcactcccagtaatacccagctcctatctaaagccccattctgcatgagaatttggtgtttggaatgttttctgactcttggggcgggattcctcgccttatcatcctcactgtggagtaatgagggggaggagaatctttatcagaaactggttttgtgtagtaaactttcnnnnnnnnnnnnnnnnnnnnnnnnnnnnnnnnnnnnnnnnnnnnnnnnctgtgcaagacctgcatctgctgaaaatcagctttgcctttaattaaaccatgttctctccaaccaaaa

SEQ ID NO: 68483 - DNA, 1236 bp, Homo Sapiens
caagagacagaccgatcctgtggagaacgctgctggacatcgccttgggtcccctcaaacagattcccatgaatctcttcatcatgtacatggcaggcaatactatctccatcttccctactatgatggtgtgtatgatggcctggcgacccattcaggcacttatggccatttcagccactttcaagatgttagaaagttcaagccagaagtttcttcagggtttggtctatctcattgggaacctgatgggtttggcattggctgtttacaagtgccagtccatgggactgttacctacacatgcatcggattggttagccttcattgagccccctgagagaatggagttcagtggtggaggactgcttttgtgaacatgagaaagcagcgcctggtccctatgtatttgggtcttatttacatccttctttaagcccagtggctcctcagcatactcttaaactaatcacttatgttaaaaagaaccaaaagactcttttctccatggtggggtgacaggtcctagaaggacaatgtgcatattacgacaaacacaaagaaactataccataacccaaggctgaaaataatgtagaaaactttatttttgtttccagtacagagcaaaacaacaacaaaaaaacataactatgtaaacaagagaataactgctgctaaatcaagaactgttgcagcatctcctttcaataaattaaatggttgagaacaatgcataaaaaaagttgcacaagttccttattttccttaatatttcacttctatttaatacaagctgggacataaaaattctgttggggatacctgggggaagatgtgagaaactaatgctgaattcagcttatacatgatgaaaagaaaaaccagacaaaaggagcacataaatatgcatacagtgtaactgttattattttaatacccacaataagggatttttgttagcatgtttagggggaacgaggattggtgggatccttgggccacaggaatctgaggcaacggaagatatatagagtgatcgtccccctgccgaaggaacctggcacctgtcaagcagatgctgcagttcaaacttcagcttttaagatagatagctattgaaggcagagggtcagcaggaggatgtgtatttctaatctaccctggtaaagtcataggtaagactcaaaagcgggatcttattcaaaaggcaggtacttcctttgttttctgtct

SEQ ID NO: 68484 - DNA, 1299 bp, Homo Sapiens
  misc_feature (65)..(102): n is a, c, g, or t
  misc_feature (106)..(140): n is a, c, g, or t
caagagcttggtagatacgaaactccaactaattagcggggcggcttaaggtgcggcgaattctnnnnnnnnnnnnnnnnnnnnnnnnnnnnnnnnnnnnnnccgnnnnnnnnnnnnnnnnnnnnnnnnnnnnnnnnnnncagtcgacggtaccggacatatgcccgggaattcggccattacggccgggggtggaagcgatagctgagtggcggcggctgctgagtgtgttctaggggacggagtaggggaagacgtttgctctcccggaacagcctatctcattcctttctttcgattacccgtggcgcggagagtcagggcggcggctgcggcagcgaagggcggcggtggcggcggcggcagctgcagtgacatgtccagcatgaatcccgaatatgattatttattcaagttacttctgattggcgactcaggggttggaaagtcttgccttcttcttaggtttgcagatgatacatatacagaaagctacatcagcacaattggtgtggatttcaaaataagaactatagagttagacgggaaaacaatcaagcttcaaatatgggacacagcaggccaggaaagatttcgaacaatcacctccagttattacagaggagcccatggcatcatagttgtgtatgatgtgacagatcaggagtccttcaataatgttaaacagtggctgcaggaaatagatcgttatgccagtgaaaatgtcaacaaattgttggtagggaacaaatgtgatctgaccacaaagaaagtagtagactacacaacagcgaaggaatttgctgattcccttggaattccgtttttggaaaccagtgctaagaatgcaacgaatgtagaacagtctttcatgacgatggcagctgagattaaaaagcgaatgggtcccggagcaacagctggtggtgctgagaagtccaatgttcaaaattcagagcactccagtcaagcagtcaggtggaggttgctgctaaaatttgcctccatccttttctcacagcaatgaactggcaatctgaacccaagtgaaaaaacaaaattgcctgaatttgtactgtatgtagctgcactacaagcagattcttaccgtctccacaaaggtcagagattgtaaatggtcaatactgacttttagaagatattcccttggatcaagaacagctaacttcattttcagaacgtgttttaagacttagtgtgcatggtttataaaataatgtgtgtaatccttggtggcttgcctggatacagagtgtttaccgtggtgggtagaatatt

SEQ ID NO: 68485 - DNA, 984 bp, Homo Sapiens
cagtcgacggtaccggacatatgcccgggaattcggccattacggccgggggcatttgcagagtgagacaaagcggagaacgctggtgggcctgttgtggagtacgctttggactgagaagcatcgaggctataggacgcagctgttgccatgacggcccaggggggcctggtggctaaccgaggccggcgcttcaagtgggccattgagctaagcgggcctggaggaggcagcaggggtcgaagtgaccggggcagtggccagggagactcgctctacccagtcggttacttggacaagcaagtgcctgataccagcgtgcaagagacagaccggatcctggtggagaagcgctgctgggacatcgccttgggtcccctcaaacagattcccatgaatctcttcatcatgtacatggcaggcaatactatctccatcttccctactatgatggtgtgtatgatggcctggcgacccattcaggcacttatggccatttcagccactttcaagatgttagaaagttcaagccagaagtttcttcagggtttggtctatctcattgggaacctgatgggtttggcattggctgtttacaagtgccagtccatgggactgttacctacacatgcatcggattggttagccttcattgagccccctgagagaatggagttcagtggtggaggactgcttttgtgaacatgagaaagcagcgcctggtccctatgtatttgggtcttatttacatccttctttaagcccagtggctcctcagcatactcttaaactaatcacttatgttaaaaagaaccaaaagactcttttctccatggtgggggtgacagggccctaaaaaggacaatgggcatattacgaccaacacaaaggaaactattcccataaccccaagggctgaaaattaatgtaagaaaacctttaattttttgttttcccggtaccagaagccaaaacaacccaccc

SEQ ID NO: 68486 - DNA, 2757 bp, Homo Sapiens
  misc_feature (132)..(175): n is a, c, g, or t
  misc_feature (2299)..(2318): n is a, c, g, or t
ggggtggaagcgatagctgagtggcggcggctgctgattgtgttctaggggacggagtaggggaagacgtttgctctcccggaacagcctatctcattcctttctttcgattacccgtggcgcggagagtcnnnnnnnnnnnnnnnnnnnnnnnnnnnnnnnnnnnnnnnnnnnnagctgcagtgacatgtccagcatgaatcccgaatatgattatttattcaagttacttctgattggcgactcaggggttggaaagtcttgccttcttcttaggtttgcagatgatacatatacagaaagctacatcagcacaattggtgtggatttcaaaataagaactatagagttagacgggaaaacaatcaagcttcaaatatgggacacagcacgccaggaaagatttcgaacaatcacctccagttattacagaggagcccatggcatcatacttgtgtatgatgtgacagatcaggagtccttcaataatggtaaacaggggctgcacgaaatagatcgctatgcccagggaaaatgtcaacaaattgttggtagggaacaaatgtgatctgaccacaaagaaagtagtagactacacaacagcgaaggaatttgctgattcccttggaattccgtttttggaaaccagtgctaagaatgcaacgaatgtagaacagtctttcatgacgatggcagctgagattaaaaagcgaatgggtcccggagcaacagctggtggtgctgagaagtccaatgttaaaattcagagcactccagtcaagcagtcaggtggaggttgctgctaaaatttgcctccatccttttctcacagcaatgaatttgcaatctgaacccaagtgaaaaaacaaaattgcctgaattgtactgtatgtagctgcactacaacagattcttaccgtctccacaaaggtcagagattgtaaatggtcaatactgacttttatgttattcccttgactcaagacagctaacttcattttcagaactgttttaaacctttgtgtgctggtttataaaataatgtgtgtaatccttgttgctttcctgataccagactgtttcccgtggttggttagaatatattttgttttgatgtttatattggcatgtttagatgtcaggtttagtcttctgaagatgaagttcagccattttgtatcaaacagcacaagcagtgtctgtcactttccatgcataaagtttagtgagatgttatatgtaagatctgatttgctagttcttccttgtagagttataaatggaaagattacactatctgattaatagtttcttcatactctgcatataatttgtggctgcagaatattgtaatttgttgcacactatgtaacaaaacaactgaagatatgtttaataaatattgtacttattggaagtaatatcaaactgtatggtgataagtattgttttgattcttatggttaaagggaaatagagccttgcattatattcaacacagccatttgtgtgtgcacaatgcaaactaaggtattctagacctatcttagagcagcatccagtatttgctttctagataatatgcccaataacatgacctagaggggcttctgtgctgtgtagggatttaaccaacttcagtggttcagggagctcaaactatatgtaaaacaagtttagaatgtatgctatctagcccgttatctctgatccttctctaaaaccatttgaaatagcttcattgatcaacatttcataaatgcatctgtggtagaggtagaaagcagcacctttcctaattggcaaatgatcagactaatgtgtgctaatgtttttcttccatgctttcagtcagattcaactattttatcctccacagttgcttaacttggtgttggaggagggtttaagcattaagataggaagcaggaaatttgattgctctaaatttagaaattatatccctaaaaattaaaacatgaatactgggtggtaatgataattgaggcaaatgtatttattttggtgacattttgcatatatgaagattttctgaaataggaccttcaagatcctagggggttttgtttggtttttaattgtgaggaataaaaaatcttctgcccacactggcattttaaggtgactgaggtcaaacgttgtttccttaggttgaaatagcagccaaaacattcttcacgcaggggcttgggatatggctgctggcaacacattttgttgtgggctccttaatttaatgataaaatttaagctaaacacaagccaaaaatgaataggnnnnnnnnnnnnnnnnnnnncactaaacaggcaattgaaatacatggtacaaaaataagtggtaagataattgtaaaatgaaatggacagaatattcaattttccatctatgaaaatttcacaataaaaatcatagtttactttgtattataggcgtgcttggtggatctattcatcctcacataaggcaactgacaaattcctgaagttaccaatagttattttggtgaagatctttaatgcttcagaagttttgtttttgccttaatacagtataaagggggaaagagttcagaaactattttctaaagtagctaaatgacacaaaacaaatgtcaagatactgtgatgccatgccgtgcacttcatttttacacagtaaaagttgtttaaattgtcagcttattcttggtgagttagcggaaacattacatgaacttaagatgagcatatttacag

SEQ ID NO: 68487 - DNA, 958 bp, Homo Sapiens
  misc_feature (151)..(151): n is a, c, g, or t
  misc_feature (162)..(174): n is a, c, g, or t
  misc_feature (629)..(637): n is a, c, g, or t
cccaaggcccttattccgggcccagggttttccctggggaaaccaggttatgacccaggttccactttaacttaacggggcccgccggcccaaaaggaatggtttagaaaaggtttttaaggggccgaaggggggccggacagggaggggnttggaaaaaannnnnnnnnnnnnaaatttccaataagtgcaatatttattaaacaatgtcttcagttgttttggtacatagtgtgcaacaaattacaatattgtgcagccacaaattatatgcggagtatgaagaaactattaatcagatagtgtaatctttccatttataactctgcaaggaagaactagcaaatcagatcttacatataacatctcactaaactttatgcatggaaagtgacagacactgcttgtgctgtttgatacaaaatggctgaacttcatcttcagaagactaaacctgacatctaaacatgccaatataaacatcaaaacaaaatatattctaaccaaccacgggaaacagtctggtatcaggaaagcaacaaggattacacacattattttataaaccagcacacaaaggtttaaaacagttctgaaaatgaagttagctgtcttgagtcaagggaatnnnnnnnnngtcagtattgaccatttacaatctctgacctttgtggagacggtaagaatctgttgtagtgcagctacatacagtacaattcaggcaattttgttttttcacttgggttcagattgcaaattcattgctgtgagaaaaggatggaggcaaattttagcagcaacctccacctgactgcttgactggagtgctctgaattttaacattggacttctcagcaccaccagctgttgctccgggacccattcgctttttaatctcagctgccatccccggccgtaatggccgaattcccgggcatatgtccggtaccgtcgactg

SEQ ID NO: 68488 - DNA, 441 bp, Homo Sapiens
agctgccatcgtcatgaaagactgttctacattcgttgcattcttagcactggtttccaaaaaccggaattccaagggaatcagcaaattcctaagagaataatgaggcacaattaacactgaaaaatctttttcactaattcttactgcatttctaccatccataatgaagcgtgaggaactaagttcattggatcccaacagatgctacaccaattgtcactgtcacagtattctagtgcacatatttttaaaaggctgtggccttactgttactgcagaacccatacataattcaacaccttcaaatgtcagtatgaaaattaaactttaaacataccttcgctgttgtgtagtctactactttctttgtggtcagatcacatttgttccctacccaccatttgttgacattttcactggcataacgatcgagacata

SEQ ID NO: 68489 - DNA, 417 bp, Homo Sapiens
tatagaatcgagccggacctatgtctcgatcgttacattcttagcactggtcaaaaacggaattccaagggaatcagcaaattcctaagagaataatgaggcacaattaacactgaaaaatctttttcactaattcttactgcatttctaccatccataatgaagcgtgaggaactaagttcatgggatccaaacagatgctacacaaatggtcactgtcacagtattctagtgcacatatttttaaaaggctgtggccttactgttactgcagaacccatacataattcaacaccttcaaattcagtatgaaaattaaactttaaacataccttcgctgttgtgtagtctactactttctttgtggtcagatcacatttgttccctaccaacaattggttgacattttcactggca

SEQ ID NO: 68490 - DNA, 706 bp, Homo Sapiens
ggggcccacatataaatcctcaccctgggagcctggctgccttgctctccttcctgggtctgtctctgccacctggtctgccacagatccatgatgtgcagttctctggagcaggcgctggctgtgctggtcactaccttccacaagtactcctgccaagagggcgacaagttcaagctgagtaagggggaaatgaaggaacttctgcacaaggagctgcccagctttgtgggggagaaagtggatgaggaggggctgaagaagctgatgggcagcctggatgagaacagtgaccagcaggtggacttccaggagtatgctgttttcctggcactcatcactgtcatgtgcaatgacttcttccagggctgcccagaccgaccctgaagcagaactcttgacttcctgccatggatctcttgggcccaggactgttgatgcctttgagttttgtattcaataaactttttttgtctgttgataatattttaattgctcagtgatgttccataacccggctggctcagctggagtgctgggagatgagggcctcctggatcctgctcccttctgggctctgactctcctggaaatctctccaaggccagagctatgctttaggtctcaattttggaatttcaaacaccagcaaaaaattggaaatcgagataggttgctgacttttattttgtcaaataaagatatt

SEQ ID NO: 68491 - DNA, 746 bp, Homo Sapiens
gcgcagatccatcaaaatggactctgtcacctgtcattcccttctggcagacactaaaatgggagcctgccctcagggggtgtcccaagtgccatcagaggaggcttggtgactcccagacacaagggaagctttagcgtctgccctcagggtgagatggaggtatcgcctccggcctcagggaaccacagtctgagggggagatgcagcccctgccttcccattcagagaggggttttgtgaggtggcttgggggcatagggcagaagtggatcctacaggctgagctaaggccccaagagcctcagcagtgtacccatcacctggcacctctgcagccacagatccatgatgtgcagttctctggagcaggcgctggctgtgctggtcactaccttccacaagtactcctgccaagagggcgacaagttcaagctgagtaagggggaaatgaaggaacttctgcacaaggagctgcccagctttgtgggggagaaagtggatgaggaggggctgaagaagctgatgggcagcctggatgagaacagtgaccagcaggtggacttccaggagtatgctgttttcctggcactcatcactgtcatgtgcaatgacttcttccagggctgcccagaccgaccctgaagcagaactcttgacttcctgccatggatctcttgggcccaggactgttgatgcctttgagttttgtattcaataaactttttttgtctgttgataataaa

SEQ ID NO: 68492 - DNA, 651 bp, Homo Sapiens
gcttgtctgctttgcagaaggcagtttccccaataaagaagttctgatcaaacaccagcagctgtcagacctgcacaagcaaaacctggaaatccaccggaagataaaacagtctgagcaggagctagcctatctggaaaggagagaacgagagggaaagtttaaaggaagaggaaatgatcccagggaaaagctccagtcttttgactctccagaaaggaaacggattaagtactccagggaaactgacaggaagtgatggtgtctgcttcttttgcagtgatcgtaaacttgttgataaagaagatatcgacactagcagcaaaggaggctgtgtccaacaggctactggctggaggaaagggacaggcctgggatatggccatcctggattggcttcatcagaggaggctgaaggccggatgaggggccccagtgttggagcctcaggaagaaccagcaaaagacagtccaacgagacttaccgagatgctgttcgaagagtcatgtttgctcgatataaagaactcgattaagaaaggagacaagttccatgggatacaacctccctcttgttttgtttgtctctccttttcttttgttactgttcttgctgctagaacttttttaaataaactttttttcaatgtg

SEQ ID NO: 68493 - DNA, 1569 bp, Homo Sapiens
  misc_feature (1488)..(1488): n is a, c, g, or t
  misc_feature (1514)..(1514): n is a, c, g, or t
  misc_feature (1534)..(1534): n is a, c, g, or t
ggctaggtcgaggcctggtgttaattcggcacgaggcacgatctaggactgatcaggattttaggggcagagagatgggatcttgtatggaatttaaagatagggagatgccccctgtggatccaaatatttggattacattcagccctctacacaagatagagaacattctggtatgaatgtgaacaggagagaagaatccacacatgaccatacgatagaaaggcctgctttggcattcagaagggagaatttgagcattcagaaacaagagaaggagaaacacaaggtgtagcctttgaacatgagtctccagcagactttcagaacagccaaagtccagttcaagaccaagataagtcacagctttctggacgtgaagagcagagttcagatgctggtctgtttaaagaagaaggcggtctggactttcttgggcggcaagacaccgattacagaagcatggagtaccgtgatgtggatcataggctgccaggaagccagatgtttggctatggccagagcaagtcttttccagagggcaaaactgcccgagatgcccaacgggaccttcaggatcaagattataggaccggcccaagtgaggagaaacccagcaggcttattcgattaagtggggtacctgaagatgccacaaaagaagagattcttaatgcttttcggactcctgatggcatgcctgtaaagaacttgcagttgaaggagtataacacagggaactctaatgatccaggacaaagaagttaccctggagtatgtatcaagcctggatttttggtactgcaaacgatgtaaggcaaacattggtgggcaccgatcttcctgttcattctgcaagaacccaagagaagtgacagaggccaagcaagaattaataacctaccctcagcctcagaaaacatccataccagcaccattggaaaaacagcccaaccagcccctaagaccagctgataaggaacctgaacccaggaagagggaagaaggccaagagtcacgcttaggacatcaaaagagagaagcagaaaggtatctgcctccttctcgaagggaagggccaactttccgaagagaccgagagagggagtcatggtctggagagacacgccaggatggagagagcaaaactatcatgctaaagcgtatctatcgttccacaccacctgaggtgatagtggaagtgctggagccctatgtccgccttactactgccaacgtccgtatcatcaagaacagaacaggccctatggggcatacctatggctttattgacctcgactcccatgcggaagctcttcgtgtggtgaagatcttacagaaccttgatccgccatttagcattgatgggaagatggtagctgtaaacctggccactggaaaacgaagaaatgattctgggggacattctgaccacatgcattactatcagggtaaaaatatttcccgagataggaggggaggtggcanaaattcagactgggtcttcagatacnaaatcgacaagggacacagntcatcaatctaactggctacatatatggattctgc

SEQ ID NO: 68494 - DNA, 1728 bp, Homo Sapiens
  misc_feature (1693)..(1693): n is a, c, g, or t
gcagtgtaggaagatggtagctgtaaacctggccactggaaaacgaaggagtgtctggaccacccaacctgcttgctgtctagaaatgattctggggaccattctgaccacatgcattactatcagggtaaaaaatatttccgagataggaggggaggtggcagaaattcagactggtcttcagatacaaatcgacaaggacaacagtcatcatctgactgctacatatatgattctgctactggctactattatgaccccttggcaggaacttattatgaccccaatacccagcaagaagtctatgtgccccaggatcctggattacctgaggaagaagagatcaaggaaaaaaaacccaccagtcaaggaaagtcaagtagcaagaaggaaatgtctaaaagagatggcaaggagaaaaaagacagaggagtgacgaggtttcaggaaaatgccagtgaagggaaggcccctgcagaagacgtctataagaagcccctgcctcctactgtgaagaaggaagagagtccccctccacctaaagtggtaaacccactgatcggcctcttgggtgaatatggaggagacagtgactatgaggaggaagaagaggaggaacagacccctcccccacagccccgcacagcacagccccagaagcgagaggagcaaaccaagaaggagaatgaagaagacaaactcactgactggaataaactggcttgtctgctttgcagaaggcagtttcccaataaagaagttctgatcaaacaccagcagctgtcagacctgcacaagcaaaacctggaaatccaccggaagataaaacagtctgagcaggagctagcctatctggaaaggagagaacgagagggaaagtttaaaggaagaggaaatgatcgcagggaaaagctccagtcttttgactctccagaaaggaaacggattaagtactccagggaaactgacagtgatcgtaaacttgttgataaagaagatatcgacactagcagcaaaggaggctgtgtccaacaggctactggctggaggaaagggacaggcctgggatatggccatcctggattggcttcatcagaggaggctgaaggccggatgaggggccccagtgttggagcctcaggaagaaccagcaaaagacagtccaacgagacttatcgagatgctgttcgaagagtcatgtttgctcgatataaagaactcgattaagaaaggagacaagttccatgggatacaacctccctcttgttttgtttgtctctccttttcttttgttactgttcttgctgctagaacttttttaaataaactttttttccatgcccgaaaccccatccccccttttcccttttttccttgccggcccgctttcgggccctcggaaaaggttttcctgaaccatttgcgtttgggcgccgccgggcccccagtaaggcaaagtggaaccttgggtccctacccggttttccccaagaatgaccctgggttcatgaccctaagcgcttgtggatttctcccccaaataaaaaaacccgcccgcgcgggcaaaccgaaggcgggctcctgaaacaaaattcccaccatgggaggttttctggaggggccatttacctgggatctccccccccactggaagccccccatgtgggacctcccgcatttccaaatttttggntccccgccccccgggccacttatattttttatttt

SEQ ID NO: 68495 - DNA, 1188 bp, Homo Sapiens
ccagtgttgaatcatgctatatttcccatcatcccagattgctaaatgttctttccaagaagtctgaatgaattattatatacatttgctatcatacatgacagttgtgtcattattagagatttcagtaattaaaatgggaaacagaagcctaagttatttaccttatcaaaaccacgttccttggaaccacattattatgatggtttttgtgctcttgtacgttggatgtcttaagctgagtacagtttaggggatcctttctaatgacaggaaggcactgctttcctcaacactgtgatctgacctgtgacaagtctgtactatccactatgtaaatggctcacaagtcaattgcaaacaaactgaatgtacaaatcttagtgctggtgctgaaatctcttcagaatagtcatcatgatttaaaagtttgtttaaaaatttgcaagcatcaagtgtcaatcaaaactgaagatgaaacactaatgaatgttgaattctcatgcttttaggtgtacttcctttttagaattttcagttttctgctatttttaccgtaactatttcgtttaaatttgtttcatttaagtttcctacatgctaacttcgtttgtgcgattgaaataaaattgcagtatatatatgttgcttgtttgtgacacttagataatcttctgaaataatttgttttaaagtaagttatattggatgtgaaaaacaccttttaaagtccaagactttactacttaaaagtttacatgtcacgtcactattctttacagatttcatagaagtcgtgaatactaagtaatgtatacaaaagaaatatgtgatgatgtgtctactttttgtttgaaataactgttgggtgttccctcttcttattttctctctgcccaccttgacacagtaacttcctcttatagtcaagatgatgattaagtgtttaatttttattccattttgttctgcaacacgttcagatacttaaaactcattcatgcagttagaattatcctttatgtagtctgcatggtaaaggacattgtgtggtaaagggcattattgagtaatgaattttaagtatagcaaaatatgtatagtgtttatacatgatgctgatttcttaaaacctacatataagcagtagtactttttctctattataaagtattaattttgagttcc

SEQ ID NO: 68496 - DNA, 616 bp, Homo Sapiens
  misc_feature (53)..(53): n is a, c, g, or t
  misc_feature (225)..(240): n is a, c, g, or t
aagaattcggcacgaggggtctgcttccttcattttacttccccttctgtttntgaaaggcagtttcgccaagcttaatgcaagaatatctgactgtttagaagaaagatattgccacaatctctggatggttttccagggttgtgttattactgagcttcatctttccagaatgagcaaaacactgtccagtctttgttacgattttgtaataaatgtgtacannnnnnnnnnnnnnnnggacatcacatgaataaaggtatgtatgtacgaatgtgtatatattatatatatgacatctattttggaaaatgtttgccctgctgtacctcatttttaggaggtgtgcatggatgcaatatatgaaaatgggacattctggaactgctggtcaggggactttgtcgccctgtgcactaaaagggccagattttcagcagccaaggacatccatacccaagtgaatgtgatgggacttaaaagaagtgaactgagacaattcactctggctgtttgaacagcagcgtttcataggaagagaaaaaaagatcaatcttgtattttctgaccacataaaggcttcttctctttgtaataaagtagaaaagctctcctc

SEQ ID NO: 68497 - DNA, 1106 bp, Homo Sapiens
  misc_feature (45)..(79): n is a, c, g, or t
aaccggaccgagcgcagcgacgtcattgagcgaggaagcggccgnnnnnnnnnnnnnnnnnnnnnnnnnnnnnnnnnnncagtcgacggtaccggacatatgcccgggaattcggccattacggccgggatatttggggtttttccctaattttttaaacaaaaattacattacaagatccaggttcttcccccccacactcaatcaagccagccctctcctcttctgtcacgtaaaggatatttggcacactcatgcgtcattcattcacaaaacacaaacccaggactttctgcctaaggcagaacacaagactcacagcagcaccgaagcgcatctgccgtccgggccctgccaggcttgccaggctgccagtggtaactgtggacctactgcgtgccacgtgttttcatagactcatcccatgctggcaacagccctgcaaggggcttggctctgccacagggcaggagaggaagttgtagcgcctagcgagagttccagccccagacgcccacctgtgcctcagggcaccgcctgccgagcagagaaggcacagcagccgtcagagtccatgagaggtgaaaccacacagcagggatgtccaatatcagaactattaatatcaataaaagtataaccttcccaggtctatgcccaagagaattgaaaacatccatccacacaatacctgtgctcccgcgttcatagcagcattactcaaaagtcaaacggtagcaacaacccaaatgtccatccacagatgaattaagacatgaagtgtgttctgtccatacaatggaatattatttggccataaaaaggaaggaaattctgacgcatgccacagcctgagtgaatcctacaaatattacgctaagtgaaagaagccaatcacgagtttatgtgaaatgtccagaataggcaaatctgtgtatcagagacaaagcacattggtggttgccaggtactggaggaagagagaagaggcatgacagctaacagggacgggctttctttggaagatgatgaaattgtggaatgatggttgcacaactttgtgaatatactagaaaccaatgaattaaaaactttggaagatgaaa

SEQ ID NO: 68498 - DNA, 576 bp, Homo Sapiens
gtcaagagacaagacacaggtaatgcacgacattgattgctgcattttaccttcaaaatatttgtccttattgactgggtctccttaattaatgtacacatgtcattagaatgcagacggaggggactcaccatgaatatctggggttgattcccagatgtgtgttgcttctctattgcaagcagattccctgttggatttacttcggatttattcccttttaaagaatttttgcccatatctggaagggcactatatttttgggaggagccatagatacctggttatcctatttttaaacaaaatgtagacaaagtgaactctattttgattattgagaaaggagtagttttctatccctctaagagtatacttgaatcagacattttaaggatgtcactatggcactgttgtcatttccaaattcctagaaaagtttgttttactttgtttttattctgttaatgcattctttcttctctttacttcctttcttaccagtacactcctatctcaactctgtttatttgatgagttctgtcccgtaaatcatatttccccctcgtgccgaattct

SEQ ID NO: 68499 - DNA, 1322 bp, Homo Sapiens
  misc_feature (55)..(55): n is a, c, g, or t
  misc_feature (68)..(68): n is a, c, g, or t
  misc_feature (106)..(106): n is a, c, g, or t
  misc_feature (211)..(211): n is a, c, g, or t
  misc_feature (221)..(221): n is a, c, g, or t
  misc_feature (1142)..(1142): n is a, c, g, or t
  misc_feature (1168)..(1187): n is a, c, g, or t
caaagcaacgctgtccccggggtgcggatcataatcactggccaccgtttccgantgaaagcgcatgnggcacgccattattgagtgctcatcatagcaccccagnttacactatgctcccgctctatggtgttagatttgagcggaaacatttcacacagaaacagctgtacatgatacgaattatacgactcactatagggatttgccntcgagcccangaatcgccacgaggccagaattcagatcatgaatgactgacagaatatttgttgggcagtcctgatttaaaactaagactggcttgtggttaaatgaatatgttcagtttttgaattttaatagtaactccaattcagtaaatggtatcactgtttaccccttttaaagatatgattagacttcgttagtaatgttcaacttttcacaaagatggtgagtgccatcttaaaacttactggagattggttttatatttagatttatataactggttatgtgaatatatttaaatactggggaaattgcttcactgtcttagaaccaagcaagattcacctgtgttttgtgttcatgttcatttgcctcttaaaggcaagggttgaagataaataaggtagcaatgtctatagttttggccttaactatgccaatctaattataattccctgtatttaaaatggtttcttttacttattgaaaggcattttagtgtggtttatgtgtaatattaaagattattcaacacctctcacatcttacagatctataaggtcacatgcttttaaaatagtagcaagttaaacttcactcttgaattctttacaatctaagtcaaactaagttataatttaggattgtctttaaacagccattcagaaacaaaactgtagaactgtgtatttgattgggaatggtgcttttgccaacttaaaaggattaaagtaacggagatatacacaaattttaaaattatgtgtgatcacaagactaaagataattaaaaagaaaaccacagatcatgatgtgaaagcccagatccaagaataaagaaagcatccccccccaacagcaaaagctcatcttttgcaggcaagcagcctggaaaatggccccacatctttctgactaaaaaattccanattgtggccgacccctgcaccctctnnnnnnnnnnnnnnnnnnnntttttggtttagtgcccccgggcccccgcgcatttcacaaatgacccccggggaatagacttttttcttcccgacaaataaaaaacccgggtgttggaccccaaaacgtgggggtgtatatctaccccacaacaa

SEQ ID NO: 68500 - DNA, 1322 bp, Homo Sapiens
  misc_feature (42)..(83): n is a, c, g, or t
  misc_feature (87)..(121): n is a, c, g, or t
  misc_feature (1213)..(1213): n is a, c, g, or t
  misc_feature (1243)..(1243): n is a, c, g, or t
caagatctatacatcactatagggcgctagtgcgggcttttnnnnnnnnnnnnnnnnnnnnnnnnnnnnnnnnnnnnnnnnnnccgnnnnnnnnnnnnnnnnnnnnnnnnnnnnnnnnnnncagtcgacggtaccggacatatgcccgggaattcggccattacggccgggggcgggagcgcggagcgagtttggttgcacttacaccggtacttaagcgcggaccggcgtgtccttggacttagagagtggggacgtccggcttcggagcgggagtgttcgttgtgccagcgactaaaaagagaattaaatatgggtgatgttgagaaaggcaagaagatttttattatgaagtgttcccagtgccacaccgttgaaaagggaggcaagcacaagactgggccaaatctccatggtctctttgggcggaagacaggtcaggcccctggatactcttacacagccgccaataagaacaaaggcatcatctggggagaggatacactgatggagtatttggagaatcccaagaagtacatccctggaacaaaaatgatctttgtcggcattaagaagaaggaagaaagggcagacttaatagcttatctcaaaaaagctactaatgagtaataattggccactgccttatttattacaaaacagaaatgtctcatgacttttttatgtgtaccatcctttaatagatctcatacaccagaattcagatcatgaatgactgacagaatattttgttgggcagtcctgatttaaaactaagactggcttgtggttaaatgaatatgttcagtttttgaattttaatagtaactccaattcagtaaatggtatcactgtttaccccttttaaagatatgattagacttcgttagtaatgttcaacttttcacaaagatggtgagtgccatcttaaaacttactggagattggttttatatttagatttatataactggttatgtgaatatatttaaatactggggaaattgcttcactgtcttagaaacaagcaagaattcacctggggttttgtggtcatgttcatttgccctcttaaaagcaaagggttgaagaataaataaaggtagaaatggtctataagttttgggccttaacctatgccaaatcctaattataaattccctggaatttaaaaaggggtttctttttaccttattggaaaggcgaattttanttggtggccttatggtgtaaaattttaaangaattaattcaaacaaccttcttaacaatctttacagaatcttaataagaggtcacaatgccttttttaaaaaataaag

SEQ ID NO: 68501 - DNA, 1161 bp, Homo Sapiens
  misc_feature (81)..(115): n is a, c, g, or t
aagactgatgatcatatagggcgctagctcgtccgtgccgaacgaccgagcgcaggaagtagtgagcgaggaagcggccgnnnnnnnnnnnnnnnnnnnnnnnnnnnnnnnnnnncagtcgacggtaccggacatatgcccgggaattcggccattacggccggggacttagagagtggggacgtccggcttcggagcgggagtgttcgttgtgccagcgactaaaaagagaattaaatatgggtgatgttgagaaaggcaagaagatttttattatgaagtgttcccagtgccacaccgttgaaaagggaggcaagcacaagactgggccaaatctccatggtctctttgggcggaagacaggtcaggcccctggatactcttacacagccgccaataagaacaaaggcatcatctggggagaggatacactgatggagtatttggagaatcccaagaagtacatccctggaacaaaaatgatctttgtcggcattaagaagaaggaagaaagggcagacttaatagcttatctcaaaaaagctactaatgagtaataattggccactgccttatttattacaaaacagaaatgtctcatgacttttttatgtgtaccatcctttaatagatctcatacaccagaattcagatcatgaatgactgacagaatattttgttgggcagtcctgatttaaaactaagactggcttgtggttaaatgaatatgttcagtttttgaattttaatagtaactccaattcagtaaatggtatcactgtttaccccttttaaagatatgattagacttcgttagtaatgttcaacttttcacaaagatggtgagtgccatcttaaaacttactggagattggttttatatttagatttatataactggttatgtgaatatatttaaatactggggaaattgcttcactgtcttagaaccaagcaagattcacctgtgttttgtgttcatgttcatttgcctcttaaaggcaagggttgaagataaataaggtagcaatgtctatagttttggccttaactatgccaatctaattataattccctgtatttaaaatggtttcttttacttattgaaaggcattttagtgtggtttatgtgtaatattaaagattattcaacacctctca

SEQ ID NO: 68502 - DNA, 1048 bp, Homo Sapiens
  misc_feature (51)..(51): n is a, c, g, or t
  misc_feature (82)..(120): n is a, c, g, or t
  misc_feature (123)..(157): n is a, c, g, or t
ctttggaaatataccgaaagcctccaacccttgaaaattaaaggggtgganccggaccttaaaggccgttacgggtcgaagnnnnnnnnnnnnnnnnnnnnnnnnnnnnnnnnnnnnnnncgnnnnnnnnnnnnnnnnnnnnnnnnnnnnnnnnnnncagtcgacggtaccggacatatgcccgggaattcggccattacggccggggagagagtggggacgtccggcttcggagcgggagtgttcgttgtgccagcgactaaaaagagaattaaatatgggtgatgttgagaaaggcaagaagatttttattatgaagtgttcccagtgccacaccgttgaaaagggaggcaagcacaagactgggccaaatctccatggtctctttgggcggaagacaggtcaggcccctggatactcttacacagccgccaataagaacaaaggcatcatctggggagaggatacactgatggagtatttggagaatcccaagaagtacatccctggaacaaaaatgatctttgtcggcattaagaagaaggaagaaagggcagacttaatagcttatctcaaaaaagctactaatgagtaataattggccactgccttatttattacaaaacagaaatgtctcatgacttttttatgtgtaccatcctttaatagatctcatacaccagaattcagatcatgaatgactgacagaatattttgttgggcagtcctgatttaaaactaagactggcttgtggttaaatgaatatgttcagtttttgaattttaatagtaactccaattcagtaaatggtatcactgtttaccccttttaaagatatgattagacttcgttagtaatgttcaacttttcacaaagatggtgagtgccatcttaaaattactggagatggggtttatatttagatttatataacctggttatgtgaagtatatttaatactgcggaaattgcttagtggtttagaaacaagcaagattaccggggattgggttcggtcattggctcttaaggcaggtggagatatta

SEQ ID NO: 68503 - DNA, 901 bp, Homo Sapiens
accgtgcctttgggtgtttaagaggccaagggaaaagccaatttccccccccggtaatttaaaatattatttgcccattaacccaggtaatagaaaatgtaaaatataaaaacccaatctcccaggtaagtttaaagatggcactgcaccatcctttgggaaaaagtggaacattacctaacgaagtctaatcatatctttaaaaggggtaaacagtgattaccatttactgaattggagttactattaaaattcaaaaactgaacatattcatttaaccacaagccagtcttagttttaaatcaggactgcccaacaaaatattctgtcagtcattcatgatctgaattctggtgtatgagatctattaaaggatggtacacataaaaaagtcatgagacatttctgttttgtaataaataaggcagtggccaattattactcattagtagcttttttgagataagctattaagtctgccctgtcttccttcttcttaatgccgacaaagatcatttttgttccagggatgtacttcttgggattctccaaatactccatcagtgtatcctctccccagatgatgcctttgttcttattggcggctgtgtaagagtatccaggggcctgacctgtcttccgcccaaagagaccatggagatttggcccagtcttgtgcttgcctcccttttcaacggtgtggcactgggaacacttcataataaaaatcttcttgcctttctcaacatcacccatatttaattctctttttagtcgctggcacaacgaacactcccgctccgaagccggacgtcccggacgcgtggtcgacgatatcccgggaattccggaccggtaccagcctgctttgtgtacaaactggttctatattgactatcga

SEQ ID NO: 68504 - DNA, 893 bp, Homo Sapiens
  misc_feature (823)..(823): n is a, c, g, or t
ggggagagagtggggacgtccggcttcggagcgggagtgttcgttgtgccagcgactaaaaagagaattaaatatgggtgatgttgagaaaggcaagaagatttttattatgaagtgttcccagtgccacaccgttgaaaagggaggcaagcacaagactgggccaaatctccatggtctctttgggcggaagacaggtcaggcccctggatactcttacacagccgccaataagaacaaaggcatcatctggggagaggatacactgatggagtatttggagaatcccaagaagtacatccctggaacaaaaatgatctttgtcggcattaagaagaaggaagaaagggcagacttaatagcttatctcaaaaaagctactaatgagtaataattggccactgccttatttattacaaaacagaaatgtctcatgacttttttatgtgtaccatcctttaatagatctcatacaccagaattcagatcatgaatgactgacagaatattttgttgggcagtcctgatttaaaactaagactggcttgtgggtaaatgaatatgttcagtttttgaattttaatagtaactccaattcagtaaatggtatcactgcttacccccttttaaagatatgattgagaccttcgttaggaatgggtcaaccttttccacaaagatgcgggaggtggccatctttaaaaccttacctggaagaattggggtttaatagtttagaatcttatattaacctggggttatggtggaatataattttaaaatacctgggggggaagaattggcctctcccttgggccttaancgaaccccaaggcacaggaatttccaccctgggggtgtttttggggggtccaatggggttccattttggg

SEQ ID NO: 68505 - DNA, 827 bp, Homo Sapiens
  misc_feature (52)..(142): n is a, c, g, or t
aggagttcaagactgtgggcaacatggcaaaaccccatctctacaaaataannnnnnnnnnnnnnnnnnnnnnnnnnnnnnnnnnnnnnnnnnnnnnnnnnnnnnnnnnnnnnnnnnnnnnnnnnnnnnnnnnnnnnnnnnnaggggctgcggagacagagccctccggccagcggggagtggcctgattccaccaagagaaggcccaggaggaagaagagaaaaagatgctgtggttactagtgccaaaaatgctggcaggaacaaggaggagaagacaatcataaaaaagctgttcttttttcgatcggggaaacagacctagatccaaggccacaagtaaggctatggctctgattctagaagacaaccttccaagatgcctggcaaaaccacctccctgtgccacacagacacactaggcctgtgtatttatttccccttcaaagcagactgaggagggaggagacgaggttctcttggcatcactttctccctggctgcagaactagacacccttgaagatttggcctgggccagtgagactgaaatcaagaaaaacagaagggatgtgcagggtgggggggtccacttcctgctcccatgtcaacccccagggcctccagtgtgcagacgcgtgtcctactcatctgctcccacggatgaccctggtcttcaatggttagcagaagggagaaaagaaagcaggaaaatgtgctattgagattccagtggtgacttcactgatatttagtgaatatttgatttagccaacatgcctttctttatgtgattttgtattaaagtaaaatgatttttatactttc

SEQ ID NO: 68506 - DNA, 1500 bp, Homo Sapiens
  misc_feature (323)..(370): n is a, c, g, or t
  misc_feature (1442)..(1459): n is a, c, g, or t
tcacccatgaacttccccgttcctcttctcggctgcctccttttccgttgtcccttcgcgccccaaaccacatcctggagcgcactctccagcgtggctggcagcggggacggtgcgccggggcgcaggcccaagagtcgcgtgcgcggccccttgcaccatccccccgggcccacccccgggccgcgctgattgggcaggtagggactctgcccagcggaaagttttgggtgccgggaggaagtctaacctttgggagactccaagacagcagctccgaggtcggcgggggtctgggtggccatggaggagccccctgtgcnnnnnnnnnnnnnnnnnnnnnnnnnnnnnnnnnnnnnnnnnnnnnnnnttgggcccgagggggcgctgggcaagagccccttccagctgaccgccgaggacgtgtatgacatctcctacctgttgggccgcgagcttatggccctgggcagcgacccccgggtgacgcagctgcagttcaaagtcgtccgcgtcctggagatgctggaggcgctggtgaatgagggcagcctggcgctggaggagctgaagatggagagggaccacctcaggaaggaggtggaggggctgcggagacagagccctccggccagcggggaggtgaacctgggcccaaacaaaatggtggttgacctgacagatcccaaccgaccccgcttcactctgcaggagctaagggatgtgctgcaggaacgcaacaaactcaagtcgcagctcctggtggtgcaggaagagctgcagtgctacaagagtggcctgattccaccaagagaaggcccaggaggaagaagagaaaaagatgctgtggttactagtgccaaaaatgctggcaggaacaaggaggagaagacaatcataaaaaagctgttcttttttcgatcggggaaacagacctagatccaaggccacaagtaaggctatggctctgattctagaagacaaccttccaagatgcctggcaaaaccacctccctgtgccacacagacacactaggcctgtgtatttatttccccttcaaagcagactgaggagggaggagacgaggttctcttggcatcactttctccctggctgcagaactagacacccttgaagatttggcctgggccagtgagactgaaatcaagaaaaacagaagggatgtgcagggtgggggggtccacttcctgctcccatgtcaacccccagggcctccagcgtgcagacgcgtgtcctactcatctgctcccacggatgaccctggtcttcaatggttagcagaagggagaaaagaaagcaggaaaatgtgctattgagattccagtggtgacttcactgatatttagtgaatatttgatttagccaacatgcctttctttatgtgattttgtattaaagtaaaatgatttttatactttcnnnnnnnnnnnnnnnnnngcctacagccgcggccgcaagcttattccctttagtgaggg

SEQ ID NO: 68507 - DNA, 669 bp, Homo Sapiens
  misc_feature (56)..(69): n is a, c, g, or t
ggggccagaggtagccggagtgtgtcacagcccctcagatgcctttccttccaccnnnnnnnnnnnnnnaagaatcccaaataactcactgaagtgtctcaaaggcgaacaagttttaccaaaatgaatcctttttcagttaacagatcaaatggatgagttctgagcctctcaagttcctttccccagttagagtggggaactgggcaagtgttaactgtgggactcactgcagcgtcctatcctaaaggcacgagaagacggaaatgcaacctgcggagctgggcttggttcccaggtcacagtttggcccccgctacaggatgctgccctgctcagagagagatttaatagggagctgaaggaatcgttagggggccagggagatgtgactgaggctggctttccacgtgaatgagacggggtcggtggagggtttggtgctacagccagtcagaagatttgcaaatgcgaacacattcctgtgtgaggcacgttaccctttgtcagttattgtgaatatgtgtattttaagcaataagattcagctggtcagacttttctgggcagtctcagtgacgcatttcctgtgctgtgattgttctgaagacagagtggctctaaccactgtgagaagcccaaataaaaattgatcccaaaaatgctccc

SEQ ID NO: 68508 - DNA, 1120 bp, Homo Sapiens
  misc_feature (106)..(129): n is a, c, g, or t
  misc_feature (131)..(254): n is a, c, g, or t
  misc_feature (271)..(397): n is a, c, g, or t
gaaggcagacatctccgcagccactcctgggccttttatgtgccgagttaccccacttgccttgggcgtgtccactgagccttccccagccagtcttgttctcaannnnnnnnnnnnnnnnnnnnnnnngnnnnnnnnnnnnnnnnnnnnnnnnnnnnnnnnnnnnnnnnnnnnnnnnnnnnnnnnnnnnnnnnnnnnnnnnnnnnnnnnnnnnnnnnnnnnnnnnnnnnnnnnnnnnnnnnnnnnnnnnnnnngtgcatgccaccatggnnnnnnnnnnnnnnnnnnnnnnnnnnnnnnnnnnnnnnnnnnnnnnnnnnnnnnnnnnnnnnnnnnnnnnnnnnnnnnnnnnnnnnnnnnnnnnnnnnnnnnnnnnnnnnnnnnnnnnnnnnnnnnnaatcgtgcccagccttgttcttaattttgtatcatccagtcatcgctaatattacacgcaccttctcacttaatcctcacgacaagcctgtgaggcagatgctcattgttcccatcttgatgaaacttgagtctcagggaagtgaagtgacttgcccagggtcactcaggtagagttgagattcaaacccacatgtggctccaaagtctgcatctggatttgggggtgttttttggcatggcaccctcacctctctccctgcctgttttccccaaagtggaaaggaaggcctttcaaaccagagtgtctcactcccctctgacctccagaccagatggggcatgagccagccagctcagccaggctccctgtgtcctgggaggaagtgtccccatcccccatgccccttatggggagggagggcgtctgatgctctctctctgcctcccccccatcctgtcaggcacaggtgacgggggcagcccatgcgagcccttctcctgctgctctgggagggccagttccacattgagccagcctggtcccatggaaaatgatggcctgggctttctgaggccttatctgatgcctctgcagttcatgtcccccaccaggcctcgaggctcagggtgggagagggccccgggctgccctgtcactcctctaacacttccctcccctatccccaacatgccctgtaataaaattagagaagactaaaaa

SEQ ID NO: 68509 - DNA, 648 bp, Homo Sapiens
  misc_feature (473)..(473): n is a, c, g, or t
  misc_feature (478)..(478): n is a, c, g, or t
  misc_feature (526)..(526): n is a, c, g, or t
  misc_feature (556)..(556): n is a, c, g, or t
tgcccccgcggggtctgtgtccccgggaggagttggctgcgtttggagatccctcggcctggtattcgtcgcgtctccctgcttgttgctctccacgtttagccccatccgacttctggaagcccagggagagcaccagattctcaaaacaatgcagactttggagccacatgtgggtttgaatctcaactctacctgagtgaccctgggcaagtcacttcacttccctgagactcaagtttcatcaagatgggaacaatgagcatctgcctcacaggcttgtcgtgaggattaagtgagaaggtgcagctgcaaagacatcaagctggacccatcgaggatttcggattcagccatcatggggctgctgccggggaagccactgcccctcctttctcctcagcactggggttataaaaaaatacctacaaaccatgagaaagtttgtgtaaaaacacttttctgcacatatnaaaanagaaactggccgtggtcagtggctcaggacgtggaccaaagtcccaanagtggccaaggggagtccgtggtgccccanaggtagaagagctagcctggggcacccctggttgccgggacagtgccggctctggagaaggctgtggtgtttggctgggttgtgcttctgtg

SEQ ID NO: 68510 - DNA, 763 bp, Homo Sapiens
agctacagtctgaagaacatagctgggctcaagtcaaaatgagccatctttttcctttgcgttttcttgactgaaggtgagatgttatttgtggcatgtgaactgtggcaggtgggaataatcctgcccttgagagaaaggatctccagcctcccagaagcctgctgtgctttcgtcccacagctttctgcccattgtttcttactagtttcttgaattgttcttgtggacttttcctcagggatacattggcctgcaggtcccagttcacatgtagtcccctgctcaccattggagaatcagctcactgctctctagaaacgtggcgttggtgaacggaccatgcttccgtagctctgacctgggcagcttggacctggtcatcctctactgccatacctttccctgggggcttgaacacagaacagggagatggacaaccacttcaaagaaagacccaccgaatgcagtttctgcttgactgactgggcctgcagctcccttctcctgggacttagaggtggccagatttaaggcccctctactcatccaactccctcttcactggtactcccaatcaatcaaagaacctcaaaatttaaactgatgtggatgggaatatgggaattagggtgggggtgggggatgaagggaagaaatcactgtgctttgttcggcctggtgtgcaaggatggttggtggttttcctgcattgtatcttttcttactgtttctttaataaatgggatgagagggaaaaaaa

SEQ ID NO: 68511 - DNA, 1401 bp, Homo Sapiens
caattacggctaggtacgaggcctgggtgtgcgaatcggcacgaggcggaagtgctcgctgcagcttcccggagccggagcgcagcgcctgcggccgcccgtgccccgccgtcctccttcccgcggccgtgagggagaccgcggctcggccgtagcggagctgcgagttacagaatgtctgaaggggacagtgtgggagaatccgtccatgggaaaccttcggtggtgtacagatttttcacaagacttggacagatttatcagtcctggctagacaagtccacaccctacacggctgtgcgatgggtcgtgacactgggcctgagctttgtctacatgattcgagtttacctgctgcagggttggtacattgtgacctatgccttggggatctaccatctaaatcttttcatagcttttctttctcccaaagtggatccttccttaatggaagactcagatgacggtccttcgctacccaccaaacagaacgaggaattccgccccttcattcgaaggctcccagagtttaaattttggcatgcggctaccaagggcatccttgtggctatggtctgtactttcttcgacgctttcaacgtcccggtgttctggccgattctggtgatgtacttcatcatgctcttctgtatcacgatgaagaggcaaatcaagcacatgattaagtaccggtacatcccgttcacacatgggaagagaaggtacagaggcaaggaggatgccggcaaggccttcgccagctagaagcgggactgaggctgcctcacgtgttgcaagaacagttttgagccattgttaacaatgccttttttcttcacataaagtagttgattacgagggagtcaaattttctttttaaaaaggagcttcaatgatttgtaactgaaatatcaggttctagaagaaactggcgcttaaaccaaatcgcatggatttctttttcagtgacgttcaagtgtttctcacggatggaattctagtcagctgcaggcgggaagccaggcgggtggagcccatgggagcaagggcgagtggccggtccccgctgtgccaggtgggcaggcaggagcaaggcctgcgagggaggaacgggccgctccccgccagccgccttccccagcagccgcaggtggtgccagccactccacagagcccgagggatgatctagcctgattcctgcgtgtccgaaagaacttaacgttttaaaggtgattgtcaagtaactgtgtggggttctaatgccagtttcctaattccatctcactggagatgtttaaagttggcctctatcctaatgactcaaaacttggttcttaactaccatgattgcttttgagggcccggaattataaatatatattatattttaattgtttgag

SEQ ID NO: 68512 - DNA, 469 bp, Homo Sapiens
tagcgaaggaccgtcatctgagtcttccattaaggaaggatccactttgggagaaagaaaagctatgaaaagatttagatggtagatccccaaggcataggtcacaatgtaccaaccctgcagcaggtaaactcgaatcatgtagacaaagctcaggcccagtgtcacgacccatcgcacagccgtgtagggtgtggacttgtctagccaggactgataaatctgtccaagtcttgtgaaaaatctgtacaccaccgaaggtttcccatggacggattctcccacactgtccccttcagacattctgtaactgtgctaagcggctgtgaggccttcagcaaaccctctgagcacgcagccagcctcagtttcctcatctgtaaaatgaggctctcgcagctccgctacggccgagccgcggtctccctcacggccgcgggaaggaggacggcggggcacgggcggccgc

SEQ ID NO: 68513 - DNA, 334 bp, Homo Sapiens
  misc_feature (43)..(60): n is a, c, g, or t
gtaaactcatataatgggattttcaccaaaatgatgcttttgnnnnnnnnnnnnnnnnnncggatatattgagaatcaaagtagaagttttaggaatgcaaaataagtcatcttgcatacagggagtggttaagtaaggtttcatcacccatttagcactgcttttctgaagacttcagttttgttaaggagatttagttttactgctttgactggtgggtctctagaagcaaaactgagtgataactcatgagaagtactgataggacctttatctggatatggtcctataggttattctgaaataaagataaacatttctaagtgaaaaaaa

SEQ ID NO: 68514 - DNA, 1142 bp, Homo Sapiens
  misc_feature (260)..(318): n is a, c, g, or t
  misc_feature (917)..(917): n is a, c, g, or t
  misc_feature (919)..(1036): n is a, c, g, or t
  misc_feature (1038)..(1068): n is a, c, g, or t
  misc_feature (1077)..(1077): n is a, c, g, or t
  misc_feature (1081)..(1081): n is a, c, g, or t
  misc_feature (1091)..(1091): n is a, c, g, or t
ggaaggcacgtctttccgttcgttggttttctgtgtgtaaggagtagcattgctgttggcgcctaacctcgcgtgcactgcattctcaaccccgtaccagtgcatcatcagaagccttcctcgtgaccataactctgtgtctgcagatatgtgttcccgtgtaagccagttttccccttttactcagactgatttcacctagattgtcacggtttccttcatgttaactttgcgtgactttgttcttcctttactactcnnnnnnnnnnnnnnnnnnnnnnnnnnnnnnnnnnnnnnnnnnnnnnnnnnnnnnnnnnnttgtatagcatttttacacctttattgagtaatctggtttcgaaaggaggtgagagtttagtcccttctgcagttttctccaagctgtgtcctgtgaatttcaacccttggagcctaagaaaaccctaggaagatgatgttaatttgctgtcatttcctaattcaggatctatcatcaaatgaaacatgaaaaaaacagtgacttttaaggtgaaaagagtttcaagcattccaaataaattatcaatgtttcataactttttattataaacccacctcctaataggaagccaagtactatttgatacagtggtaaaaaccaaactaccttgaatttttttaaggcaacttatgaataatgctcattttcacagtcagaatagctttaaaatatggttgaatttgatacacacaggaagttttcttgaagaacaatcctttcgcttttcttttttcttgagagatctaaagagaaactgtagattgttttcctgacagcaaaagactaatgtgacaaaatgaagtcattgtaaagaagcgatgcaacttgtcaaatatttaataaagaattatggaagctggaacattttctacatcanannnnnnnnnnnnnnnnnnnnnnnnnnnnnnnnnnnnnnnnnnnnnnnnnnnnnnnnnnnnnnnnnnnnnnnnnnnnnnnnnnnnnnnnnnnnnnnnnnnnnnnnnnnnnnnnnnnnnnannnnnnnnnnnnnnnnnnnnnnnnnnnnnnnttggggggnggcnctgggccccngaaaaaattttttaaaaacatttctttggggcggcccgcccccccaaagag

SEQ ID NO: 68515 - DNA, 1407 bp, Homo Sapiens
  misc_feature (918)..(918): n is a, c, g, or t
  misc_feature (936)..(936): n is a, c, g, or t
  misc_feature (1087)..(1087): n is a, c, g, or t
  misc_feature (1224)..(1224): n is a, c, g, or t
  misc_feature (1241)..(1241): n is a, c, g, or t
  misc_feature (1267)..(1267): n is a, c, g, or t
  misc_feature (1270)..(1270): n is a, c, g, or t
cggactacgggggaagcatcaaattctatacccataaactgcagttggaagtcagctttttgaaatgtccagcctttgcccaattgtttcagatcatctcatgcctcaggctttggcaggtatcctgccctccatcttattccagtgtgttcacctcatcaaggcagcagagtggatgaaggagtaagtctgccctttgccatactgaacagctgtggaccccgattggtgagggctctgcatatgcctgtatgaaggagatacaggtgtgtgtgcacatgccggtatgaagaagacacaggcatgtgcttctcagttttgctaacagtgggagctcaacggggcagagggaggaaggtccatgatgctcagccacatactgtagagagaggcaatttaatgttaaatgacgcaccatcctccctcccacccttctcccagtcaactttttttctttttctagaactactaattatctctcaaggctgaaaaattaattgccttaggtggagaacttaattcctagtatccaccaaacttaactccgtatctccatatggtgtctccatatctactgtgtgagctacttaactgacgccctcttcctccaactgaaggatcgcccaacgtttttggattatagaattattatttcctgctttctttctttgggacttttgaatttctttggtttcgtttttaagaagtaacccaacatttcctacaacactaaataaaatggtacttacctttcaaagatttgtgtctgtagtttggtatgggtgcaataaaaatttattttgtcttcctggaaaacctctcttggtgggggtggggggatgaccagtgtttctcatcccatgagggtctctcactgggatttctgttgctgccatcttgcctggttcccaggagtcncaaggccctttttctcanagaggacggacatgtctggtcccttcggatgcaccttcatcttggcctgagggaccatggcactggccagagaaactgagttggaacgtgctgcccccttttcctttgcagccggtaccttggctgagcatttggacaggtctttcctcangttccaccccaccaccacacaggttccacagagtgattcttcactttgggggcagagttgattcaggctgggctcactgcccatctgggaacaggtcttgttcattgacttagttgtcatgtgtgatagaggtatanggatgaaggatctctgnagtcactctccaacccagctttccangangtagagggtgctgcccgcagcgtgacgtggcaactcaggtccagactctgatggatgaacttgctctaaatatcaatgaaagacaagagcggctggaatctggtggatgggactctgagctctggttggggagcgtg

SEQ ID NO: 68516 - DNA, 879 bp, Homo Sapiens
  misc_feature (367)..(377): n is a, c, g, or t
  misc_feature (524)..(524): n is a, c, g, or t
gcacgaggcttcaaacaagatcgcctgacaacactgccgcatacacatacggcagtgttgtcaggcgatcttgtttgaagctctatgttgccataattaccatcaagtacacactgttggcaaaaggctaacacctgactttagaaaatgctgatttgagaacaaaaggaaaggtctttttccactgcttaaagtggggtcactttgatacctttgcggtcatgtctgtgtctgatgagtgtagaatctctggatgtgcactgtcagtcatgtgtccaccaggcctcgaatatcatatgggaaatgtcatagttaaaaacgtacagccaggcccgtgtgctgttaatagtgtgaaattgtcatgttnnnnnnnnnnncaaaacaggaaccaaatgtgaccttgtgcatatattggtagctgaaaatcttcaaggctactgatgggtggccccttaatcttgtctttgattgctgtgtgcagggaaaggtgtccccgtttgttcatgctgttttggggggtgggngggtatttgcaagaatactcattttgacataataggtcctcttgtcagagatcctctaccacagacattaatagctgagcaggagccacatggattgattgtatccactcaccattgacgatggcattgagcgtagctagcttatttccatcactacgtgtttttgagcttgctcttacgttttaagaggtgccaggggtacatttttgcactgaaatctaaagatgttttaaaaaacacttttcacaaaaatagtcctttgtcattacattatttactcatgtgtttgtacatttttgtatgttaatttatgaatgattttttcagtaaaaaatacatattcaagaaccaaaaa

SEQ ID NO: 68517 - DNA, 1676 bp, Homo Sapiens
  misc_feature (1255)..(1295): n is a, c, g, or t
  misc_feature (1374)..(1407): n is a, c, g, or t
  misc_feature (1455)..(1463): n is a, c, g, or t
gggtccttgaatatgtatttttaactggaaaaaatcatccataaattaccatacaaaaatgtacaaacacatgagtaaataatgtaatgacaaaggactattttggtgaaaagtgttttttaaaacatctttagaattcacagatgcaaaaattgtaccccgtgcacctcttaaaacgtaagagcaagctcaaaaacacgtagtgattggaaataagctagctacgctcaagtgccatcgtcaaggggtgaggtggactacaatcaactccagtggtggctccgtgctcagcatataaagtgtcgtggtggtagagagatctcgtgacaagaggacctatttatgtcaaaaggagtattctggcaaataccccccaaccccccaaaacagcatgaacaaagggggacacctttccctgcacacagcaatcaaagacaagattagggggccacccatcagtagccttgaagattttcagctaccaatatttgcacagggtcacattgggtcccggtgttttttttaaactatgacattttcaccactattaacagcacacgggcctggctgtacgtttttaactatgacatttcccatatgatattcgaggcctggtggacacatgactgacagtgcacatccagagattctacactcatcagacacagacatgaccgcaaaggtatcaaagtgaccccactttaagcagtgaaaaaagacctttccttttgttctcaaatcagcattttctaaagtcaggtgttagccttttgccaacagtgtgtacttgatggtaattatggcaacatagagcttcaaacaagatcgcctgacaacactgccgcatacacatacggcacccaggactcagaatcagtctgtcctggcaaatccttccaaatgacatcatagtgttgtcacattgaaagcaactcacagccttcagtgaggaaaggggagaggagaatgagaaggggagaaaagccaaggcagggacaaaggcccggtgggggatgggggttgcagggtggaggggggtctttattgctatatgcaccataaaacaaaggaaaaccaaatgaacttctgtgtgtaatgttcacttgtgaaggtattttaaagcatgaaatgcttaagtcttaaaaaacatatgctatagcttaccggcattttcaagggcaggaacctgctctctcatatgagccgataagagctttgcaatgcaatttattttctaaataccactctattcttnnnnnnnnnnnnnnnnnnnnnnnnnnnnnnnnnnnnnnnnngcctggccaatcactcccacagtttgtggggatcatatgtccacagaaccatcacatgcaacgaaaaaagccctaaccnnnnnnnnnnnnnnnnnnnnnnnnnnnnnnnnnncatgtaaactatgaaaatcaaggaagttgaaggcaaacaaggcaattnnnnnnnnntacgaagtactcttcagaaagtactcctcatcacaatatataaatatgttttatggaaaacaagggcgggggaggaaaactggcattttccagaattctgcagaagccgacagagactacaatttgagggctttggtttggggaaaaacaaagaggcacaaattcaaatacaatttagaacatgacttcaaggctgggcgcaatggctcacac

SEQ ID NO: 68518 - DNA, 1196 bp, Homo Sapiens
  misc_feature (284)..(318): n is a, c, g, or t
  misc_feature (365)..(373): n is a, c, g, or t
  misc_feature (586)..(712): n is a, c, g, or t
  misc_feature (777)..(840): n is a, c, g, or t
taccaaaccaggaaccaagactcggggaagtccctgaagtatttaaacctgaatgcttaagtcttaaaaccatatgctatagcttaccgccatttccaggccaggaacctgctctctcatatgagccgataagagctttgccagcaattattttctaaataccctctattcttcaaagaaccaacctactactaccaaaaacaaggcctggccaatcactcccacagtttgtggggatcatatgtccacagaaccatcacatgcaacgaaaaaagccctaaccnnnnnnnnnnnnnnnnnnnnnnnnnnnnnnnnnnnatgtaaactatgaaaatcaaggaagttgaaggcaaacaaggcaattnnnnnnnnntacgaagtactcttcagaaagtactcctcatcacaatatataaatatgttttatggaaaacaaggccgggggaggaaaactggcattttccagaattctgcagaagccgacagagactacaatttgagggctttggtttggggaaaaacaagaggcacaaattcaaatacaatctagaacaggacttcaaggctgggcgcaatggctcacacnnnnnnnnnnnnnnnnnnnnnnnnnnnnnnnnnnnnnnnnnnnnnnnnnnnnnnnnnnnnnnnnnnnnnnnnnnnnnnnnnnnnnnnnnnnnnnnnnnnnnnnnnnnnnnnnnnnnnnnnnnnnnnngtgtgtggtgtgcacctgtagtcccagctactcgggaggactgaggtgggaaaatggcttgagcnnnnnnnnnnnnnnnnnnnnnnnnnnnnnnnnnnnnnnnnnnnnnnnnnnnnnnnnnnnnnnnncagaccgtcttaaaaaacaaacaaacataatatgacttcaaaatgcaggtgggggtgtgagcagagcacctgggctcttgctgtctggagactttgttagtctaatttcaaagcttcatccgctcttacctggatcccagctgccccacagcacacagtgtcaccagctcctggctcctggctccctatttgagtgctccttggttctatgtatcagttactaatgttgacaagaatctttccagaaaccaaaagggacacagaggaatccgacgcgtgggtcgacgatatcccggaattccggaccgtaccagcctgctttttgtcaccacgtgttctatagtcacaatgctccc

SEQ ID NO: 68519 - DNA, 698 bp, Homo Sapiens
  misc_feature (370)..(423): n is a, c, g, or t
ggtctcccacctcccacctgaccccagcggctccggtgtcctccacgtggctgccctgggagcaatcccagcggatcgctccgggccaccaagccgcacctgtgcctgagactccggatggacgacacagtcgtcacgtcgctcttcctgcgggttcttggcgagacacagcttgagaacagaagggcgtcgggggaacctgccgcaaggagcagagacagcacagccccccgggcccagccgcctccctctcttgggacgcaacttcttccccactcggatgggctttaaattattcccataggggccaatttcaaataataatttttttccctgatggaatttaccttaatctgtatataacttgtannnnnnnnnnnnnnnnnnnnnnnnnnnnnnnnnnnnnnnnnnnnnnnnnnnnnnggcattagacattcttattgtgaagaaataatgttaatataagtatctggtgaaggaccaaaaccgtgtgataaggttgtgtgtcgtgtgggagtggggcgattttttatgtgccaaatacccccgtcccccccatgaatcctgctgtccctgctgccgtttaccagacaatcatatgtttttgttaaatttgcgtttcagttacatttgcatttaagacaagtgttctatttatttcttgtattgtttggaagaaaaaatgatgatagagtccc

SEQ ID NO: 68520 - DNA, 1182 bp, Homo Sapiens
  misc_feature (37)..(37): n is a, c, g, or t
  misc_feature (53)..(53): n is a, c, g, or t
  misc_feature (84)..(84): n is a, c, g, or t
  misc_feature (115)..(115): n is a, c, g, or t
tatttaatcctaataagactgtggtgaagatgtttgntgtgatatatgattancgagatatgccagccaatcatcagacattcntacgacaaagaactttttctgtacctgtaanacaagaagtgaagagaagtgttaataaagagaacatccgacacacagaagaacggtattacgctacctcatacatctgaggttccagagttctaaatctggaaagatctacctccatagagacgtacggctcctgttctctagaaagtcaatggaggttgatagcggtgctgcatatgaactcaaatcttacactgaatcaccaacaaaccctcagttttcaccaagatgttgataaggagtgatgatttaaagtatttactcagtacccaagtttgcaagtaaaaattagcatagaatggagtgtaccaaattaacaatcaggagagtggattctctcctgttatcctggaccagtttttatgaaaggattcctgaaatgaaatccatatattccatgtagactggaaaaactcatgtcctaatcctttttgtactgttgaaaccacttcattggacatgttgcaatagcaaaacccccagttagattagtgtttacacattttctcagttatttaatatttaatgttttccttaatactcaagtgatgtttgtctctagtgttctaatgtagcacaaatcctatgtaaaatcatactatgtatttttgacattaatgttgaaatcaaatatatgcacaagtctttaattttgtgtaatgtgttaagtgctgttcatttaagttattgaaaatgagaataaaatgttgagcttctttaaaagtaacacactatgcaagcatgtgtactttttatatctctcatgtttagtttttataacaccatatccaggttgctatctcacatagtagtcctttaacatattgtattagcagtgcaatgtggactaagctgcttcactttccctttgcaagttcagatcatcatgcccattcatagccaggattccttatccccaaaacagttctatttttccttaatcactactatagagtctttacattaaattactgtcgtatgctagataattttctcaaattgttaaaagaatatgtactttggaaacaaattagtatttatattgtaaatatattcaaaaaaaactaa

SEQ ID NO: 68521 - DNA, 1110 bp, Homo Sapiens
tcctcatcctcctcatcttcttcatcctcctcctcctcagagagcaatgatgaggaccagcaacccagagcaaccggaaaacatcgacggagcctgggggctggatacccccacgggaacggctcacccggtcctgggcatggggagcctgacgttttgaaggatgagcttcaactctatggagatgctcctggagaggtggtaccctctggggaatcaggactccgaaggagaggctctgacccagcaagtggagaagtggaggcctctcagttaagaagactgaatataaagaaagatgatgagtttttccatttcgtcctcctgtgctttgccatcggggccttgctggtgtgttatcactattacgcagactggttcatgtctcttggggtcggcctgctcaccttcgcctccctggaaaccgttggcatctacttcggactagtgtaccgtatccacagcgtcctccaaggcttcatccccctcttccagaagtttaggctgacagggttcaggaagactgactgaggccacttccaggtgggcagcagaggcaggccccagggggaccaccactgcgacccctggagcccacaagggcagagcagcattctgagagacgcacaggaagaccaagccagaccaataaacagaacacttttccctccagagaaaacaaaaacagaaccaccgcgcaccccccgccggccgcctccccgcccccaaagactccctaatccccaaacctgaccgggaggaggccgcgacgccacgcacagcgcaactagccctggccctcgaccgtcctacacccagacacacttgcagaccagcacgatgtccgggcgcccctcccgtggacgctcaccgcccggcgaaccgggcgcaggctgatatcaacgtcacgctacgcagtctaccagaagcgcggatctgggacatctaatccgcggagtgccccgccccaacccctacataaccgtcctgccgcctcctgccctacatcgtacaaaccaacaccgggcaccagagaccagaggagagtatcgtataacagtgtaatgctcgcacgtcgctgcggtataccacgccggtaatagcagagac

SEQ ID NO: 68522 - DNA, 1119 bp, Homo Sapiens
cggctaggtagcgaggctgggtgtgtaatcggcacgaggacttatgacccacgccatgaccttcactgctgtctcagagaaggatgatcaggatggtgctttcacaaaatggagagtggagaattcatggggtgaagaccatggccacaaaggttacctgtgcatgacagatgagtggttctctgagtatgtctacgaagtggtggtggacaggaagcatgtccctgaagaggtgctagctgtgttagagcaggaacccattatcctgccagcatgggaccccatgggagctttggctgagtgatactgccctccagctctttcctccttccatggaacctgacgtagctgcaaaggacagatccaggactgaagccaaagttatgcaagggactgtgtgttgccacaggacacagtcagatttccagtctccaccaggaacctcttcagaaagtgtgctttatgctgaaacagaatactgttaaaggaaaaaaaagaggggggaagatcaggtcatactatctactctcctcatctctaacagctcaggatctcttagcattttaattagatgtaattgtttgtctttaactgtcaaaaagtttggttctgtgtctgtgttttaataagacgagaggacgagcgattgaggtgtatggagagaaaacagacctaatgctccttgttcctagagtagagtggagggagggtggcctaagagttgagctctcggaactgcatgctgctggacagtatcactgtctttcctagatggcagtcactgaattccattttttcaaggtaatttcttgtgcctctaatagcccaagaatgggaggttgatcagatctgacatgattccttcctgttctgaactgtggggtgtgcacatctctgcttgagtcaggtttgagtagaggcttagagacagttgggtgagaacaaccaaaatcttatcatggtctcagtcataatcattagggggaactctagccaaatggtttaacttctgcctgtggaactggggattgggtgggcaggaaaaggtgatatccattctttctgataactagatggtgctgagaagcttttgaataaaaactttgctaaatgagaata

SEQ ID NO: 68523 - DNA, 923 bp, Homo Sapiens
  misc_feature (838)..(861): n is a, c, g, or t
tttttccagtttacacaaaaacactttaattgacagtatacaattttccaaaatatatttttgtaagaaaatgcaataattattaactatagtttttacaaacaagtttctcagtaaattccagtgtacttcagacccctgtccactaagacatatatgatcccccagttcctgggcaaactgttgaacattcactgcagacaaaaagaccaacaccaaagagtcatctgtgtcctccatgctgtgtttgcagcagacctgagggatcagctagtgaccgtgacaaaagctatgctacagttttactcttgccctctctgcctcccccatcatgtttccttggtccctcagtcctgttggagtaagttccatatataaaagctcatccaaaactttgtttcttggcagaaagaaagaattgttcacttacatcttaaacctaaatgattcagagaaagtgtagaagaccagttcttatgtttgtgttcatgccctccctagccttgctagggtaacaactgggaaaggaattctgtcctttgtgtcattctggcaccttcgagtagcaattcttaatttaccgattattccttctgaggcgcacagtctgtggatccaggttttaatcttgtttctgtcctgaaccatgtgattttgaggaagtcacttcatctttgtgagcttcagattatctttttctctagaaaaagattggactagatcttgaaatacctttctccatgactacagggttgcctgccaaccagagcatatggactccaacctttactgaaatggagctgtgactttgctggggagggggcagggttgcattttnnnnnnnnnnnnnnnnnnnnnnnnacctgatgtacaagacaaatactttatcataagtttgtcttgttatatttcattttttgttt

SEQ ID NO: 68524 - DNA, 560 bp, Homo Sapiens
  misc_feature (185)..(195): n is a, c, g, or t
  misc_feature (258)..(281): n is a, c, g, or t
ttcaaactgatacatatacacatatttttttgataatgtaaatacagtgaccatgttaacctaccctgcactgctttaagtgaacatactttgaaaaagcattatgttagctgagtgatggccaagttttttctctggacaggaatgtaaatgtcttactgggaaatgacaagtttttgcttgannnnnnnnnnnaaacaaaaaatgaaatataacaagacaaacttatgataaagtatttgtcttgtagatcaggtnnnnnnnnnnnnnnnnnnnnnnnnaaaatgcaaccctgccccctccccagcaaagtcacagctccatttcagtaaaggttggagtcaatatgctctggttggcaggcaaccctgtagtcatggagaaaggtatttcaagatctagtccaatctttttctagagaaaaagataatctgaagctcacaaagatgaagtgacttcctcaaaatcacatggttcaggacagaaacaagattaaaacctggatccacagactgtgcgcctcagaaggaataatcggtaaattaagaattgctactcga

SEQ ID NO: 68525 - DNA, 1589 bp, Homo Sapiens
gggacacctctgtgcctgcttcccaagttaggtctctgtattatgacatgaacaaactggatccacagacaaactcaagccagattaaagaggaattccggacgctaaacatggtgacaccaacgctgcgagtagaggactgcagcatcgcactgttgccccggaaccatgagaaaaaccggtgcatggacatcctgcccccagaccgctgcctgcccttcctcatcaccatcgatggggagagcagcaactacatcaatgctgccctcatggacagctataaacagccttcagcttttatagtcacccagcatcctttgccaaacacagtgaaagacttttggagactggtcctggattatcactgcacatccgtagttatgctaaatgatgtggatcctgcccagttgtgtccacagtactggccagaaaacggagtacacagacacggccccatccaggtggaatttgtctctgctgacctggaagaggacatcatcagcaggatattccgcatttacaatgccgccagaccccaagatggatatcggatggtgcagcaattccagttcctgggctggccgatgtacagggacacaccagtgtctaagcgctccttcttgaagctcattcgccaggtgggacaagtggcaagaggaatacaatggcggggaaggccgcaccgttgtgcactgcttgaacgggggaggccgcagtgggacgttctgcgccatcagcatcgtatgtgagatgctccggcaccagagaaccgtggatgtctttcacgctgtgaagacactgaggaacaacaagcccaacatggtcgacctcctggatcagtacaagttctgctacgaggtggccctggaatacttgaattctggctgatggtgtaaacagctctgcaaacaatccctttcataccacaaagccaagacgttccatggtatttgtgcaaaagagatgaagacttctcaatatgcttattttgctttgcataattggctctttttaagagcccaagaaagtgtttctaaaattgcttgcactgcccaatcccagtaatgctgctgcctgacagaaacacacacacagccacagttgccaaatcccgtactccttgccaccggcttcctagagcagcgtagacagctggtaaactgaagagcacaactatattcttatgaaggaatttgtacctttggggtattattttgtggcccgtgaccctcgttattgttacagctgagtgtatgtttttgttctgtggagaatgctatctggcattatggtaatatattattttaggtaatatttgtactttaacatgttgcataatatatgcttatgtagctttccaggactaacagataaatgtgtaatgaacaaagatatgttgtatgagtcgtcgtttctgtcagatttgtattgtttccaagggaaaagcttgggggaggactcagttcacaaaatgcaaaactcaacgatcagattcacggacccagagcttttccatgtgtttatattgtaaatatttttgatttcatcaaattatttattcattaaaagaaatttttgtgaagcacaaa

SEQ ID NO: 68526 - DNA, 948 bp, Homo Sapiens
ctattaggtgactatagaacacgtggttaaaaaagcaggctggtacggtcggaatcccgggatatcgtcgacccacgcgtccggctgcgcgtaagtctggccggtgccatctgtctccgcaatgccccccaagaaacaggctcaggccgggggcagcaaaaaggcggagcaaaaaaagaaggagaagattatcgaagacaaaactttcggtttgaagaataagaaaggagcaaagcaacagaagtttatcaaggctgtcacacatcaagttaaatttggtcaacaaaatccacgtcaggtagcacagagtgaagctgaaaagaaattgaagaaggatgacaagaagaaagaattgcaggagctaaatgagctgttcaaacctgtagttgctgctcaaaaaataagtaaaggtgcagatcccaagtctgtagtatgtgcattcttcaagcaaggacagtgtactaaaggagataagtgtaagttctcccatgacttgactctggagagaaaatgtgaaaagcgaagtgtttacattgatgcaagagatgaagaacttgaaaaagatactatggataattgggatgagaaaaagctggaagaagtagtgaacaagaagcacggtgaggcggaaaagaaaaaaccaaaaactcaaatagtgtgcaagcatttcctggaagctattgaaaacaacaagtatggctggttttgggtatgccctggagggggtgatatttgcatgtatcgtcatgcacttcctcctggaatttgtgttggaaaacgactgaagggaaaggaggagcaacgaggatggacattctccttaggaaagatgctaattggaacagagcaacgtttcctgccccctaggtccccaaatggggtacccaaaaatcccctccttaagaaatctcttttccttgccctggggaaagaacacgggggaaaaga

SEQ ID NO: 68527 - DNA, 904 bp, Homo Sapiens
  misc_feature (733)..(733): n is a, c, g, or t
  misc_feature (808)..(808): n is a, c, g, or t
  misc_feature (823)..(825): n is a, c, g, or t
  misc_feature (827)..(828): n is a, c, g, or t
  misc_feature (830)..(833): n is a, c, g, or t
  misc_feature (835)..(835): n is a, c, g, or t
  misc_feature (837)..(839): n is a, c, g, or t
  misc_feature (841)..(848): n is a, c, g, or t
ggggtcgcaaaggccgcgtttgcggggccaatgagcgactcgctttccgtgcggtgcggcgagtgaggccccggtcttcctcctcgtcctgccgcagggccagaacccctgacggtattcagctgcgcgtaagtctggccggtgccatctgtctccgcaatgccccccaagaaacaggctcaggccgggggcagcaaaaaggcggagcaaaaaaagaaggagaagattatcgaagacaaaactttcggtttgaagaataagaaaggagcaaagcaacagaagtttatcaaggctgtcacacatcaagttaaatttggtcaacaaaatccacgtcaggtagcacagagtgaagctgaaaagaaattgaagaaggatgacaagaagaaagaattgcaggagctaaatgagctgttcaaacctgtagttgctgctcaaaaaataagtaaaggtgcagatcccaagtctgtagtatgtgcattcttcaagcaaggacagtgtactaaaggagataagtgtaagttctcccatgacttgactctggagagaaaatgtgaaaagcgaagtgtttacattgatgcaagagatgaagaacttgaaaaagatactatggataattggggatgagaaaaagctggaaggaagtaatgaaacaagaagcacgggtgaggcggaaaagaaaaaaccaaaaactcaaatagtgtggcagcattttctttgaagctattggaaacanacagtatggcctggttttgggtatgccctggaaggggtgaatatttgcatgtatcgccatgcactttcctcctgnatttggggtgaaaannnannannnnanannnannnnnnnnccttgtggggccggcctccgggccctccaaaaacttttccaaaaccattccggttg

SEQ ID NO: 68528 - DNA, 1781 bp, Homo Sapiens
  misc_feature (43)..(122): n is a, c, g, or t
aggaagccctgaagggtcaaaagaaatacaaaagcaaaggctnnnnnnnnnnnnnnnnnnnnnnnnnnnnnnnnnnnnnnnnnnnnnnnnnnnnnnnnnnnnnnnnnnnnnnnnnnnnnnnnaagagcgagcggctctgcggtggcggttaggggtgggcgccgccgaggtgaggtcgtctcgcctcccgcgcgccggtagatgggttgtttcattatggatggaggggatgatggtaaccttattatcaaaaagaggtttgtgtctgaggcagaactagatgaacggcgcaaaaggaggcaagaagaatgggagaaagttcgaaaacctgaagatccagaagaatgtccagaggaggtttatgaccctcgatctctatatgaaaggctacaggaacagaaggacaggaagcagcaggagtacgaggaacagttcaaattcaaaaacatggtaagaggcttagatgaagatgagaccaacttccttgatgaggtttctcgacagcaggaactaatagaaaagcaacgaagagaagaagaactgaaagaactgaaggaatacagaaataacctcaagaaggttggaatttctcaagagaacaagaaggaagtggaaaagaaactgactgtgaagcctatagaaaccaagaacaagttctcccaggcgaagctgttggcaggagctgtgaagcataagagctcagagagtggcaacagtgtgaaaagactgaaaccggaccctgagccagatgacaagaatcaagagccctcatcctgcaagtctctcggaaacacctccctgagtggcccctccatccactgcccctctgctgcagtatgtatcggcatcctcccaggcctgggtgcctactctgggagcagcgactccgagtccagctcagacagcgaaggcaccatcaatgccaccggaaagattgtctcctccatcttccgaaccaacaccttcctcgaggccccctagtttctccgtccctacacagggagctcctccccaagggtagatcggaccgttcatgctgcctataggcattatgtccctcaaaaaaaaactcctttgcctgcatcctgtgtacaacatgacatttttaaccaatccaatctaaaaatgtgccagaatccacctgtggcccgaatcgtgtttggttcctctttctactccactgcagatgaccaaacctgtcccgctgccactttcctcactgatattgggaggagggcaaggcccagccgaagttccactaaaaatgccccaggagaataggcaccggctggcttgccaaagggtttgggttttattgctttctgttttttcttttcccgacagcacaaagaagtaagggcagttattggacaggtgttatttaaacattctattgtaaatgaatgtgttgtttggttctactgcattgtggagcatgcgggggaagagaactgacccaggtaatgaaatggagcccttccctggaactaaccagtccttgatgttgtgtgactaagtaaagatgataaaccccatctgctgggggtgtcacttcacactcggcatgcattgtgaaagctttccatacccttggccattccctctctcctctctctccaaccccatttatgcaggaagggactgctaacaagaacgcttccatctcaaaccttttctctgcctgggaaattattttatgtttgtttttgaaataaaggatttagtttaagattctaaattttagagaatcgcgcatcaaaaaaactacaaataccacatgt

SEQ ID NO: 68529 - DNA, 1007 bp, Homo Sapiens
cagtcgacggtaccggacatatgcccgggaattcggccattacggccgggtatctgtatctctattcctgcattttataaatctgtaaaggaagaaaactgaaagggaagaactagactgagtcttacctttctctgacctaagataaactgataaaactttttacttgatatttggagaagtcattaactggattctagttaatttcccatattgggcagtttagaggagacccagccaaccaaattatgatctagcaaatttaacataggggaagagggatagtaaactatttttcagtagatttgcactttaaacttaggaactggatgttggtggaaaggacttccatagggcagatgggtaaatatctagcctgcacttggatgttagagaatcaaacctcacccttgctcgttctaaacccacatgagtagttaactgtcttttgacataatcagagtcaggatttccctttttccctacttgagtcgtcttccatgtctgttacatccaagatcatccctctgggggatgtgtcaagtagttctcctactcagaatagaagctttgcgaattatcattcccacctctagattttaaatgaatgtagagttgtctaacattatatgggtgggaggctctttgcctctgtgatcagtagggtacctgcctctgaggtgctactgcctggagggatcactcccatcaaaagactggtgagttggaagctaagagcacatgcgcatagccagctcctctcccaggctggcagtcatgattacgagcatcattccagaatctttggcttctagaaccaactccattctgaagaacattttaacatctatgaataccttggtaataatcttttatacacaggagttttgtagcatgactttatgactaaacttattgtgaattaagttatttagaaatgttgagtttctgaatgttattttgtgatttgtttcaaaatagtaataaattgtgttattttgtaaaaa

SEQ ID NO: 68530 - DNA, 1414 bp, Homo Sapiens
  misc_feature (58)..(99): n is a, c, g, or t
  misc_feature (1155)..(1204): n is a, c, g, or t
  misc_feature (1332)..(1368): n is a, c, g, or t
tgctgatgtagagaaggtggaggaaaagtcagcaatagatctgacccctattgtggtnnnnnnnnnnnnnnnnnnnnnnnnnnnnnnnnnnnnnnnnnnggtgatgcttcagaatggagagacccccaaggacctgaatgatgagaaacagaagaaaaatattaaacaacgtttcatgtttaacattgcagatggtggttttactgagttgcactccctttggcagaatgaagagcgggcagccacagttaccaagaagacttatgagatctggcatcgacggcatgactactggctgctagccggcattataaaccatggctatgcccggtggcaagacatccagaatgacccacgctatgccatcctcaatgagcctttcaagggtgaaatgaaccgtggcaatttcttagagatcaagaataaatttctagctcgaaggtttaagctcttagaacaagctctggtgattgaggaacagctgcgccgggctgcttacttgaacatgtcagaagacccttctcacccttccatggccctcaacacccgctttgctgaggtggagtgtttggcggaaagtcatcagcacctgtccaaggagtcaatggcaggaaacaagccagccaatgcagtcctgcacaaagttctgaaacagctggaagaactgctgagtgacatgaaagctgatgtgactcgactcccagctaccattgcccgaattcccccagttgctgtgaggttacagatgtcagagcgtaacattctcagccgcctggcaaaccgggcacccgaacctaccccacagcaggtagcccagcagcagtgaagatgcagactgataccacctccaccgctgagcagtgaccttcctcactttctcttgtcccagcttctcccctgggggcctgagagaccctcaccttccttctgcccatcttccatgttgtaaaggaacagccccagtgcactgggggaggggagggagtgaggggcagtggtgcccttcctgcagaagagacatgcagcagtagcgctggcgccatctgcaggagctggcgggctggccttctggaccctggcttctccccactgtaacgcctgttacacacaaactgttgtgggttcctgccaggcttgaagaaaatgatctgaatnnnnnnnnnnnnnnnnnnnnnnnnnnnnnnnnnnnnnnnnnnnnnnnnnnctcctttttggggggtattcagagtgggctgggcccctgggcgagacacagctacctctgttggcatctttttaataccaggaacccagcggctctagccactgagcggctaaatgaaataaagtggnnnnnnnnnnnnnnnnnnnnnnnnnnnnnnnnnnnnnccacagcaaatttcttgatgaaaattgaaaataaaagtttccttgt

SEQ ID NO: 68531 - DNA, 1020 bp, Homo Sapiens
  misc_feature (41)..(41): n is a, c, g, or t
  misc_feature (120)..(120): n is a, c, g, or t
  misc_feature (167)..(167): n is a, c, g, or t
  misc_feature (246)..(246): n is a, c, g, or t
  misc_feature (250)..(250): n is a, c, g, or t
  misc_feature (752)..(802): n is a, c, g, or t
  misc_feature (930)..(966): n is a, c, g, or t
cctgttcggtgcagatccgagaccagttcatctcatgcctncaggtgatgacgtgcattctaggacagataatctactcgagttactctagacagcttgtgatgagacagtcgccgctgntattgactgtcagagacctttcacctccatgcctcaacaccgcttgntgagtgagtgttgcgggaagcatcacacctgtccaggagtcatgcaggaaacagccaccaatgcatcctgcacaaagtntganacagctggagaactgctgagtgacatgaaagctgatgtgactcgactcccagctaccattgcccgaattcccccagttgctgtgaggttacagatgtcagagcgtaacattctcagccgcctggcaaaccgggcacccgaacctaccccacagcaggtagcccagcagcagtgaagatgcagactgataccacctccaccgctgagcagtgaccttcctcactttctcttgtcccagcttctcccctgggggcctgagagaccctcaccttccttctgcccatcttccatgttgtaaaggaacagccccagtgcactgggggaggggagggagtgaggggcagtggtgcccttcctgcagaagagacatgcagcagtagcgctggcgccatctgcaggagctggcgggctggccttctggaccctggcttctccccactgtaacgcctgttacacacaaactgttgtgggttcctgccaggcttgaagaaaatgatctgaannnnnnnnnnnnnnnnnnnnnnnnnnnnnnnnnnnnnnnnnnnnnnnnnnnctcctttttggggggtattcagagtgggctgggcccctgggcgagacacagctacctctgttggcatctttttaataccaggaacccagcggctctagccactgagcggctaaatgaaataaagtggnnnnnnnnnnnnnnnnnnnnnnnnnnnnnnnnnnnnnccacagcaaatttcttgatgaaaattgaaaataaaagtttccttgtattttaaa

SEQ ID NO: 68532 - DNA, 342 bp, Homo Sapiens
  misc_feature (94)..(143): n is a, c, g, or t
  misc_feature (261)..(297): n is a, c, g, or t
gaccctggcttctccccactgtaacgcctgttacacacaaactgttgtgggttcctgccaggcttgaagaaaatgatctgaattttttcctccnnnnnnnnnnnnnnnnnnnnnnnnnnnnnnnnnnnnnnnnnnnnnnnnnngggggtattcagagtgggctgggcccctgggcgagacacagctacctctgttggcatctttttaataccaggaacccagcggctctagccactgagcggctaaatgaaataaagtggnnnnnnnnnnnnnnnnnnnnnnnnnnnnnnnnnnnnnccacagcaaatttcttgatgaaaattgaaaataaaagtttccttg

SEQ ID NO: 68533 - DNA, 480 bp, Homo Sapiens
cacattatataaaaagtgtgcatttaatcttcaaaatagtcaaggctctaatcaggttaggttttccatagttttaagcaggactttgtggttttagtgaagaagtcatggtgcaattgaaatcactgtaagaaataagtgacttttaaaacaaacacagacacacacactcctcttaagagtaatatatacacaacacagcagctacatgggtgttcaggcaaagggtgcatgaacgagaagccctctgctccctgcccgatgagaaagtccccagaaaggattcagcagcagcaagtctacagcacaaacatggatggcattgtccctgaaaacacacagttaggtggacctacaggagacattggagcctagacatgtgggaaagggctcagttacagtacattctactgcatacacttgaaatattacagtgtgttttttctccagactattataaataatttttcgtgctttctg

SEQ ID NO: 68534 - DNA, 1620 bp, Homo Sapiens
aataaaagagacacaccccccttatgtttgtgtgtatgacctattgtcattaagcaggctggtacggtccggaatcccgggatatcgtcgaccacgcgtccggtcaccggcgcggtctatggctgcgacttctctaatgtctgctttggctgcccggctgctgcagcccgcgcacagctgctcccttcgccttcgccctttccacctcgcggcagttcgaaatgaagctgttgtcatttctggaaggaaactggcccagcagatcaagcaggaagtgcggcaggaggtagaagagtgggtggcctcaggcaacaaacggccacacctgagtgtgatcctggttggcgagaatcctgcaagtcactcctatgtcctcaacaaaaccagggcagctgcagttgtgggaatcaacagtgagacaattatgaaaccagcttcaatttcagaggaagaattgttgaatttaatcaataaactgaataatgatgataatgtagatggcctccttgttcagttgcctcttccagagcatattgatgagagaaggatctgcaatgctgtttctccagacaaggatgttgatggctttcatgtaattaatgtaggacgaatgtgtttggatcagtattccatgttaccggctactccatggggtgtgtgggaaataatcaagcgaactggcattccaaccctagggaagaatgtggttgtggctggaaggtcaaaaaacgttggaatgcccattgcaatgttactgcacacagatggggcgcatgaacgtcccggaggtgatgccactgttacaatatctcatcgatatactcccaaagagcagttgaagaaacatacaattcttgcagatattgtaatatctgctgcaggtattccaaatctgatcacagcagatatgatcaaggaaggagcagcagtcattgatgtgggaataaatagagttcacgatcctgtaactgccaaacccaagttggttggagatgtggattttgaaggagtcagacaaaaagctgggtatatcactccagttcctggaggtgttggccccatgacagtggcaatgctaatgaagaataccattattgctgcaaaaaaggtgctgaggcttgaagagcgagaagtgctgaagtctaaagagcttggggtagccactaattaactactgtgtcttctgtgtcacaaacagcactccaggccagctcaagaagcaaagcaggccaatagaaatgcaatatttttaatttattctactgaaatggtttaaaatgatgccttgtatttattgaaagcttaaatgggtgggtgtttctgcacatacctctgcagtacctcaccagggagcattccagtatcatgcagggtcctgtgatctagccaggagcagccattaacctagtgattaatatgggagacattaccatatggaggatggatgcttcactttgtcaagcacctcagttacacattcgcccttttctaggattgcatttcccaagtgctattgcaataacagttgatactcattttaggtaccaaaactttttgagttcaactggatcaacccaaaagaaaaagtgttgcctagagaaaattaaggggaaaaaggtg

SEQ ID NO: 68535 - DNA, 778 bp, Homo Sapiens
catccatatggaggaggatgctcatttgtcagcactcagtacacatcgccttttcaagaacgcatttccaagtgctatgcaatacagttgatactcttctaggtccgaccctctgagttcaactgacaaaccaaagcaaagtgtttgctagagaaattagggaaaaggtgaaaaagaaaaaatggtagtaattgagcagaaaaaaattaatttatatatgtattgattggcaaccagatttatctaagtagaactgaattggctaggaaaaaagaaaaactgcatgttaatcattttcctaagctgtccttttgaggcttagtcagtttattgggaaaatgtttaggattattccttgctattagtactcattttatgtatgttacccttcagtaagttctccccattttagttttctaggactgaaaggattcttttctacattatacatgtgtgttgtcatatttggcttttgctatatactttaacttcattgttaaatttttgtattgtatagtttctttggtgtatcttaaaacctatttttgaaaaacaaacttggcttgataatcatttgggcagcttgggtaagtacgcaacttacttttccaccaaagaactgtcagcagctgcctgcttttctgtgatgtatgtatcctgttgacttttccagaaattttttaagagtttgagttactattgaatttaatcagactttctgattaaagggttttctttcttttttaataaaacacatctgtctggtatggtatgaaaa

SEQ ID NO: 68536 - DNA, 652 bp, Homo Sapiens
caggaagcataaaaaaacagcaaagcacacgagtatacttccaaactgtgaaaatacaataagatcacaggaacaaatatgaccacgcagcagcgtacgtactgtataggccatattcctttacgtgggacattaatgaaaagctgtcttttccaaactgaatgcgcctattaataaaaaaatacacctgaccatctaatgctgaagtcatccgccaggatggtactggaaattgagtggctaatgtggagaaaacgcaggcagaaaaacaggggagacaaaacgaaaggctctcttggtttgagcctgtccaagcagccacgactccttatcaggtgaacacagttcgtcagttggccacctaaagtacaagtgggagaaattcatcatcacaacataaattttgagcttgatattctcatatccgggagtcaaacaaacccaaccacctgtgcacaatgcttccacctgcaggaaggtcatcgcaaacgctccaatctcgtaacaacattcacacgtttccagcatgtacctccgcttcacacctctctccccccacgtagtgacccaccaggtctacgtcctgaaaatacttccagcggtcatgactctttacaacaacatatcaaattattttctctaattacctatg

SEQ ID NO: 68537 - DNA, 1087 bp, Homo Sapiens
agtgaggatgaacccgttatgtctcccctgaccccgctccgtggtgtgttagtgaccaaccggacagtctctggtccgcacgccgcgcctaagacctgcctgacacaacacagtgtaaatcacacccacatatttgactattcttcatccggggtccaccaaccaacacgtggacaggttcacctgcagaaggctatccaacgctcccattgtcggacccaacagtaaaacggttgcagcagggtactcccgttcacacgtctcgccccccacgtagtgaccccaccaggtctacgtcctgaaaatacttgcagtggtcaggactcttgccacacatatcaaattatgttctccggaagtacctatgaaaaagaatgaaaccactccgcggagagcgtggcacggctctgcgctcccctccctgcctacccagcgccttccacgcgggacactccccgccgcgctccgctccagacccgcgcggcctcgccggctcagcagcactcgcagccggcgatccgctggtgcagctccacgatccgcctgcccatccgcgccgcctccgcagccttcctctctgcttcggcgcacagccgagccacccgctcctcagcctccgcacgcgggcggggtgctggggcccgggcgccccgctcctctgcctccacctcactcttgatggcgtcgagcaggctctggatctccagcagcttcctgcgggcccgccagtgcgcccgggcgcgctcgcgctccagggaggccaggttctcgcggccggcgcggggcgcggggctcagcgggctgcccggctcctcgcggggctcccgcgcctcgtccgcgtccacgggccgcatcacgccgccgcctcttccagcccgcggggcacgccggggctgctcaccagcagcgagcgcggaagcctcgctgtcaccaacgaccagactagcaacaggttgccccaactttccgcagcgaggacggtatccaaaatgggctactagccgtcggccagggcgctgccactgcgcccttatacgacacctgcgcctcgtgccaattaaccccaggcctcgtacttagcctactt

SEQ ID NO: 68538 - DNA, 452 bp, Homo Sapiens
tttatagcattttgctttttcttggaatgtaattttcctatggcatgttaactggtgcacatcgtgtaacctgtctggtgagcaacctacaattgggatgagttctaggtacatgtgtttgctgactttggggtaaacaactttgttataatacagtctctgccacagatgcatgtgacctcttcaggggcccagagtggctgaggaaggaaagcttcaagctggccatgggggtcccaaacagtcattccaggcttagatgatgactagcctaggtcatcagagcccagactccacagagactaaaatcagagctctgtcttgttatgataaatttcatttgcttggaaaaagaaatgctgaaagccagtgtttagaatctttgtgcagatgaccaaagcaattgacttggccaagaaaaggtaaggtaaataaacatttttcaaaatgaa

SEQ ID NO: 68539 - DNA, 1013 bp, Homo Sapiens
  misc_feature (48)..(48): n is a, c, g, or t
  misc_feature (64)..(64): n is a, c, g, or t
ccctaaactgcaatgatgtgatgaggagcagatgtacccgctacaccncagggaacaggtggtngatgaggttgatgattcagtgagtgtaaatgacatagaattaagcctgtacatcacaaggagatgtagatgaaccaagtataactgtacccagtcttgaaagaatcagcacatgtacttcagataaagatgaaaccaaattaagtgaaagcttctggaggtagcggctgaaaatggtgaaagaagtgacttggaagaggacaacgagagggagggaacggaaaatggagccattgatgctgttcctgttgatgaaaatcttttcactggagaggatttggatgaactagaagaagaattaaatacacttgatttagaagaatgacaccaaacacatcgctgaaaaaattaagtcagctcagcacgagttgaaattgactacattaatttctttccacctagaatcaacaggatgtttatttcctatgctgattctggaggagttaacctcctgcaaaaaaggcatcttgtccctacatcttctcttctgactttggctacatctcatagtaagttcagagtagttcatgataaattgaaaatataatggtcattgcagaaaatgattgatgttgtaactgtccacccaagtaagaagtgtatctgcctttccatcttttggttttcatttgggcatgtgctattaccagaaacaacaaacttatatttaaaatacccttcatttgacacagtttttaatgagtgatttaatttcctctgtatttgtatgtttagaagactgcctaaaacatgagcactgtacttcataaaggaaactgcgtatgcagattcagtattgtgtatctttggacaattagatggacatttaaaatggaacttcttttatctgacaggatcagctacaatgccctgtgttaaattgtttaaaagtttcccttttcttttttgccaataaagttgtaaataaagaccatcatacattaaaatcc

SEQ ID NO: 68540 - DNA, 1014 bp, Homo Sapiens
  misc_feature (166)..(166): n is a, c, g, or t
  misc_feature (249)..(250): n is a, c, g, or t
  misc_feature (256)..(476): n is a, c, g, or t
  misc_feature (498)..(515): n is a, c, g, or t
  misc_feature (689)..(739): n is a, c, g, or t
ccgtacgagtgacggaccagagatcagggacctgtttttgctcggtcccccttatgactgatttttcttccgggcgactttgaaacccgcaccgcttttcgtctgccttgtgcccttcccaatgttttctggttcccagatttgtgaaccgttaccctttgatgantatacgtcccgcaccgacgaccggccagcgatcgtgaggagaagcgaagacccccatacgcaacccgccctccccggcgtgcnngatcannnnnnnnnnnnnnnnnnnnnnnnnnnnnnnnnnnnnnnnnnnnnnnnnnnnnnnnnnnnnnnnnnnnnnnnnnnnnnnnnnnnnnnnnnnnnnnnnnnnnnnnnnnnnnnnnnnnnnnnnnnnnnnnnnnnnnnnnnnnnnnnnnnnnnnnnnnnnnnnnnnnnnnnnnnnnnnnnnnnnnnnnnnnnnnnnnnnnnnnnnnnnnnnnnnnnnnnnnnnnaagaattcggcacggaggggcnnnnnnnnnnnnnnnnnnaaaaaatatgaacccaaactcccgcctcacttcgtctctacagaatgttcacagcaaaacacgtttggtctgtttttagattcttgaagaattcaatagtctttcaagatgtttaatgtgtttaaagctgggaacctgttgggagttcacaagtgctgcatatactgggtagcnnnnnnnnnnnnnnnnnnnnnnnnnnnnnnnnnnnnnnnnnnnnnnnnnnngcaaatttgccaaggtttagctgctcatttacattagtgtgtgtgcattcgttcagccccatggtggtgaattctgtttctttcctttcctaaggctgggacatggtgggcatcagggactttgtgctaagcctgatgaaatgtgctccttcaatctccatgaaaccatcgtaacatggaggcctcagctgctctgaggagagaaatcagactttgttttttgaaatcgattgggatcgaaagcctgaaataaatattcatactttccatagaaa

SEQ ID NO: 68541 - DNA, 622 bp, Homo Sapiens
  misc_feature (557)..(557): n is a, c, g, or t
  misc_feature (567)..(567): n is a, c, g, or t
  misc_feature (578)..(578): n is a, c, g, or t
  misc_feature (599)..(599): n is a, c, g, or t
  misc_feature (604)..(604): n is a, c, g, or t
cgcagggtatctgtcagatgctttcaggcaggtactgaagtttggagagctgagtcataagtaatattgattatttaaggccaattataaatctgtcttaaaaaaagacttaccgtaaaccatttctgtgtcaacctcccttcaggaaacaagtttcagccactaaggccgaagcagaaaaggatggagtgaaggtccccacaaccctgggcggaatactgcatcaaaactaaagtgccttccaatgacaacagctcagatttgctttacgacgacttgtatgatgacgacattgatgatgaagatgagggagggagggaagatgccgactgttatggatggatggatggattctggggaattgagggagttcgttgacgtggcttcctttcagtggccccctgttacttgccctggcccttcttcagggcccaaaggggaggggggagccaagttgggggacccggggccatggcccccttcaggcaaaaaccttttttcaccagccgggttgggggaaacacacacagttcctgttgaatttccctttttggttntcagtttgtnccctttttttnggacctttattgggggagagngttanccttccacagattttttt

SEQ ID NO: 68542 - DNA, 1095 bp, Homo Sapiens
gacgagtccgacctctacaactgggaggtggccatcttcggaccccccaacaccctctacgaaggcggctacttcaaggcgcatattaaatttcctattgactacccctattcaccacctaccttcagattcttgaccaaaatgtggcaccccaacatttatgagaatggagatgtatgcatttcgattcttcatccgcctgtagatgacccacagagtggagaactgccttctgaaaggtggaatcctactcagaatgtgaggactatcctattaagtgtaatctcactgcttaatgagcccaacaccttctccccagccaatgtcgatgcttcagttatgttcaggaaatggagagacagtaaaggaaaagacaaagaatatgctgaaattattaggaaacaagtttcagccactaaggccgaagcagaaaaggatggagtgaaggtccccacaaccctggcggaatactgcatcaaaactaaagtgccttccaatgacaacagctcagatttgctttacgacgacttgtatgatgacgacattgatgatgaagatgaggaggaggaagatgccgactgttatgatgatgatgattctgggaatgaggagtcgtgacgtgctccttcagtgcccctgtactgccctgccatctcaggccaaagggaggggagcaagtggggaccccggccatggccccctcagcaaaaaccctattccacagcgggtggggaaacacacacagctccctgctgactcccccttatgggatcctcagtttgctcctttttatgggacctttaatggagagagagtaaccctcccacagaatgtctgaattcttgcattctttacccttccatcactatattgattcttttttaaaaaacatgaacccaaactcccgcctcacttcgtctctacagaatgttcacagcaaaacacgtttggtctgtttttagattcttgaagaattcaatagtctttcaagatgtttaatgtgtttaaagctgggaacctgttgggagttcacaagtgctgcatatactgggtagcaaaagaaaatggaaaaaaacccacaaaacaaactttaaa

SEQ ID NO: 68543 - DNA, 1217 bp, Homo Sapiens
  misc_feature (78)..(112): n is a, c, g, or t
ggatcactcactatagggcgctagctcgcctgagcgaacgaccgagcgcagcgaagtagtgagcgaggaagcggccgnnnnnnnnnnnnnnnnnnnnnnnnnnnnnnnnnnncagtcgacggtaccggacatatgcccgggaattcggccattacggccgggtgtcagagtcaattgattaaacctcatttatacttctagtgtcattttatatgactagtttacaaaataggacattgagtttccaagtattgagataagggaatataaatagtattatatgtatcaggaaatctctcatcttgtttttgtttcatgtattttttaaagttttcatttgtgccacaaaaatctgtcgtggaatatattttattttcattaattcagtgaagttgagacttcatagtaattttagaatgcaacttgaaggtaaaaattttactttgtcaatactgaagtctctgctgtaatccttatatatctttctccagagaacataatattgtcaaatagatacacatttttctaataggtatttagaagcacttgaaatattcttaatctctgcatgtgttacaattcagttatttctgtagtttgtaaactctaaagtgacattactattattttagagatgtctaagttgtaattttgatttttgtggaaccattgtttgttaatgttgggattctctgcacttttgaatgtgaaagcttatatccctgaattctgatacttaagagttttctatttcagacatctctgtgtggaagttgagactaagaataatcctagggatgtcatgaatttaggcaatgtttctcatttggaaaatgaaatgagaaataatttccttctttaaagcaagtatatatagtatgagaaacttggaggcatttcatacacacgtttcttaggaaaatggacacattgaaaatgtcctcttttttatattagagattctgcagctctttgctcttaagagcaaatcacaacaggattcttaatgtatgatttctttgttcatatattatgaatgtattattttatttgcttcgtaataaagtttataaggaagagcatctcatacatatcattatcgtggaacacgttgaatgtttgtgattctgtgtggcctttttggggctggaaaatgtatgaattcttcaactgtcttacaagagatctgctaataaattttattattaaatagggct

SEQ ID NO: 68544 - DNA, 1036 bp, Homo Sapiens
  misc_feature (88)..(122): n is a, c, g, or t
aagaaactgatagactcactatagggcgctagcgtccgttgtagccgaacgacgagcgcagcgaagtagtgagcgaggaagcggccgnnnnnnnnnnnnnnnnnnnnnnnnnnnnnnnnnnncagtcgacggtaccggacatatgcccgggaattcggccattacggccgggattgaaagtatcttgatgtctttacctctaactgcccgatgggagtacatgcattcaccctcagagaattccaaagaagctgaaattctggaagttctacgccatccaagggactgggtgcgttgatgcaggcagaatggctgtgcaggggtttggagggcacacgatgtgtgctccccatgccactggtcggcactttgccactgtgtggcagttacccgtgccttagtcttctccactctgcaccctacctcgtgggcagatgataacatgttttggatgctgtcagtgatgaatggtgagatggcagattgtcagagtcaattgattaaacctcatttatacttctagtgtcattttatatgactagtttacaaaataggacattgagtttccaagtattgagataagggaatataaatagtattatatgtatcaggaaatctctcatcttgtttttgtttcatgtattttttaaagttttcatttgtgccacaaaaatctgtcgtggaatatattttattttcattaattcagtgaagttgagacttcatagtaattttagaatgcaacttgaaggtaaaaattttactttggtcaatactgaagtctctgctgtaatccttatatatctttctccagagaacataatattcgtcaacatagatacacatttttctaataggtatttagaagcacttgaaatatcctaatctctgcatgtgttacattcagttatttctgtagtttgtaactctaagtgcattactattttttagagatgctagttgtatttgattttgtgaacatgtttgtaagttgttcccaaatctgctggaaattttatttatatccctaattaaa

SEQ ID NO: 68545 - DNA, 1782 bp, Homo Sapiens
tagcgaggcctgggtggcgaattcggcacgagggcgccatgatgtaccacaccatcaccctcaccagggaggacctgggagaagttcaaggccctgagagtgatcgtgcggataggcagtggctatgacaacgtggacatcaaggctgccggcgagctcggaattgccgtgtgcaaaatcccgtctgcagccgtggaagagacagtcggactctaccatctgcgcacatcctcaacctgtaccggaggaacacgtggctgtaccaggcactgcgggaaggcacgcgggttcagagcgtggagcagatccgcgaggtggcctcgggagcggcccgcatccgtggggagacgctgggcctcattggctttggtcgcacggggcaggcggttgcagttcgagccaaggcctttggattcagcgtcatattttatgacccctacttgcaggatgggatcgagcggtccctgggcgtgcagagggtctacaccctgcaggatttgctgtatcagagcgacttgcgtctccttgcactgcaatctcaacgaacataaccaccacctcatcaatgactttaccataaagcagatgaggcagggagcattccttgtgaacgcagcccgtggcggcctggtggacgagaaagccttagcacaagccctcaaggagggcaggatacgaggggcagccctcgacgtgcatgagtcagagcccttcagctttgctcagggtccgttgaaagatgccccgaatctcatctgcactcctcacactgcctggtacagtgagcaggcgtcactggagatgagggaggcagctgccaccgagatccgccgagccatcacaggtcgcatcccagaaagcttaagaaattgtgtgaacaaggaattctttgtcacatcagcgccttggtcagtaatagaccagcaagcaattcatcctgagctcaatggtgccacatacagatatccgccaggcatcgtgggtgtggctccaggaggacttcctgcagccatggaagggatcatccctggaggcatcccagtgactcacaacctcccgacagtggcacatccttcccaagcgccctctcccaaccagcccacaaaacacggggacaatcgagagcaccccaacgagcaatagcagagaatgccagaaggtaatcactcagatacacttgggaccaagagacagtgaaaaatagatgaactaagagaaaaagaatcggatggtctttgtaactgattctggacatatgcatcattgatgttgcagtgttgaaactacaagagctagaaaactgaagatgtcgtctgcttacggaagcgctgaaagactaggatgtgatttattaacgaccaacttctgttattgtgtgttaagtttttcatctgtgcatcaaatcacaaaaagaataaatagagctttttcctttatcagtcccttgggcacagcaggtcctgaacaccctgctctacaatgttgcatcaagagttcaaacaacaaaataaaaaatattaagaggaaatccccatcctgtgacttgagtcccttaagtctacaggggctggtgacctctttttgctaataggaaaatcacattactacaaaatggggagaaaactgtttgcctgtggtagacacctgcacgcataggattgaagacagtacaggctgctgtacagagaagcgcctctcacatctgaactgcatactgagcgggcaagtcggttgtaagttcagtaaaaccctctgatgatgcgaaaacccaatatacattta

SEQ ID NO: 68546 - DNA, 810 bp, Homo Sapiens
  misc_feature (22)..(22): n is a, c, g, or t
  misc_feature (45)..(45): n is a, c, g, or t
  misc_feature (52)..(52): n is a, c, g, or t
  misc_feature (57)..(57): n is a, c, g, or t
  misc_feature (62)..(62): n is a, c, g, or t
  misc_feature (117)..(117): n is a, c, g, or t
  misc_feature (698)..(750): n is a, c, g, or t
gccccctcaggaaaattaaggnagccattggtaaaatccctgctncccaccnagggngcccngggggaaccaaacttccatgtccatggccccatcaggttgtcttagcaacagccnttcaagtgaaaggcaatactgtctgtgatggtagtgttttcacttctgacttgatgtctgactggagcatctcttcgttttcaacgttcacttctcgtgatgaacaagacttcagaaatggccttgcggcattagatgccaacatagctagactccagaagtctttaaggactggtcttctggagaaatgaattcagaagaaaattcatcaggtgcttctttttaaaactagaacttggctatattgaatgtgtatttttctttagtgaaatgatgttttatgttattatgtgtgaagtaatatattgtacaagtaataaatgtattgttgagatatattgacactgaggagcttataaaaacaagtcatcttaagttcacaattgctacaagaagaaagttgtggataactaggaaattattgtaagtaatgttttatttcagtacttagcaattagagttcttttattaagatgtatctgctggattaagggtacaggttgaaatagttctgtggctgtcctaagaaataatgggaaaagaatctctggatgtaagtttttctgttgaaactagagggnnnnnnnnnnnnnnnnnnnnnnnnnnnnnnnnnnnnnnnnnnnnnnnnnnnnnacatgctgtgtgccacaggcccgtgttgttggtgaaatatataaacatttatttaaaggg

SEQ ID NO: 68547 - DNA, 2202 bp, Homo Sapiens
tgcatggtgacctatagaaccagtggtgacaaaaaagcaggctggtaccggtccggaattcccgggatatcgtcgacccacgcgtccggagacgctgatgggaggatggacgtactggtgtctgagtgctccgcgcggctgctgcagcaggaagaagagattaaatctctgactgctgaaattgaccggttgaaaaactgtggctgtttaggagcttctccaaatttggagcagttacaagaagaaaatttaaaattaaagtatcgactgaatattcttcgaaagagtcttcaggcagaaaggaacaaaccaactaaaaatatgattaacattattagccgcctacaagaggtctttggtcatgcaattaaggctgcatatccagatttggaaaatcctcctctgctagtgacaccaagtcagcaggccaagtttggggactatcagtgtaatagtgctatgggtatttctcagatgctcaaaaccaaggaacagaaagttaatccaagagaaattgctgaaaacattaccaaacacctcccagacaatgaatgtattgaaaaagttgaaattgctggtcctggttttattaatgtccacttaagaaaggattttgtatcagaacaattgaccagtcttctagtgaatggagttcaactacctgctctgggagagaataaaaaggttatagttgacttttcctcccctaatatagctaaagagatgcatgtaggccacctgaggtcaactatcataggagagagtataagccgcctctttgaatttgcagggtatgacgtgctcaggttaaatcatgtaggagactgggggacccagtttggcatgctcatcgctcacctgcaagacaaatttccagattatctaacagtttcacctcctattggggatcttcaggtcttttataaggaatctaagaagaggtttgatactgaggaggaatttaagaagcgagcatatcagtgtgtagttctgctccagggtaaaaacccagatattacaaaagcttggaagcttatctgtgatgtctcccgccaagagttaaataaaatctatgatgcattggacgtctctttaatagagagaggggaatccttctatcaagataggatgaatgatattgtaaaggaatttgaagatagaggatttgtgcaggtggatgatggcagaaagattgtatttgtcccagggtgttccataccattaaccatagtaaaatcagatggaggttatacctatgatacatctgacctggctgctattaaacaaagactatttgaggaaaaagcagatatgattatctatgttgtggacaatggacaatctgtgcacttccagacaatattttgctgctgctcaaatggattggttgggatgaccctaaagtaactcgagtcttccatgctggatttggtgtggtgctaggggaagacaagaaaaagtttaaaacacgttcgggtgaaacagtgcgcctcatgaatcttctgggagaaggactaaaacgatccatggacaagttgaaggaaaaagaaagagacaaggtcttaactgcagaggaattgaatgctgctcagacatccgttgcatatggctgcatcaaatatgctgacctttcccataaccggttgaatgactacatcttctcctttgacaaaatgctagatgacagaggaaatacagctgcttacttgttgtatgccttcactagaatcaggtctattgcacgtctggccaatattgatgaagaaatgctccaaaaagctgctcgagaaaccaagattcttttggatcatgagaaggaatggaaactaggccggtgcattttacggttccctgagattctgcaaaagattttagatgacttatttctccacactctctgtgattatatatatgagctggcaactgctttcacagagttctatgatagctgctactgtgtggagaaagatagacagactggaaaaatattgaaggtgaacatgtggcgtatgctgctatgtgaagcagtagctgctgtcatggccaaggggtttgatatcctgggaataaaacctgtccaaaggatgtaatccttcataggtttgaacactgtgtgtttttaccaaagtggccattggcactgtttgcttttttacaatcatgtggacacaagcataagtaaagaaaatttgtcagccatat

SEQ ID NO: 68548 - DNA, 1053 bp, Homo Sapiens
  misc_feature (152)..(152): n is a, c, g, or t
  misc_feature (184)..(184): n is a, c, g, or t
  misc_feature (186)..(186): n is a, c, g, or t
  misc_feature (192)..(192): n is a, c, g, or t
  misc_feature (200)..(200): n is a, c, g, or t
  misc_feature (202)..(202): n is a, c, g, or t
  misc_feature (306)..(306): n is a, c, g, or t
  misc_feature (310)..(310): n is a, c, g, or t
  misc_feature (399)..(399): n is a, c, g, or t
  misc_feature (437)..(437): n is a, c, g, or t
cgttgtacgattaacaggaccctcccgggcgaagttgtgtttgctttttagattgacaatggctcctcttgactgagaattcgaccccccagtaatttcaaagcctcttcacagatggtcagatcttttatcaggtgctttcaccccccacntcaaaagagttggagaatactcgatagacatntnaatgantatgatcntncgtaaatactgtagatgacaaaagtgttacatgatacaaatgaactttctaaagttatgtatcagtcttgcacttcacatccagcaaataagtcaatgctattntatntgcagcctatgagtacacatctgtctatatcacccctaccactatattcatcacataaaaacctaaaatattcatgaataattcatganatctgagtcacatgggatgaattcaattttaatatttntgagaaaagtcctgctcatttgcactattctatagaaactacaatttgttgccctatatgtaaaattagaattgtaattaaaaatacacattttattatgtaatcatgttctggtatgtctcatttctcagccttattttataacgtggaagtcattgaactatgttatcagaaactaagtttgtatattatttgtgaaaaacatgtatttctgaatcagtccgctaatatgattgtgcagtattagcttgcttttgctgctgtgttaatgtcatatatttgcttaccttttgggttcaattatctacataattgtgaaatttaacaagttataataaagcatgacaaccaaagttttagaaaacattaaacattttaaatgcacgtttaaaaaacgtgttgaatgtaacccccctatttttgtgtgcaaacactaaattttattgctttatgttttgacctttataaaggtgttattctgctgcccagttttgtaattctcaaaaatagtgccaggtcttctatagcttttttcagaattcatgggcttacaagtactgtatgcatctttaaaaagaaacaggaatgttataaaataaaaaggatttatttcttt

SEQ ID NO: 68549 - DNA, 395 bp, Homo Sapiens
ttttgtaaacagattctatttggttaatagaagtattccttccatcaacctatcgaagtccaaaccaactacgaagataggatgctcatccagaagaacgggaagcattttcttcctcatcttgagcaaccgcagcaagttttcccttttcttcagggctgagctgcaacatcgtatttataacaggaagaagtctctctctttcactacctggtttcaagaaaatgaactgcagcaagacgttcttcaagtattccaggttagctgcagacttctctcgctcttgattcctttccaatcttcttatttcacttttgagaagcttaatttgctccataaggactgcattggttgatggaaggaatacttctattaactaaatagaatctgtttac

SEQ ID NO: 68550 - DNA, 620 bp, Homo Sapiens
  misc_feature (14)..(14): n is a, c, g, or t
gaaaaatacatganttcagtctgccatatttaatcagaagctcctaaagcccatttttaactcatttctctaacaccagcttctcaaaagtgaaataagaagattggaaaggaatcaagagcgagagaagtctgcagctaacctggaatacttgaagaacgtcttgctgcagttcattttcttgaagccaggtagtgaaagagagagacttcttcctgttataaaatacgatgttgcagctcagccctgaaggaaaagggaaaacttgctgcgggttgctccaaggtgggtaaaaggagagtctcagaacttctgacttctaacttaaactaaacagcctggtggttgagaagttgtctgtatgtgtaacttttcaattttgctcatttgaattgggtctgtcagatgagtaggccgtgactagatttgaaaagctgactttttaacatcttgaggcaactgtagtacatttatataattttaacgttcagcaaaatacaataagtgcttagcttgatcttctagctctttgaaaattggatttttatcctggtgttgagttctggtgttcagctgaatgtggttttgttttaaattctactttttaaaaaccaaaaaaa

SEQ ID NO: 68551 - DNA, 1206 bp, Homo Sapiens
  misc_feature (67)..(101): n is a, c, g, or t
actattgggcgcatgcgtgtcgcagcgaacgacgagcgcagcgagtagtgagcgaggaagcggccgnnnnnnnnnnnnnnnnnnnnnnnnnnnnnnnnnnncagtcgacggtaccggacatatgcccgggaattcggccattacggccgggaggtttgaaaagcagagatgatgtcccaaaactagtgactgagttcctggcaaagaaatttgacctggaccagttgataactcatgttttaccatttaaaaaaatcagtgaaggatttgagctgctcaattcaggacaaagcattcgaacggccctgacgttttgagatccaaagtgccaggaggtctgtgtgtcatggtgaactggagtttctcttgtgagagttccctcatctgaaatcatgtatctgtctcacaaatacaagcataagtagaagatttgttgaagacatagaacccttataaagaattattaacctttataaacatttaaagtcttgtgagcacctgggaattagtataataacaatgttaatatttttgatttacattttgtaaggctacaattgtatcttttaagaaaacatacacttggatttctatgttgaaatggagatttttaagagttttaaccagctgctgcagatatataactcaaaacagatatagcgtataaagatatagtaaatgcatctcctagagtaatattcacttaacacattgaaactattattttttagatttgaatataaatgtattttttaaacacttgttatgagttaacttggattacattttgaaatcagttcattccatgatgcatattactggattagattaagaaagacagaaaagattaagggacgggcacatttttcaacgattaagaatcatcattacataacttggtgaaactgaaaaagtatatcatatgggtacacaaggctatttgccagcatatattaatattttagaaaatattccttttgtaatactgaatataaacatagagctagaatcatattatcatacttatcataatgttcaatttgatacagtagaattgcaagtccctaagtccctattcactgtgcttagtagtgactccatttaataaaaagtgtttttagtttttaacaactacactgatgtatctatatatatctataacatgttaaaaattcttaagaaaattaaaaattatataaaatgaac

SEQ ID NO: 68552 - DNA, 646 bp, Homo Sapiens
  misc_feature (327)..(337): n is a, c, g, or t
ttgatactcaagatctttactgatttaactataacagcaaccattgatgagaatttaattttttccttaatttccaaacatctgctggtttggaagaatagttaaaatacaaaaacaactgatcatggaatcacacaggactgcctcaaggactgcgtggtaccctctgctatccatccacacacagtgaaatggatgggagggatgagggaacaacacatcatgggagacaaagggaagaccaaggaaagtgctggcagtctccgcttttccattcagaatggatggaactgggccgttagtggcactaagacagggcagggctannnnnnnnnnnaaataaaatattttaaagatgcataaaatggacaccttagcacgtgagtgtcctttgggctcttcaagacaccttctttaaggtttacccctggagtagcagagggtctcctcacccaggtggaaagagatgggctccatctgcagatgaaggaaaggcactggcgcacagcactcagcaatgtagatacaggcaccaggtaggagcaggatggcttacccagcaacctgcctcttagctccctgctagtgttcttccctcctccccagtttccagttaaaagtacccttggcctgggctttaaaaaaa

SEQ ID NO: 68553 - DNA, 962 bp, Homo Sapiens
gcacgaggcaagctacaaaaagctctctaagttcctgcagcaaatgcagcaggagcagattatacaggtgaaggagctgagcaaaggggtggagagcattgtggctgtggactggaaacacccgaggattacatctttcgtcatacccgagccctccccgacctcccagactatccaggagggtagcagggaacagccctatcaccctccagatataaaacccctctactgtgtcccagccagcatgaccctgctcttccaggagtctggccacaagaagggagctttctggagggcagtgaggtccgaacgatcgtcattaactacgccaagaaaaatgacctggttgatgcagacaacaaaaatcttgtgagattggatcccatcctatgtgactgcatcttagagaaaaatgaacagcatacagtcatgaagcttccatgggacagtcttctgaccaggtgtttggaaaaattacagcctgcctatcaagtgacccttcccggacaagagcccattgtgaagaaagggagaatctgtccaattgacatcaccctagcacaaagagcgtctaataaaaaggtgaccgtggtccggaacttggaggcctatggtctggacccatactcagtggctgccatccttcagcagcgatgccaggctagcaccaccgtcaatcctgcccctggggccaaggacagccttcaggtgcagatccagggaaaccaggtccaccacctcggctggctattgcttgaagagtatcagctccctcgaaaacacatccaaggtctagaaaaggccctcaaacctggcaagaagaagtgacagactcttttgtctcacgtggtggatccggtggaaatccaagctctgggctggtaatttttatgagcattttcagcttttgcaaatacaaaatataattctttacaaaaataaatttttattctaatctaaaa

SEQ ID NO: 68554 - DNA, 1882 bp, Homo Sapiens
  misc_feature (1821)..(1821): n is a, c, g, or t
gctggtaccggtccggaattcccgggatatcgtcgaccacgcgtccggcctccccagcggcaacggccacgaagctgcgcggccctggtttccagccgggcccttttcgcggccgggccccagcatggctgcccccacaggctgagggcctggcagctgctgcgccctcgctttcttgacattccctggcttctgtgctctcttccccaggccaccccagcagacatgtttgccaaggcctttcgggtcaagtccaacacggccatcaatggggtcggacaggagaaagcttcgagctgatgtgacaactgctttccccacccttggaactgatcaagtctctgagttagtacctggaaaggaggagctcaacattgtgaagttgtatgctcacaaaggggatgcagtgactgtgtacgtgagtggtggtaaccccatcctctttgaactggagaaaaatctgtatccaacagtgtacacgctgtggtcctatcctgatcttctgccaacctttacaacatggcctctggtgctcgagaaactggtagggggagcagatttgatgctgcctggactggtgatgccccctgctggtctgcctcaggtacagaagggcgacctctgtgccatttctttggtggggaacagagcccctgtagccattggagttgcagccatgtccacagctgagatgctcacgtcaggcctgaagggaaggggcttctctgtgctccacacttaccaggaccacttgtggcggtctggaaacaagtcctctccaccttccattgctccactggccctggattcagcagatctcagtgaagagaaggggtctgtccagatggactccaccctgcagggagacatgaggcacatgaccctggagggggaagaggagaatggggaggttcaccaggcacgtgaagacaagtctctctcagaagccccagaagacaccagcaccaggggcctgaaccaagactccacagatagcaaaacgcttcaagaacaaatggatgagctgttacagcaatgcttcttacatgccttgaagtgccgagtcaaaaaggctgacctccctttactcaccagcactttccttggcagccacatgttctcctgctgccccgaaggacgacaactggacataaagaagtcaagctacaaaaagctctctaagttcctgcagcaaatgcagcaggagcagattatacaggtgaaggagctgagcaaaggggtggaagagcattgtggctgtggactgggaaacacccaaggaaggggagctttctggagggcagtgaggtccgaacgatcgtcattaactacgccaagaaaaatgacctggttgatgcagacaacaaaaatcttgtgagattggatcccatcctatgtgactgcatcttagagaaaaatgaacagcatacagtcatgaagcttccatgggacagtcttctgaccaggtgtttggaaaaattacagcctgcctatcaagtgacccttcccggacaagagcccattgtgaagaaagggagaatctgtccaattgacatcaccctagcacaaagagcgtctaataaaaaggtgaccgtggtccggaacttggaggcctatggtctggacccatactcagtggctgccatccttcagcagcgatgccaggctagcaccaccgtcaatcctgcccctgggggccaaggacagcccttcaggtggcaaatcccaggaaaaccagggtccaaccaccctccggctgggctatttgccttgaaagagaaatccagctcccttcggaaaacacattcccaaaggctctanaaaaagagcccctcccaaaccctggccaagaaaaaatagtgggacaagaactcctctttta

SEQ ID NO: 68555 - DNA, 1826 bp, Homo Sapiens
  misc_feature (1637)..(1687): n is a, c, g, or t
taggttcttgttttcacaggccaattttggcgaaccctactccctgtggtgttttctccaactattcaaagtctcaagctaccgtcaacgttgaatggaaaggcatcccttatttgcggcagtgcacttgtcttttcctttcgtcaaaatgaatgtaaaaaggttggaccaacactgattgttcaacctctctatgtcccagggttctttccgccttgtctctactccctctctttggatctggggaggaggggcagagacctgggactctgtatttctatagttctcctggcagagcctttgagaatggggagaaacagcctgggctggggctacaggtctgtcactatgctctcttgccttcagacagaccattctgaattctctaaagggaaagggcttttgcatctaatcacaatagagttgaaagagaggccttaggattctcctctctctaggtgctgagccctcacctccctgttccaggctgagaactcaaatggttaccctgcttcttcctacaatgctgtgtgatatgggtgaacccagcccctgaccttcctctatcccctgcccatcctcccttttacctcctctcttttttaaacacctgtttatcccaacctttttgagctcaagctgtgataaagaagggcccatcctatttcccctcatctagtccatttacgattctcactgactccccgtcttcctggcagacacaaataaacccagtgtcaggtctaggaaattaatggctattcttccccagatacattctggcttatttgagatacatgattctcttagaatcctgtcccttggttcaggaaagtagcttggaaaaggagtaggggtatagcttgggtcccttttcctgcaaggccccatggggcagaatataataaatattctgagtgaggagtgtggtctttttctgatcttcctcagcttccgtaagttgcagagtgaggtatattaggagactagttctacacaatattgtaatgctgggttccatcaacacccaccttccacaactcagtctgcacctcagttggcaaaggagactggatggccatctttcctcatgttcccttgagtatttcaatgtagaaagcccttcaagtggtattatattttaaccttttacattattgttattaatgttagtaatatattgttatgttttctaaattatttttctttaagctgacgtggctttttttctgtggctcccagtgggtctacggaccttggctgacatatgttggtaggtactctggtcagctcagctggctgtcctggttcactcagaagataagtctctccaaagcaaattcacatgcattatgagtcgctttgagcttctgacatgtcacttgccccgaggttaaaacttttcaccccttgaagaccttacatgttttatggtattggtgaggaaagaaatgttctcaaagtctcaagctatttgggaaattccaactcctataccttaccagagcatggaaagagcccagatctgaatggtaaaacgtctctgttctgccagagatggaaaaaatacagggaatacttggtgatatagtcatggggctttcagtggcacctattttctccttaaaagctccaannnnnnnnnnnnnnnnnnnnnnnnnnnnnnnnnnnnnnnnnnnnnnnnnnngagcccctttctcctatgaaccttgtgggccttctggccctacccagttttcctttttaccggaatttctccacttcctggttaaccctaagcccaggggcttttactcccgggaatacctaaaataaaattgccccat

SEQ ID NO: 68556 - DNA, 1695 bp, Homo Sapiens
  misc_feature (29)..(29): n is a, c, g, or t
  misc_feature (40)..(41): n is a, c, g, or t
  misc_feature (104)..(476): n is a, c, g, or t
  misc_feature (521)..(537): n is a, c, g, or t
  misc_feature (635)..(635): n is a, c, g, or t
tcgatttttgtgctgtcagggggcggacntatggaaaacnncagcacgcgccttttacgtctgcccctttgttgccttttgctcacatgtctttcctgcgtatnnnnnnnnnnnnnnnnnnnnnnnnnnnnnnnnnnnnnnnnnnnnnnnnnnnnnnnnnnnnnnnnnnnnnnnnnnnnnnnnnnnnnnnnnnnnnnnnnnnnnnnnnnnnnnnnnnnnnnnnnnnnnnnnnnnnnnnnnnnnnnnnnnnnnnnnnnnnnnnnnnnnnnnnnnnnnnnnnnnnnnnnnnnnnnnnnnnnnnnnnnnnnnnnnnnnnnnnnnnnnnnnnnnnnnnnnnnnnnnnnnnnnnnnnnnnnnnnnnnnnnnnnnnnnnnnnnnnnnnnnnnnnnnnnnnnnnnnnnnnnnnnnnnnnnnnnnnnnnnnnnnnnnnnnnnnnnnnnnnnnnnnnnnnnnnnnnnnnnnnnnnnnnnnnnnnnaagaattcggcacgagggatgttggagcggccgcggctgtaggcnnnnnnnnnnnnnnnnnttttgttttttggctctttcaaaggtaatggcccatcgatgagcatttttaacatactccatagtcttttcctgtggtgttaggtctttatttttatntttttcctgggggctggggtgggggtttgtcatgggggaactgccctttaaattttaagtgacactacagaaaaacacaaaaaggtgatgggttgtgttatgcttgtattgaatgctgtcttgacatctcttgccttgtcctccggtatgttctaaagctgtgtctgagatctggatctgcccatcactttggctagtgacagggctaattaatttgctttatacattttcttttactttccttttttcctttctggaggcatcacatgctggtgctgtgtctttatgaatgttttaaccattttcatggtggaagaattttatatttatgcagttgtacaattttatttttttctgcaagaaaaagtgtaatgtatgaaataaaccaaagtcacttgtttgaaaataaatctttattttgaactttataaaaagcaatgcagtaccccatagactggtgttaaatgttgtctacagtgcaaaatccatgttctaacatatgtaataattgccaggagtacagtgctcttgttgatcttgtattcagtcaggttaaaacaacggacaataaaagaatgaacacattcctcgtgtgtgattcactcttgtctaaatgtcccaacctgtgacttctttactttccacaccactaattatccaagatcttgaagaagtattgaacctctaataggccatcctctggcagatcagtacagtgaacagcattctggatcttagttttaccaaagattgctctgagagttccagggcgtaaatgccgggcaatttcaggatcagcaggtccacaaaattctcgaaatgtctttgtagcattattctgttgaatctccattgctacacaagggccagaatacatttctgtcaccatgtcatgatattcggtcactactcctttataaacttcatagaattcctcaacattaacccgatccatattgaacatctgcatagctgagatttcaaaaactgcatctcggatagccatcaggatctttcccaacagtccttcactgacagcatggtgtttacaatgcacgag

SEQ ID NO: 68557 - DNA, 733 bp, Homo Sapiens
gaattctgctcctctctcatcaatccaggacagtatttgaagtgtgagggctttgtgtatagttgtttatccattaccacatttttgtattttaatagtctacaggctatataaaagaacatggctttttgactgataaaagtgattacagatgttggctcaagttcagggccaccatcatatacctaacaagagttcatgattctttaggtaatgtcaaaacattttgtatttttccatcttaagctttataacattttgtgagtaagacaaatgttatttaaaattcttgttgtcagtccagcaattgaggctttcatagttcagtgttataatattcagtagggaccctcaacaaatatataaaaatatgttgctcactctataatcctcctatggctaacctctaggatagttctgccactatattttacttctttgccatcagcaagagtaggatttcatcaaggcaaggtaggaatctaaatgaaattgatatataaatgaattgatctaaatgtaaaagcaaatgaaaaatgcatgtgttttttcctgtcaaacatgtatacccttatgtatagagaccagtagtcacgtatggtgactgaaacaggattatgtaatccctaaaaagcagaatatgtaaaaatcacatgtatgcgtttggtttaggaatgtgcttttgtacttccacttgaataaaggtgtgtttggtattctgaaggaaaaaaaa

SEQ ID NO: 68558 - DNA, 1514 bp, Homo Sapiens
  misc_feature (1182)..(1206): n is a, c, g, or t
aggctatagtgactatagaacagtgggtaaaaaaagcaggctggtccggccggaattcccgggatatcgtcgaccacgcgtcgacctagagtatacctgtggttggttttataattaatcagctcgttacttcagcccatgaaaatggcatccaggctgccaggagattcagagctcaaaacaaggcgagcttgagttctgcactccagatgtgtgccaaaactagtaaaacttaacggacttacaaccttgtcagtttttttaatgaggcagggatactctgtttttcacactaaacatatgaatgcagcactgctgcctcagctcagcttcgtgcctgggttccccactggtctgggaagactgttgtgctccatagagcagtgcacatctgacccagagggtgggtgttcataactgctacttgctctgctctaccatgtttaaagaaatatttggatgttaaattaactcactatggtttttcacctgggaaggaaacaaattacgtactagagggcattgattggttaaaaacttgtgtatcccgggaaggacctgcggtacaggagtcagccatgtctgtgctgtgtggaaccacctgatgacatggttaacgaggaagacgatgtgttgaccggctgccgtttgaggactttggtcacccagactagacaccttctgtgctcatgtttggaaagctgaaagggaaggacagctgtgccctcctgggagctcatgtgtccctggcgctgtgctagctttcctttacagctgtttacagacaaggcaggcctgaggcagatggccactgctcttgtgatgtttgctcagaggaatatgaacattttatttttgaaaagggatgatgtggttttttgccaggtgtttataattaatcctttaatattatggttattaacctcttaaacatgaatgaattcttgattgttttaacacagtacctaagactaatgctttctgtggacaccactgagctctgcctcaactccaccctctgcgaccggaggactatgcccctagtaactgctgtcggtgtggacgctgtgctggttctgttttctaaaggagcagaaggacaggtctctgagacaggatcgttgtccctacaggaggaacagtggccttgcttcttagacggtcttcactgtgtgttttaannnnnnnnnnnnnnnnnnnnnnnnntaaaactcttttgacctgtaacttaaagatcataaacttcaggcaataatattttctgtgtaagcttttaaaattatttttggggatcatagcttgttttattttgtgctataaaattaacagtattaaatgacttatattcttagaatacatcgagtgtcttttcttaacagattagtgcctttttatttttgtattccgttttacgttactggtcccagcatcaaaacccttgtttccatggcctgtttgtatattgtctcaataaaacttgcatcagccggtggtggcggccaaaaaaactcgtg

SEQ ID NO: 68559 - DNA, 1121 bp, Homo Sapiens
  misc_feature (333)..(350): n is a, c, g, or t
aatgctccgactctgcagaggtgccaagtgcccctgctgggccagtcccagagagttaggaagtcaaggcctgcaactcctggttcttcctgtttggaccagttcttgtgccattggcaggatgagaggcagcagccaggcgggagctgtgtctagcagcacctgtagcccacgtgctgctaattagctggaaaactggcgaaggcagaacctttgctaccaggaatcttgacatgtggggtctgtctttgagaatttgtaaatgaacagtccaatatttcctctcggctcattttgcacatccatttttggggaaatgtgatttctctctcnnnnnnnnnnnnnnnnnngcctaaggcacaatctcaagaggtcctgagaccacgtacccatgatttttttcttgctctgtgatacccaataactccttcacctaagccctgttgttgattttgaagtgcttcctaggccagtgattttagcttctgccagctgcttttgccagtagattaacgtgtttttatttttcaaactccgtgtttcctaacgtggagtgtatgggtctaagagagcctgctgtcctccctgccttccaccttggagaggaggctggacgcatcagcagtggccagggcaggtcgcaaaatctcccagcctagagaccacacctgaaacggctgaagccagcttgcacaagggctgctgtccctctgcggcaggcagagctggtgggggcaggggtcacagagcagtcatagacaccatggaccagggcaggagaagggcagatggcacatgggcacaacagggccttgtccttagagcactggggggtcatggctgggaggggcatggcaggggctggcatccctgtagagccagaggggccacccagggcagtgacattccagatatgttgggctcacctcatccttgctgtgagactggagttccatggggacatgaagtcagtacaccgcagagctgctcagctgctctacctctcgctgacttttttgttgcacatatacattttctttcaattagcatttatttcagcttttatttaagctttttgacagtacatgtaaaatatatgattataaccatttaaaaataaa

SEQ ID NO: 68560 - DNA, 792 bp, Homo Sapiens
  misc_feature (333)..(370): n is a, c, g, or t
  misc_feature (720)..(720): n is a, c, g, or t
  misc_feature (731)..(731): n is a, c, g, or t
  misc_feature (772)..(772): n is a, c, g, or t
ttttgtgttttatattttttaataaagtttgtaatccaatggacacacaaaacaaaactgcgctgagaaaaacagtttcataaattaataagtgttaggaagttgggggaagagatcaaggtaataggaagaggggttagccagtctttttgtacaggtgccgtgtgacacttccacatcgcgggagcaggacccgtgctgtaccgaagcgcacttatacaaatgagtgggcaatacaaagtctgaatatgaaaataagatttcctctgaaaacacatttttggcacagattaaaaaaaacgtatgtcgggggatttgattttttaagtcagnnnnnnnnnnnnnnnnnnnnnnnnnnnnnnnnnnnnnncacacatcccaagttctgcatatcccaccaagagaaaacctttctgtttgctcttcaactgtaaactgtacatcccggtgaatcaaagacggtggcagcaggagaattaaggtgacgcatccaaatgagcaagggagatgggggtggacaaaaaaaaccaatgaaatgttccttgaccccaaggtctcagcagaagtttgaagtccttcctgcgttaagagtctgcaatgtgtgtctacacacaccaagacatccagagtgtcacagcctgtcttcactgggcaaaagtccaagtcactaatttagtgcaaaggcagttctgttttcttgtttcttaaaaacaaacaaanaaaaaattttnattccactgccctgttccttttctccaaaaagaggaaaaanaaacccagccccggtgtctg

SEQ ID NO: 68561 - DNA, 1335 bp, Homo Sapiens
  misc_feature (98)..(135): n is a, c, g, or t
  misc_feature (1168)..(1168): n is a, c, g, or t
  misc_feature (1245)..(1245): n is a, c, g, or t
  misc_feature (1258)..(1258): n is a, c, g, or t
  misc_feature (1276)..(1276): n is a, c, g, or t
  misc_feature (1292)..(1292): n is a, c, g, or t
gaggctcaagggggcggaggcggcgttgccgggctctccggaaggagacgtggcggcggttgggccggtgatacccgggcgctttatagtcccgccgnnnnnnnnnnnnnnnnnnnnnnnnnnnnnnnnnnnnnnggagcagaggaggttgtggcggtggctggagaaagcggcggcggaggatggaggaaggaggcggcggcgtacggagtctggtcccgggcgggccggtgttactggtcctctgcggcctcctggaggcgtccggcggcggacgagcccttcctcaactcagcgatgacatccctttccgagtcaactggcccggcaccgagttctctctgcccacaagtggagttttatataaagaagataattatgtcatcatgacaactgcacataaagaaaaatataaatgcatacttccccttgtgacaagtggggatgaggaagaacaaaaggattataaaggccctaatccaagagagcttgtggagccactatttaaacaaagcacttgttcctacagaattgagtcttattggacttacgaagtatgtcatggaaaacacattcggcagtaccatgaagagaaagaaactggtcagaaaataaatattcacgagtactaccttgggaatatgttggccaagaaccttctatttgaaaaagaacgagaagcagaagaaaaggaaaaatcaaatgagattcccactaaaaatatcgaaggtcagatgacaccatactatcctgtgggaatgggaaatggtacaccttgtagtttgaaacagaaccggcccagatcaagtactgtgatgtacatatgtcatcctgaatctaagcatgaaattctttcagtagctgaagttacaacttgtgaatatgaagttgtcattttgacaccactcttgtgcagtcatcctaaatataggttcagagcatctcctgtgaatgacatattttgtcaatcactgccaggatctccatttaagcccctcaccctgaggcagctggagcagcaggaagaaatactaagggtgccttttaggagaaataaagagggtgtcggttggtggaaatatgaattctgctatggcaaacatgtacatcaataccatgaggacaaggatagtgggaaaacctctgtggttgtccgggacatgggaanccaagaagagcatattgaatgggctaagaagaatactgctagagcttatcatcttcaagacgatggtacccagacantcaggatggtgtncatttttatgggaatggngatatttgtgatatantgacaacccagacaggtgactgtaaactaagtgcaagatccgt

SEQ ID NO: 68562 - DNA, 1782 bp, Homo Sapiens
aaaaatcaaatgagattcccactaaaaatatctaaggtcagatgacaccatactatcctgtgggaatgggaaatggtacaccttgtagtttgaaacagaaccggcccagatcaagtactgtgatgtacatatgtcatcctgaatctaagcatgaaattctttcagtagctgaagttacaacttgtgaatatgaagttgtcattttgacaccactcttgtgcagtcatcctaaatataggttcagagcatctcctgtgaatgacatattttgtcaatcactgccaggatctccatttaagcccctcaccctgaggcagctggagcagcaggaagaaatactaagggtgccttttaggagaaataaagaggaagatttgcaatcaactaaagaagagagatttccagcgatccacaagtcgattgctattggctctcagccagtgctcactgttgggacaacccacatatccaaattgacagatgaccaactcataaaagagtttcttagtggttcttactgctttcgtgggggtgtcggttggtggaaatatgaattctgctatggcaaacatgtacatcaataccatgaggacaaggatagtgggaaaacctctgtggttgtcgggacatggaaccaagaagagcatattgaatgggctaagaagaatactgctagagcttatcatcttcaagacgatggtacccagacagtcaggatggtgtcacatttttatggaaatggagatatttgtgatataactgacaaaccaagacaggtgactgtaaaactaaagtgcaaagaatcagattcacctcatgctgttactgtatatatgctagagcctcactcctgtcaatatattcttggggttgaatctccagtgatctgtaaaatcttagatacagcagatgaaaatggacttctttctctccccaactaaaggatattaaagttaggggaaagaaaagatcattgaaagtcatgataatttctgtcccactgtgtctcattatagagttctcagccattggacctcttctaaaggatggtataaaatgactctcaaccactttgtgaatacatatgtgtatataagaggttattgataaacttctgaggcagacatttgtctcgctttttttcatttttgttgtgtcttataaactgactgtttttctttgcttggatactgtgattccaaaataaatctcatccaagcaagttagagtccagcctaatcaaatgtcataattgttgtacctattgaaagtttttaaataatagatttattatgtaaattatagtatatgtaagtagctaatgaagtaaagatcatgaagaaagaaattgataggtgtaaatgagagaccatgtaaaatatgtaaattctagtacctgaaatcctttcaacagatttttatatagcaactgctctctgcaagtagttaaactagaaactgggcacatggtagaggctcacatgggagttgtcctcacccttgttaatctcaagaaactcttatttataataggttgcttctctctcagaacttttatctattacttttttcttcttatgagtatgtttactctcagagtatctatctgatgtagacagttggtgatgcttctgagactcagaatggtttactctaacaaaacactgtgctgtctatcccttgtacttgcctactgtaatatggatttcacttctgaacagtttacagcacaatatttattttaaagtgaataaaatgtccacaagcagtgttgtcatgtaa

SEQ ID NO: 68563 - DNA, 1788 bp, Homo Sapiens
  misc_feature (150)..(150): n is a, c, g, or t
  misc_feature (154)..(154): n is a, c, g, or t
  misc_feature (306)..(306): n is a, c, g, or t
ttccggatggagcgcagtggcgcacccattatggtgttgctcactcctagccccccgcttcacattttgctcccgctgtttgtgtttgaatgttggcgaaaaaaattccaccgggaaaagttagactggtaccgaattaatacgacctcntttnaggattgcccctgggagccaagattcggcaggagggagacccttgcttggaaacacacaggagagaaagaatcaggcaacagtgttctatagaaagggtgctgctcaggaagctgaggctgggacagggctggaacctgggagcacctctgnccatgctctgtgcccctaaagaaagggaaaagatgcacctatcaaaaaggaatccctgggccactggagtcaaggcttgaagatttctatgcaggaccccaaaatgcaggtttacaaagatgagcaggtggtggtgataaaggataaatacccaaaggcccgttaccattggctggtcttaccgtggacctccatttccagtctgaaggctgtggccagggaacaccttgaactccttaagcatatgcacactgtgggggaaaaggtgattgtagattttgctgggtccagcaaactccgcttccgattgggctaccacgccattccgagtatgagccatgtacatcttcatgtgatcagccaggattttgattctccttgccttaaaaacaaaaaacattggaattctttcaatacagaatacttcctagaatcacaagctgtgatcgagatggtacaagaggctggtagagtaactgtccgagatgggatgcctgagctcttgaagctgccccttcgttgtcatgagtgccagcagctgctgccttccattcctcagctgaaagaacatctcaggaagcactggacacagtgattctgcagagcctgagctgctgctgtggtgtggcccactggagcaaactgctggcacctattctgggttgcttgtgaacttctactcatttcctaaattaaaacatgcagctttttcacaaatttattctattattgagtggccacaatgtagagtggctcaaagtacttcaggattaggaatttgggtttgtcatagatgtattctctggtgagggtggctgggatatacctgacccaccatcttcagaaggacccatgtcaggtctgaccattgggagcaaagccatgttcacactgacctaatgcagagtatggaagcattgggctggttatacatttctgtttcttagatttatcctccgcctctgtaggcatggacaacctttaatcagagcatctagagtggcctcttgtttatcctgaagatactgatgggtcttgttttctgttagtctgttttgtaatattcttttcccttccttcatggggaggcttagtttgtccagtccttccatgcccttctatcccagattacctaaatgttcccttctcaggaattctgtctcatcagttcttcacagtgagaaaagaggctagatgatggtgtggggggttggagttttcttctaataccgagggttcctggctgtgaggaaacagccacatgttcgtcatgattgagctgtgaagtcttcttggacctgttgtctgaaaataaagttaatttgtttgaggcatctctcttaagtaggtggaaactattgaagttcagctaacaatcacagcataggttctgatgcatggaaaggtggttggtgaatgaaaaagttgcgtagagccactactttctttttccctgagaataaatttggataaaacaaaaaa

SEQ ID NO: 68564 - DNA, 866 bp, Homo Sapiens
  misc_feature (433)..(476): n is a, c, g, or t
tgtgaatcggacgaggacgtgaatttgtccgtctccgacttctggagagtgatgatgcgggtgtgctggttggtgagacaggacagccggcaccagcgaatcagacttccacatttggaagcagttgtgattgggcgtggcccagagaccaagatcactgataagaaatgttctcgacagcaagtacagttgaaagcagagtgtaacaagggatatgtcaaggtaaagcaggtaggagtcaatcccaccagcattgactcagtcgtaattgggaaggaccaagaggtgaagctgcagcctggccaggttctccacatggtgaatgaactttatccatatattgtagagtttgaggaagaggcaaagaaccctggcctggaaacacacaggaagagaaagagatcaggcaacagtgattctatagaaagggatnnnnnnnnnnnnnnnnnnnnnnnnnnnnnnnnnnnnnnnnnnnncaactctggccaatgctctgtgcccctaaagaagggaaaagatgcacctatcaaaaaggaatccctgggccactggagtcaaggcttgaagatttctatgcaggaccccaaaatgcaggtttacaaagatgagcaggtggtggtgataaaggataaatacccaaaggcccgttaccattggctggtcttaccgtggacctccatttccagtctgaaggctgtggccagggaacaccttgaactccttaagcatatgcacactgtgggggaaaaggtgatcgtagaatttgctgggtccagcaaactccgcttccgattgggctaccacgccaatccgagtatgagccatgtacatcttcatgtgatcagccaggattttgattctccttg

SEQ ID NO: 68565 - DNA, 1785 bp, Homo Sapiens
  misc_feature (76)..(110): n is a, c, g, or t
  misc_feature (1493)..(1539): n is a, c, g, or t
aaagactcactatagggcgctagcggcgtcatagccgaacgacgagcgcagcgagtagtgagcgaggaagcggcgnnnnnnnnnnnnnnnnnnnnnnnnnnnnnnnnnnncagtcgacggtaccggacatatgcccgggaattcggccattacggccgggggaggccacccggaagaccaagccggcatggccgaaacagaagccctgtcgaagcttcgggaagacttcaggatgcagaataaatccgtctttattttgggcgccagcggagaaaccggcagagtgctcttaaaggaaatcctggagcagggcctgttttccaaagtcacgctcattggccggaggaagctcaccttcgacgaggaagcttataaaaatgtgaatcaagaagtggtggactttgaaaagttggatgactacgcctctgcctttcaaggtcatgatgttggattctgttgcctgggtaccaccagagggaaagctggggcggagggatttgttcgtgttgaccgagattatgtgctgaagtctgcagagctggcaaaagctggagggtgcaaacatttcaacttgctatcctctaaaggagctgataaatcaagcaattttttatatctacaagttaagggagaagtagaagccaaggttgaagaattaaaatttgatcgttactctgtatttaggcctggagttctgttatgtgataggcaagaatctcgcccaggtgaatggctggttagaaagttctttggctccttaccagactcttgggccagggggcattctgtgcctgtggtgaccgtggttagagcaatgctgaacaatgtggtgagaccaagagacaagcagatggaactgctggagaacaaggccatccatgacctggggaaagcgcatggctctctcaagccatgaccacactggagaaatggtttttattgtcaaccttaacacccatcaccaaatcggtaatttcagggtctaaaaaaagtcagcatgttttaactttgttgttttactatcctcaggcatccattccaatcaagaaatgatggtgctctgcatcagtggttcagagcctggttatacatatagatcactcagggagctttggaaaaataaagatttgtcagccctatctcaaacttgaatcaaaatttctggggtgtgggcacaataatctgtaattttctttgtttatacttcccctgatgccactggttccgatgccactggctggggggcctgctttgaaatgcttgtctgcagagtcacagcagccatgaaaaccttatgaccgtgcaaatgagctctgctctaaaattgttgacattcatgtctctgagttacaaaagtgctaattcactacatgtaattgtgtaagtaaacattgtgcctttactacttctttatgtaatagaagttatatacctaagcttatataatacatggggaggattaaataaaggaataaagatgaatggacaactcnnnnnnnnnnnnnnnnnnnnnnnnnnnnnnnnnnnnnnnnnnnnnnngggggcggccgctcttaaagtatcccttgaaggggccccaagctttaccccgataccccagcttttcttggaacaaaagggggcccccaatagggaaggccgttattaataagcctagggcaccttgcgccgcctccgttttttacaacaccctcgggggaaatgggggaaaaacacgtgccttaacttggggagaaatcttttgtgtgggaaagaggaacacctttcaccctctcgtgggggggg

SEQ ID NO: 68566 - DNA, 951 bp, Homo Sapiens
ggggggtaggcgctgtctccgtcgcctccaacccccccggtccgaccagggaaggtgggatgctctgatggccgggcctgcggcgctgagcgcggcggcggcggctgctctggcggccgccctgctcctgctgcgtcgtgaggacccggggccgggggctggccccagcatggccgaaacagaagccctgtcgaagcttcgggaagacttcaggatgcagaataaatccgtctttattttgggcgccagcggagaaaccggcagagtgctcttaaaggaaatcctggagcagggcctgttttccaaagtcacgctcattggccggaggaagctcaccttcgacgaggaagcttataaaaatgtgaatcaagaagtggtggactttgaaaagttggatgactacgcctctgcctttcaaggtcatgatgttggattctgttgcctgggtaccaccagagggaaagctggggcggagggatttgttcgtgttgaccgagattatgtgctgaagtctgcagagctggcaaaagctggagggtgcaaacatttcaacttgctatcctctaaaggagctgataaatcaagcaattttttatatctacaagttaagggagaagtagaagccaaggttgaagaattaaaatttgatcgttactctgtatttaggcctggagttctgttatgtgataggcaagaatctcgcccagggtgaatggctggttagaaagttctttggcttccttaccagactcttgggccagtgggcattctgtgcctgtggttgaccgtgggttagagcaaatgctgaaccaatggtggtgagaaccaagagacaaagcagatggaactgctggagaacaagggcatccatgacctggggaaaagcgcatggctctctcaagccatgacaccattggagcaaatggtttcattgtcaccttaaacccatca

SEQ ID NO: 68567 - DNA, 593 bp, Homo Sapiens
tgcggccgccctgctcctgctgcgtcgtgaggacccggggccgggggctggccccagcatggccgaaacagaagccctgtcgaagcttcgggaagacttcaggatgcagaataaatccgtctttattttgggcgccagcggagaaaccggcagagtgctcttaaaggaaatcctggagcagggcctgttttccaaagtcacgctcattggccggaggaagctcaccttcgacgaggaagcttataaaaatgtgaatcaagaagtggtggactttgaaaagttggatgactacgcctctgcctttcaaggtcatgatgttggattctgttgcctgggtaccaccagagggaaagctggggcggtaaggaaggcatatgctcttttccctttttgctggccagtaatatcaaggattcttttcttgctcactctttttctttgtgcctgttgcaatgcttaaatgtgaataagcctttattgtttaagattctatatgctgcactaacctttggtatccttttaatagtactgataagttcgtctttcaaagtaatccttgagttcaggccccagtgctggagacgtcgtaaata

SEQ ID NO: 68568 - DNA, 1447 bp, Homo Sapiens
  misc_feature (678)..(698): n is a, c, g, or t
  misc_feature (726)..(1302): n is a, c, g, or t
  misc_feature (1356)..(1356): n is a, c, g, or t
  misc_feature (1365)..(1365): n is a, c, g, or t
tcaaagcaggaacagtcttctataaaactggattgcaaaatggaagtcagtgtatcagacaagctagcagttgtagatgaatggagaaaagaaatgggcctgtgctggaaagaagtggcatatcttggaaatgaagtgtctgatgaagagtgcttgaagagagtgggcctaagtggcgctcctgctgatgcctgttctactgcccagaaggctgttggatacatttgcaaatgtaatggtggccgtggtgccatccgagaatttgcagagcacatttgcctactaatggaaaaggttaataattcatgccaaaaatagaaattagcgtaatattgagaaaaaaatgatacagccttcttcagccagtttgcttttatttttgattaagtaaattccatgttgtaatgttacagagagtgtgatttggtttgtgatatatatatattgtgctctacttttctctttacgcaagataattatttagagactgattacagtctttctcagatttttagtaaatgcaagtaagaacatcatcaaagttcactttgtattgtaccctgtaaaactgtgtgtttgtgtgctttcaaagatgttgggattttatttatctggggacagtgtgtatggtaagacatgcccttctattaataaaactacatttctcaaacttgatgnnnnnnnnnnnnnnnnnnnnncctcgtgccgcctcgtgccgaattcttnnnnnnnnnnnnnnnnnnnnnnnnnnnnnnnnnnnnnnnnnnnnnnnnnnnnnnnnnnnnnnnnnnnnnnnnnnnnnnnnnnnnnnnnnnnnnnnnnnnnnnnnnnnnnnnnnnnnnnnnnnnnnnnnnnnnnnnnnnnnnnnnnnnnnnnnnnnnnnnnnnnnnnnnnnnnnnnnnnnnnnnnnnnnnnnnnnnnnnnnnnnnnnnnnnnnnnnnnnnnnnnnnnnnnnnnnnnnnnnnnnnnnnnnnnnnnnnnnnnnnnnnnnnnnnnnnnnnnnnnnnnnnnnnnnnnnnnnnnnnnnnnnnnnnnnnnnnnnnnnnnnnnnnnnnnnnnnnnnnnnnnnnnnnnnnnnnnnnnnnnnnnnnnnnnnnnnnnnnnnnnnnnnnnnnnnnnnnnnnnnnnnnnnnnnnnnnnnnnnnnnnnnnnnnnnnnnnnnnnnnnnnnnnnnnnnnnnnnnnnnnnnnnnnnnnnnnnnnnnnnnnnnnnnnnnnnnnnnnnnnnnnnnnnnnnnnnnnnnnnnnnnnnnnnnnnnnnnnnnnnnnnnnnnnnnnnnnnnnnnnnnnnnnnnnnnnnnnntggttcgacctggcgctttacggatactgtcggctttctccttcgggagcgtgngcttctcanagctcagcgtaggattcaattcgtgtagtcgttcgtcagctggctgttgacgaacccgttagccgacgctggcttacgggaa

SEQ ID NO: 68569 - DNA, 1119 bp, Homo Sapiens
attttctggccttctatggggtagcaacccagaatcaatctgaattagtcctgttttggtggagtttgtacattttaaatcctataacaaaaataatctagttttcatttccttactagctagatgcgaatttgtctttttgaatgaccctgtcaataagccagaaagggcaacccagaaaaagtgctccccacatccttctgagacttggcctgtgtgtgtggacgagaagccattcaccgtaagggtgcagaaagctcgaccaagccgaattgcaaacaacgttcgttctatttttaaaatgtacaggttcgatcggttctatagaaatggggtttatctaagaaaagtcttggttgtcttgctgctgtaaaaggcctttccaaacccctccttttattcctgtttcccgaaataaggtatttgtagagttaaggacctactgcatgcctgtccccagggccccggtggaaggaaggcagcgcctgctcttccttgactcagcccatcatctgaaaattcagaagtgaaccaagggttagacgccagaggttgggcttctgttagagtggcttcaaaacatgagccttatgggaagtagccttaaaaaaagaatgggtatacgcagtgacttccgatggaaatctccaaaacaatattcctaagtagcaatggggttggctcaagtctttattaacaaagaacattctctttcatctataaagaaattcttaaagatgcattgacagtgttgaattaccaacagcctgtgaagatcagtttgaccggtgtggacacgtgctggttaagcactcaggcctacgtgggccgagcgggatcttgatcatggggctggtgtatggatccaccgtcggattccgtctgcagaggaggacgtagggggccgtcacacccaccaggcctccctgctgtgctttaacacaggcagaagaggttcatggcaatataatagtcaatgaactttcagtttaaattgtgtacatttttaaattgtaagatttttactgtatattgatgcatagtgtgattcaataaattgcttgtaatttaaaaactatttaatattcaaaataaatatagttatatatttataaactc

SEQ ID NO: 68570 - DNA, 563 bp, Homo Sapiens
ttagactgtattaataaacatacaacacaagctggccttgtgttgctggttcctattcagtatttcctggggattgtttgctttttaagtaaaacacttctgacccatagctcagtatgtctgaattccagaggtcacatcagcatctttctgctttgaaaactctcacagctgtggctgcttcacttagatgcagtgagacacatagttggtgttccgattttcacatccttccatgtatttatcttgaagagataagcacagaagagaaggtgctcactaacagaggtacattactgcaatgttctcttaacagttaaacaagctgtttacagtttaaactgctgaatattatttgagctatttaaagcttattatattttagtatgaactaaatgaaggttaaaacatgcttaagaaaaatgcactgatttctgcattatgtgtacagtattggacaaaggattttattcattttgttgcattattttgaatattgtcttttcattttaataaagttataatacttatttatgataaaagaggaagggaaaaggaagctg

SEQ ID NO: 68571 - DNA, 690 bp, Homo Sapiens
  misc_feature (485)..(498): n is a, c, g, or t
atatccactgtgcctggccccaagtttgcatctttattgccctctgaacaaatacatagagaaaactctcagaacaattaaaacctgcagagcaacagtgtcctccatgtcttaggtttcaagtttgcctctaaaattctaatccatatttttctacttctcagataatttatgtgtgtgtactcttcctagacgtacaagagactttttaatgctaaatatttgtcagtgcttaacaaaaactcaatttcacattactcatattgtttttgttttaattgaatgtgaattaaatttttattagttatttgatttggaatgttatgtatgccattaacactattaggggaatctccacgcatttctgtatttttaaagaatatgattattttgtagattctgcctgtgtggtcattttaaaacatgtgtgacatatatcagtaccttcattcttctatattttgtgtctcctccaacctccaacnnnnnnnnnnnnnngaaaaatgtttctctaacacctcaacagtttaaggtaatttagtacacatatatcagtatttttgtgatctgaaaaagcaacccattttctaaattcatatttttcctaaaactttactatgtttttattttaagaggtttcctgttatatacactttttacacatgcaaataaactttataccaagtgagt

SEQ ID NO: 68572 - DNA, 1163 bp, Homo Sapiens
  misc_feature (844)..(844): n is a, c, g, or t
  misc_feature (981)..(981): n is a, c, g, or t
cagtcgacggtaccggacatatgcccgggaattcggccattacggccgggggctgttcccggggaggctgtgatgggttgacaggtgcgtgacagtgggagctgctctcggcacaagcatgtacggcaaaggcaagagtaacagcagcgccgtcccgtccgacagccaggcccgggagaagttagcactctacgtatatgaatatctgctccatgtaggagctcagaaatcagctcaaacatttttatcagagataagatgggaaaaaaacatcacattgggggaaccaccaggattcttacattcttggtggtgtgtatttggggatctctactgtgcagctccagagagacgtgaaacatgtgaacactcaagtgaagcaaaagccttccatgattacagtgctgcagcagctcccagtccagtgctaggaaacattcccccaggagatggcatgccagtaggtcctgtaccaccagggttctttcagccttttatgtcacctcggtaccctggaggtccaaggcccccattgaggatacctaatcaggcacttggaggtgtcccaggaagtcagccattactccccagtggaatggatccaactcgacaacaaggacatccaaatatgggtgggccaatgcagagaatgactcctccaagaggaatggtgcccttaggaccacagaactatggaggtgcaatgagacccccactgaatgctttaggtggccctggaatgcctggaatgaacatgggtccaggtggtggtagaccttgggccaaacccaacaaatgccaattcaataccatactcctcagcatctcctggggaattatgtanggtcctcccaggagggtggagggccaccagggaacacccatcatgccctagtcccagcagatttcaaccaactctgggggataacatgtgatacctttaatgaatgcaggaacctcctgggaccctaacagacctgntttttccaatgggtccctggggtcagatggttcccatgggctggatttaggagggaatggaaatcccatccccattaaatgggctcttttaagcctccaggagaatatgggacaggtaatttcccaaggaattcctccccaataattaaggagccccggagttaattccaccggggcacctc

SEQ ID NO: 68573 - DNA, 1465 bp, Homo Sapiens
  misc_feature (514)..(514): n is a, c, g, or t
ggatcagagataagatgggaaaaaaacatcacattgggggaaccaccaggattcttacattcttggtggtgagtgctgcagcagctcccagtccagtgctaggaaacattcccccaggagatggcatgccagtaggtcctgtaccaccagggttctttcagccttttatgtcacctcggtaccctggaggtccaaggcccccattgaggatacctaatcaggcacttggaggtgtcccaggaagtcagccattactccccagtggaatggatccaacttcgacaacaaggacatccaaatatgggtgggccaatgcagagaatgactcctccaagaggaatggtgcccttaggaccacagaactatggaggtgcaatgagacccccactgaatgctttaggtggccctggaatgcctggaatgaacatgggtccaggtggtggtagaccttggccaaacccaacaaatgccaattcaataccatactcctcagcatctcctgggaattatgtangtcctccaggaggtggagggccaccaggaacacccatcatgcctagtccagcagattcaaccactctggtgataacatgtatactttaatgaatgcagtaccccctggacctaacagacctaattttccaatgggtcctgggtcagatggtcccatgggtggattaggaggaatggagtcacatcacatgaatgctctttaggctcaggagatatggacagtatttccaaggattctcccaataatatgagcctgagtaatcaaccgggcactcccaagggatgatggcgaaatggggggaaatttcttaaatccttttcagagtgagagttactcccctagcatgacaatgagcgtgtgatccattaccaagtctcctcatgaaaaccacagtgagtcagcccttcacagaactactacggaagaaaattattcatcacagtgtacagttaaacaaaggaatctcagtcacaccaaaccaacctttttatttcctgctctctcccctcttttgtgaagaaagcgggtccaaatgtgattcaaacaactgtacggagtggcatattagaattgccctaaactgaactgcaaataattatgtgtgtatgtatatgtgtgggaaagagaatgtactgtatatgtgtatgttatacagacatatacacatacatacattgacccacaggacattgtaaaatattatcacatgacatcttaagtagaaataagtagggacttttattccatcctttttttcacgtttacattttaattattacaagttgctcctgccccctccctgaactattttgtgctgtgtatatcactgctttatataagttattttttaaggtgaactcagatgttatggttttgtaaatgtctgcaatcatggataggaataaaatcgcttatttgagagctttcattaaattgcgtctgatgcaagtt

SEQ ID NO: 68574 - DNA, 1447 bp, Homo Sapiens
  misc_feature (727)..(727): n is a, c, g, or t
attttttgagactcctcacagaaacctgaagacttggctgtatgaagaaggagaggaccaagctaaacaagcatatgttgacaagttggaagaattaatgaaaattggcactccagttaaagttcggtttcaggaagctgaagaacggccaaaaatgtttgaagaactaggacagaggctgcagcattatgccaagatagcagctgacttcagaaataaggatgagaaatacaaccatattgatgagtctgaaatgaaaaaagtggagaagtctgttaatgaagtgatggaatggatgaataatgtcatgaatgctcaggctaaaaagagtcttgatcaggatccagttgtacgtgctcaggaaattaaaacaaaaatcaaggaattgaacaacacatgtgaacccgttgtaacacaaccgaaaccaaaaattgaatcacccaaactggaaagaactccaaatggcccaaatattgataaaaaggaagaagatttagaagacaaaaacaattttggtgctgaacctccacatcagaatggtgaatgttaccctaatgagaaaaattctgttaatatggacttggactagataaccttaaattggcctattccttcaattaataaaatatttttgccatagtatgtgactctacataacatactgaaactatttatattttcttttttaaggatatttagaaattttgtgtattatatggaaaaagancaaaagcttaagtctgtagtctttatgatcctaaaagggaaaattgccttggtaactttcagattcctgtggaattgtgaattcatactaagctttctgtgcagtctcaccatttgcatcactgaggatgaaactgacttttgtcttttggagaaaaaaaactgtactgcttgttcaagagggctgtgattaaaatctttaagcatttgttcctgccaaggtagttttcttgcattttgctctccattcagcatgtgtgtgggtgtggatgtttataaacaagactaagtctgacttcataagggctttctaaaaccatttctgtccaagagaaaatgactttttgctttgatattaaaaattcaatgagtaaaacaaaagctagtcaaatgtgttagcagcatgcagaacaaaaactttaaactttctctctcactatacagtatattgtcatgtgaaagtgtggaatggaagaaatgtcgatcctgttgtaactgattgtgaacacttttatgagctttaaaataaagttcatcttatggtgtcattttaaactcgcccccgcacattccgagcgcaccctgtcggaccgcccggccctggagaaactttttagacccctccccttcggcgtgccggccccataaggaaagtgaacaagcgcccatagctgttccccaggcaaaccgcggtcctcaataatggcttggatcccccccc

SEQ ID NO: 68575 - DNA, 1176 bp, Homo Sapiens
ctatgtacactataacagtggtacaaaagcaggctggtacggtccggaattcccgggatatcgtcgaccacgcgtcgccagaatcacttctgtcaacccactgatgtggctgtggatccaggcactggagccatttatgtatcagatggttactgcaacagcaggattgtgcagttttcaccaagtggaaagttcatcacacagtggggagaagagtcttcagggagcagtcctctgccaggccagttcactgttcctcacagcttggctcttgtgcctcttttgggccaattatgtgtggcagaccggggaaaatggtcggatccagtgttttaaaactgacaccaaagaatttgtgagagagattaagcattcatcatttggaagaaatgtatttgcaatttcatatataccaggcttgctctttgcagtgaatgggaagcctcatttggggaccaagaacctgtacaaggattgtgatgaacttttccaatggggaaattatcgacatcttcaagccagtgcgcaagcactttgatatgcctcatgatattgttgcatctgaagatgggactgtgtacattggagatgctcataccaacaccgtgtggaagttcaccttgactgagaaattggaacatcgatcagttaaaaaggctggcattgaggtccaggaaatcaaagattctgaacacaaactcgagacgagttcaggaagagtactgggaagatttagacgaaagggaaggtggaggcttaaaccttggtaatttctttgcaagccgtaagggctacagtcgaaaagggtttgaccggcttagcactgagggcagtgaccaagagaaagaggatgatggaagtgaatcagaagaggagtattcagcacctctgcctgcgctcgcaccttcctcctcctgaaaaccaagctttgatttagattgagtaagatttacccagaatgtcagattcctttccctttagcagtttaaagttctgtgtatctaattgtaaactgtactagtctgtgtgggactgtacacactttatttacttcgtttggttaagtggttctgtttctagttgaggagttctaaaagtcatacagtgcattgtctttatatgaactagataaagaacgtcttctttttcatcataatctattacatggagattggc

SEQ ID NO: 68576 - DNA, 1044 bp, Homo Sapiens
acggctaggtacgaggctgggtggcgaatcggcacgaggagccaggctcgggagtgcctgttgttctcattacaacccttctggttattccggtggttgtcctgctggccattgccatatttattcggtggaaaaaatcaagggcctttggagattctgaacacaaactcgagacgagttcaggaagagtactgggaagatttagaggaaagggaagtggaggcttaaaccttggtaatttctttgcaagccgtaagggctacagtcgaaaagggtttgaccggcttagcactgagggcagtgaccaagagaaagaggatgatggaagtgaatcagaagaggagtattcagcacctctgcctgcgctcgcaccttcctcctcctgaaaaccaagctttgatttagattgagtaagatttacccagaatgtcagattcctttccctttagcacgtttaaagttctgtgtatttaattgtaaactgtactagtctgtgtgggactgtacacactttatttacttcgttttggttaagttggcttctgtttctagttgaggagtttcctaaaagttcataacagtgccattgtctttatatgaacatagactagagaaaccgtcctctttttccatcataattctaatctaacaatggaagatttgcccatttacacttttgagactttttggtggatgtaaataaccccattctttgcttgaacacagtattttcccaatagcactttcattgccagtgtctttctttggtgcctttcctgttcagcattcttagcctgtggcaataaagagaaactttgtgctacatgacgacaaagctgctaaatctcctatttttttaaaatcactaacattatattgcaatgaaggaaataaaaaagtctctatttaaattcttttttaaattttcttcagttggtgtgtttttgggatgtcttatttttagatggttacactgttagaacactattttcagaatctgaatgtaatttgtgtaataaagtgttttcagagcattaaaaaaaa

SEQ ID NO: 68577 - DNA, 792 bp, Homo Sapiens
  misc_feature (100)..(100): n is a, c, g, or t
  misc_feature (131)..(131): n is a, c, g, or t
  misc_feature (259)..(259): n is a, c, g, or t
agcccgtacctgtggacgtgcgcaggagcactgcaggatcaaacacccggtcagggactagctcaggcagctggattgctccacagaccggggccagccnttcagagaccttcgcacgtttctgcaagtcncaggaatcagctctgggcaacactgtcccagctgtgaaacccggaactccgccccttgacatcctggcccagcctcttgaagccagcaacccagcccttgagggcctgacccagcctctgcagggtgngaccccacactgtgagccctgccagctgccctctgagtctccaggttcactctcagaggttctggctcagcctcagggggccttggctccgcccaactgtgagtcagactccaaaactggagtctgacccaacccctagacaccccttatctccaacttccaaagtcaggttgtaggatgagaacccgctgataccattctaagtccgctgctagagtcctcaattttattctaatcattcccactcagtacccgccacccccaccccgggagtgttggtagactttcaaattccatttctgagattctatggtctattcctagaattctagattgttctctcagaattccaaattccacttctgaggctctaagcccagcctaggatctgacactgagtctcaggcccttgactttggcccccttgttcccaggcaccctgtggctgactaggggctggggtgtctcctcaccagggcctggtcagcacccagatggttcaagtaaagcaagttgtgtccaccctaaaaaaa

SEQ ID NO: 68578 - DNA, 1708 bp, Homo Sapiens
gtcacggctaggtgcgaggctgggtgtgtgaattcggcacgagggagcaagatggctgactccaaagagggtgttttgccgctgacggctgcttccactgccccaatttcattcggcttcactcgcacgtccgcacggaggcggctggccgactcgggagacggcgcggggccatctccggaggagaaggatttcttgaaaaccgtggaagggagggagctgcagagtgtgaagccccaggaggcccccaaggaactcgtcatccctttgatccagaatggccatcgcaggcagccaccagcccggccccctgggccatccacagatactggggccttggcggatggggtggtgtcccaggctgtgaaggagctcattgcggaatccaagaagtctctggaagagagagagaatgcgggtgtcgaccccacgctcgctatccccatgatccagaaaggatgcacccccagcggggaaggggcagacagcgaaccccgggcagagacagtgccagaggaggctaattatgaggcggtccccgtggaggcctatgggctggccatgctgcggggcatgggctggaaacctggcgagggcatcggccgcaccttcaatcaagtagtgaagccccgtgtcaactcactgaggcccaaggggttagggctgggtgccaacctgaccgaggcccaggccttgacccccactggcccctcccgcatgccaagaccagatgaggagcaagagaaagataaggaagatcagcctcaagggctggtgcctggaggagctgtggtggttctttctggccctcaccgaggcctctatgggaaggtggaaggccttgatcctgacaatgttcgggccatggttcgtctggctgtggggagccgggtggtgactgttagtgagtactacctgcggcctgtctcccagcaggagtttgaccagaacaccttgggatctcaggcaacagaaaggaactggcctcatcacggaagaccctctgggaatcaagaactctacatccagcaggacaactcagagaggaagcggaaacaccttccagaccgacaggatgggcctgcagccaagagtgagaaagcagcccccagaagtcagcactggttgcacaggaacctgcgtgtgcggtttgtggacaacatgtacacaaggaggccaatattacaacaccaagatgataattgaagatgtcctaagcccagatacctgtgtatgtcggacagatgaaggccgagtcctggaaggcctgagggaagacatgctggagaccctggttcccaaggcagagggtgaccgtgtgatggtggtgctgggcccacagactggaagggtgggacatttgctgagccgggacagagcacggagccgggctttggtgcaactgccaagagaaaatcaggtggtggagcttcactacgatgccatctgccagtacatgggccctagtgacacagatgatgactgacccatgggactcctcccatcccccaggctggtaccagttctgtaccatatgagaaagttgccttcagaaggtgggaagatcattgttccatcctctacttctggtgcagtcctgggacaaggacaagggaaagggatgggtgaaccagtagggaagctagaaacaaacccaatatttaccaaaatttagggtataataaaaaccatttcaagtacttaatag

SEQ ID NO: 68579 - DNA, 964 bp, Homo Sapiens
cagtcgacggtaccggacatatgcccgggaattcggccattacggccggggacgtcacgtcgtttaatccggaaacggcggcggcggcgacaggaccgaggggccttagttggtgggcaagtcggggatcccagaaagagaagcgtgacccggaagcggaaacgggtgtccgtcccagctccggcctgccagtgagcttctaccatcatggacctattgttcgggcgccggaagacgccagaggagctactgcggcagaaccagagggccctgaaccgtgccatgcgggagctggaccgcgagcgacagaaactagagacccaggagaagaaaatcattgcagacattaagaagatggccaagcaaggccagatggatgctgttcgcatcatggcaaaagacttggtgcgcacccggcgctatgtgcgcaagtttgtattgatgcgggccaacatccaggctgtgtccctcaagatccagacactcaagtccaacaactcgatggcacaagccatgaagggtgtcaccaaggccatgggcaccatgaacagacagctgaagttgccccagatccagaagatcatgatggagtttgagcggcaggcagagatcatggatatgaaggaggagatgatgaatgatgccattgatgatgccatgggtgatgaggaagatgaagaggagagtgatgctgtggtgtcccaggttctggatgagctgggacttagcctaacagatgagctgtcgaacctcccctcaactgggggctcgcttagtgtggctgctggtgggaaaaaagcagaggccgcagcctcagccctagctgatgctgatgcagacctggaggaacggcttaagaacctgcggagggactgagtgcccctgccactccgagataaccagtggatgcccaggatcttttaccacaacccctctgtaataaaagagatttgacactagtaaa

SEQ ID NO: 68580 - DNA, 763 bp, Homo Sapiens
  misc_feature (705)..(705): n is a, c, g, or t
ttttaatggcaatatttatatttatttttgcaattccttggataaaaaccatttgaacaatgtttggtaaggtgttattctcataaaaacttctttcaaaatgaaggtatttctattttccacaaaagttaaaattacatgctgaaacaaagttaatgacttaggtaacacaatacaatgtcagaaaactggtagagtaagaccagctaatgaactacgtcattaaactaaacaattacacagaactagaaaacttgactcagtagtaaaatataaaaatctacaattataaatataaatttggtccatggagacactagggcagtatttacaataagtaacagattatttctactttaggtgaatactgcagttgtaaaatgttgaatatcatatggaagagtgttttatttacaggctactgtattaaaagttatatttctagcaaacctgataattgctacaaatacagctaaaaatttgacactaaaaacaaacattttctgtagtttggaattcctaacctctataaattgaaattttctgttaaaatcaatacagaaaaaaataccacaattccattcttagaaatactgtaaaattcaatcattttagttcagacataatacgtaaattacaagtcttgcaaaaaggcacacattggtaatgatatatatgtgccgcagaatcctatgtcatgaaagntactgtcacgtgatgggatatcaacagatatcagaactagactgattctctcgctaat

SEQ ID NO: 68581 - DNA, 883 bp, Homo Sapiens
  misc_feature (13)..(22): n is a, c, g, or t
  misc_feature (809)..(809): n is a, c, g, or t
  misc_feature (825)..(825): n is a, c, g, or t
ccccctttatacnnnnnnnnnngaacatttccaaaactaaaatagaaaatgcttgtggcatttattttctctttttaaaaggttcagaaatttggcaggtcctttgcttctaatgacaaaactgtgagagctagatgtcctatgggcaattaggtagtataataaaggtaaatgaaggtacaatttttaaaccattattttcaccctgttggggtaaatgttttaaagagtgagaaaacataaattgagaaagggtgataaagtaatagataacttttagtttaataataattattgttattatactactaataatagagcacttgtaagcactaagttatctttatccaacatttctccaaatggactgaaagaaacttttcaaggacagtgtattataacaatccctttcccagaattagttgtatagggttggcccaagagatgtaagaaaaatctcgcattgctccctaagcaccctaggccttattaaagagcaacttctatttccagtcgggggagtaacactaaagctacaagaaatatgtaataatgataggtaataatgtgttccaaagctttttcaaactagaataaggaggcaaatagaagaatgagatactgatgtccacagttcaattggcagaatctaaccccttctgttatcttttttaatactatttttgtttagatagaatttcaaagaagataaaatgcttgaagagctgagagtaaaagatatgctgcaagctatgatataactgctcttgcagtccaaagggataccctgattaagaagttcttatttnaacatctcagacgcanaattacattaatttttgtatattcaacacactttaatgtatttgggtacgttgataca

SEQ ID NO: 68582 - DNA, 598 bp, Homo Sapiens
  misc_feature (59)..(59): n is a, c, g, or t
taactaaggagtaaataaatcataatttatcatttgccaaggccaacaaacaacactantgtgctgtgtgctctcaatgaagtggaataaaccaggaggcttggcatatcccctttatggtaatccccagctagagattagtaggttgactttcacagcaattgtatattgatccattttaactcatccttgccataatttccaggccagtcaccaggacagaggagatgatggggaaacagagctttagatgaaaactactatgcactactagccttagaggcactggtttcctgttaccactttggcaagtatggatggtctaagtccagtagggcttcatccatggagccattagaactgaggggggagtgttagagatgccatttcaccaggatctttttgctcaggttgtacccatgccaattgaagaacgtgttaaagatgaggaggagagatgtaccattctctcccttaataatgatgttggtttgcaaaacctaaagaaataataacaacagactatttcatactttcaagcaagtctttatactacctgttatttctctaaaattcaaataaagaatttttaaactta

SEQ ID NO: 68583 - DNA, 690 bp, Homo Sapiens
  misc_feature (652)..(652): n is a, c, g, or t
ggatttgtaagtctgtgaactccaaaataggcacaggtttattcaaaggaagaaaattatgttcaattaattacacaaactcagggaaaaaagaaaagtttatccaggagttaaaagaagcatacaagcatactgtagttaaaaatattaaaagaccaagaaaagatatattgatgctcacggaactacggtggaagcttactggggcatgccttgcgcatgggatgaatgttttgaggcagcacttgatgggtggacaggacctcctggaccttgtccaaacacatcttgtttgctgctacacctgcttcaaactctcggcgtttctcttccttctctgcttcttgggactgctgctggtaggcgatttgcatctgaagttgcttcctgtactcctgggctaaacgttggcgtcttgcaaaattctccttctcttcacagttaagttctttaagactttcatttatgtgtttctgttccatagcacgttcttcctgttctttagcttctcgttgcaacttttcttgaacttgaagttttcttgtacacatgacctcatccacaagctgtctccttgcctccttttcaagtctcagctccttgtccttctcagccaacttctttgccttgtcttcctctaatattctgtcanattctttctcctgagctttttcttcctcacgtctctgt

SEQ ID NO: 68584 - DNA, 2143 bp, Homo Sapiens
  misc_feature (1942)..(1954): n is a, c, g, or t
cgcaacgggaatggagtaaagggagacccgtcgacctggccacggggatcagcgatggaattaaagcaatctttgtccacccatctggaagccgagaagcctctgaggcgctatggggcggtggaggagacggcttggaaaacggagagactggggagaaatcagctggacatcatctccatggcggagacaaccatgatgccagaggagattgagctggagatggcaaaaattcagcgtctccgggaagtcttggtccgccgggagtctgagctcaggttcatgatggatgacatccagctctgcaaggacatcatggacttgaagcaggagctgcagaacttggtcgccatcccagaaaaagaaaaaaccaaactgcagaagcagagagaggatgagctaatccagaagatccacaaactggtgcagaagagagacttcctggtggacgatgcggaggtcgagcggttaagggagcaagaagaagacaaggaaatggctgatttcctgagaatcaagttaaaacctctagacaaagtaaccaaatctccagccagctcccgggcagagaagaaagcagagcccccacctagcaagcccacggtggccaagacggggctggcattgatcaaggattgttgcggggccacccagtgcaacatcatgtagcccccacgtggggtgccctgggccatggggaccccccgccaccctcttgtctttatagcccccatttcaccggggcccaagagctctccaaggcagaaggggttgaaggcaagcccgtgactgtcaccagaggccatgggcacggcaggcgggcctggccaccctgtacagagtgtagcagtagggagtctctcaccgtcgcatggtcctccccagagcatgccgaaccccaggagtctgtctcactgtttatccaaacaccaggaaaggtcctccctcaaaaaagcatatctccactttctctctagctgtatctaaccccaccgtgtgaatgaaactggggagaggggcatgctccccaagctgtgttgtagtcgtgacttctgctcaatacgaaatccttagctaccgattggtccgagaacacggttttccccccaatttccaacgcaccttcccttagctcctgctctcagagctaggcacagtgggcacaggtcccctcccgtctgtcctctcccagcaactgtgccctggagggctccacaatggcccccgtgtctctcgggcaccacccatatagcagtcccagagggcccatctgtaaagatcgagcttgtgtgtggtgtcgtggtcacatctcccgcttccccccatcctgtgtctgggcacagttcacatcaggacagcgtccattgtgctctcagtctgcctcaggtgtgtgcctggagggggcctggactggcatggatccagtgtgcagaagagccagcagggaaccggaagctctgatgtcaaggccagagcagttgagaatgggacccagagtagatgctgacctgggcactccaccattccggggccaccacagagatgccagcaggatgccactttgccagcccgacacacggacctttgtaaagaacagcaacaggcaggagaggcagcgtgtgaccagattgtgtcccgtcattgggtggcatatgttaactagctgccaaacaacttcaacccgtgtaattcatgtacatttgcaacagccagcccggtacagcctgtgtgacttctctgtatgtgtgtgtgtgtcgtgaccagcctaagtagttagcataactcaagatgctgatgtgcagtcacccatcagagaaaataaaaatggaaaccacgttcacagcattttaaaagtttttactttttttcttgattatggaagtaatccatgtacatagtaaatcattttaaaagtacaaaaagtatgaagaagtttgtcttnnnnnnnnnnnnnttattcctccaactagagaccactctgatgtttcgacgttttaaaaaagtctttttttgtgcattttttcatcgttgacatcatattgtgatatcatttataaccagttttttcctacttattataccaccatcttccacatcattaaaagctctttgtaaacattaaacactcttcataaatcataaa

SEQ ID NO: 68585 - DNA, 1022 bp, Homo Sapiens
  misc_feature (818)..(828): n is a, c, g, or t
ggcctgggtggcgaattcggacgaggcggcggcggaggagagggagcagcgtcacgggcgcccggcccgttaaaaacgctgctggctggagccacctccctccctgcagcccgcaacgggaatggagtaaagggagacccgtcgacctggccacggggatcagcgatggaattaaagcaatctttgtccacccatctggaagccgagaagcctctgaggcgctatggggcggtggaggagacggcttggaaaacggagagactggggagaaatcagctggacatcatctccatggcggagacaaccatgatgccagaggagattgagctggagatggcaaaaattcagcgtctccgggaagtcttggtccgccgggagtctgagctcaggttcatgatggatgacatccagctctgcaaggacatcatggacttgaagcaggagctgcagaacttggtcgccatcccagaaaaagaaaaaaccaaactgcagaagcagagagaggatgagctaatccagaagatccacaaactggtgcagaagagagacttcctggtggacgatgcggaggtcgagcggttaagggagcaagaagaagacaaggaaatggctgatttcctgagaatcaagttaaaacctctagacaaagtaaccaaatctccagccagctcccgggcagagaagaaagcagagcccccacctagcaagcccacggtgggccaagacgggggctggcattgatcaaggattgttgcggggccaccccagtgcaacatcatgtagccccccacgtggggtgcccctgggccatgggggannnnnnnnnnnaccctcttgtcctttattagcccccatttcccccgggggcccaagaagctctcccaagggcaaaaaggggttgaagggcaaaccccgtggactggtccccaaaaggcccctgggcccccgccagggggggccctggccacccctttaaacgaggggtgacgcagtaggggagtcttcctcccgcggggcagggg

SEQ ID NO: 68586 - DNA, 709 bp, Homo Sapiens
  misc_feature (611)..(645): n is a, c, g, or t
aggtaaaatgtcagatgcaaaaatgctgcacttatgtctcgaaatacagtgaaaatagtgggaagatgcagatttttaatccttcatgagtccaagcgtggaacatggacttctgctaatcagaggtcatcaacatacgaactccaactgtggcggccatcagcaaacgtggcacctgcaattaaacctacaggcatgaattttccatagtagtaggatctcattcccataacaccaacaaaagtaacagatgtagcggctaggaaaccccaaacgttccttggatcctgatacagctggtaagcacccaggccggctagactgccgaagagcagccctgcagccagggacggcacgctgcctgtttttacatagccaacgatcccaccagaaacaaccagtgctgtgtagccaaagccaaaccaatgcaaaggcactaatgggaagaggggcttctccattcttctcttctcagtccagaaaggagactaccccaggcctgcatctgccgaaggcccgcggagtccactacggagcgcaagccgcgggacacagcagcccccggccgtaatggccgaattcccgggcatatgtccggtaccgtcgactgnnnnnnnnnnnnnnnnnnnnnnnnnnnnnnnnnnncggccgcttcctcgctcactgactccgctgcgctcgtcgttcgctgctacgggagcgcccatat

SEQ ID NO: 68587 - DNA, 775 bp, Homo Sapiens
  misc_feature (84)..(118): n is a, c, g, or t
aagtgtatcgatcacttatagggcgctactcgtttgcagcgaacgaaccgagcgcagcgacgtagtgagcgaggaagcggccgnnnnnnnnnnnnnnnnnnnnnnnnnnnnnnnnnnncagtcgacggtaccggacatatgcccgggaattcggccattacggccgggggcagtcattcctgcggctagcgcgcccttgtagacagccggggccttcgtgagaccggtgcaggcctggggtagtctcctgtctggacagagaagagaaaaatgcaggacactggctcagtagtgcctttgcattggtttggctttggctacgcagcactggttgcttctggtgggatcattggctatgtaaaagcatggcagcgtgccgtccctggctgcagggtctgctctttggcagtctagccggcctgggtgcttaccagctgtctcaggatccaaggaacgtttgggttttcctagctacatctggtaccttggctgggcattatgggcatgaggttctaccactctggggaaaatttatgccttggaggttataatctgcaggtgccccaagttggcttgatggtcgccaaagtgggaagttagtattgtttcaaaagaccccatttagcagaaggtcgtggtcccaagctaaactgttgacagactttaccaattttctggcactttgtgcccacttattttgcaactaatttttagacggacgacaaactacggggcacagccattgtcgggcttcgtcgcacattttattcgtcct

SEQ ID NO: 68588 - DNA, 1037 bp, Homo Sapiens
  misc_feature (631)..(641): n is a, c, g, or t
  misc_feature (982)..(996): n is a, c, g, or t
cagtcgacggtaccggacatatgcccgggaattcggccattacggccggggcaatcgcgtttccggagagacctggctgctgtgtcccgcggcttgcgctccgtagtggactccgcgggccttcggcagatgcaggcctggggtagtctcctttctggactgagaagagaagaatggagaagcccctcttcccattagtgcctttgcattggtttggctttggctacacagcactggttgtttctggtgggatcgttggctatgtaaaaacaggcagcgtgccgtccctggctgcagggctgctcttcggcagtctagccggcctgggtgcttaccagctgtatcaggatccaaggaacgtttggggtttcctagccgctacatctgttacttttgttggtgttatgggaatgagatcctactactatggaaaattcatgcctgtaggtttaattgcaggtgccagtttgctgatggccgccaaagttggagttcgtatgttgatgacatctgattagcagaagtcatgttccagcttggactcatgaaggattaaaaatctgcatcttccactattttcaatgtattaagagaaataagtgcagcatttttgcatctgacattttacctnnnnnnnnnnngacaccaaatttggcggaggggtggaaaatcagttgttaccattataaccctacagaggtggtgagcatgtaacatgagcttattgagaccatcatagagatcgattcttgtatattgattttatctctttctgtatctataggtaaatctcaagggtaaaatgttaggtgttgacattgagaaccctgaaaccccattccctgctcagaggaacagtgtgaaaaaaaatctcttgagagatttagaatatcttttcttttgctcatcttagaccacagactgactttgaaattatgttaagtgaaatatcaatgaaaataaagtttactataaataattnnnnnnnnnnnnnnnctcgagcatctatgtcggctccgagaagagaggtatgctcc

SEQ ID NO: 68589 - DNA, 679 bp, Homo Sapiens
aggtaaaaatgtcagatcaaaaatgctgcacttatttctcttaatacattgaaaatagtggaagatgcagatttttaatccttcatgagtccaagctggaacatgacttctgctaatcagatgtcatcaacatacgaactccaactttggcggccatcagcaaactggcacctgcaattaaacctacaggcatgaattttccatagtagtaggatctcattcccataacaccaccaaagtaacagatgtagcggctaggaaaccccaaacgttccttggatcctgatacagctggtaagcacccaggccggctagactgccgaagagcagccctgcagccagggacggcacgctgcctgtttttacatagccaacgatcccaccagaaacaaccagtgctgtgtagccaaagccaaccaatgcaaaggcactaatgggaagaggggcttctccattcttctcttctcagtccagaaaggagactaccccaggcctgcatctgccgaaggcccgcggagtccactacggagcgcaagccgcgggacacagcagccaggtctctccggaaacgcgattgcgtgcgcgctgcgccccgcggacgcgtggtcgacgatatcccgggaattccggaccgtaccagcctgctttttttaaccacactgttcaatatgtcaccata

SEQ ID NO: 68590 - DNA, 1404 bp, Homo Sapiens
cgcaggcacaacagagcctctcccctctcctcgccccgccaccgggacggagagcgcccgccgctgcatttccggcgacacctcgcagtcattcctgcggcttgcgcgcccttgtcgacagccggggccttcgtgagaccggtgcaggcctggggtagtctcctgtctggacagagaagagaaaaatgcaggacactggctcagtagtgcctttgcattggtttggctttggctacgcagcactggttgcttctggtgggatcattggctatgtaaaagcaggcagcgtgccgtccctggctgcagggctgctctttggcagtctagccggcctgggtgcttaccagctgtctcaggatccaaggaacgtttgggttttcctagctacatctggtaccttggctggcattatgggaatgaggttctaccactctggaaaattcatgcctgcaggtttaattgcaggtgccagtttgctgatggtcgccaaagttggagttagtatgttcaacagaccccattagcagaagtcatgttccagcttagactgatgaagaattaaaaatctgcatcttccactattttcaatatattaagagaaataagtgcagcatttttgcatctgacattttacctaaaaaaaaagacaccaaacttggcagagaggtggaaaatcagtcatgattacaaacctacagaggtggcgagtatgtaacacaagagcttaataagaccctcatagagcttgattcttgtatattgatgttgtcttttctttctgtatctgtaggtaaatctcaagggtaaaatgttaggtgtcagctttcagggctctgaaaccctattccctgctctgaggaacagtgtgaaaaaaagtcttttaggagatttacaatatctgttcttttgctcatcttagaccacagactgactttgaaattatgttaagtgaaatatcaatgaaaataaagtttactatacatactaccagccgctggaacacaagcggtccccgccgtcttctaccatccctcctccacctgccctccgtgtgactctccccccaaaaatataagggtctttgtgcggcgccgcccctggcgccctccaaagaaactttttctaaacccccctctttgcttgggggcgcggcgggggcccctgggaggctacccgggggacccgcgcgccccaaaggcggtggttcccccagggagataccttcgtgggtccgtgggaaatcagggggcgctgggactttcccccaccaccaaaataaaaaccaggccctggggggggcgaaccccggggggtgtttcttggcacacaaatttccccgcgagggcgggccctctctgaggggggctatgttatgggggggaaccctctataccagacgggggt

SEQ ID NO: 68591 - DNA, 654 bp, Homo Sapiens
agctaaaaaatttaattgtaaggatcaagcagtggttattggtgaaaccaatacacactgacagctttgaagtgttcagatgctaattttaaaataaatgtgacaaataccaatcagatgttcataacacttttcaggatccacatcatacattgtcattagtctttgaagaaaaaaatatgtaaatatatatgtgtaacatgagaatttctctctaaagcagggcttaaaattttttggaaaagtttgacaaagcataccacatgaattcagatttacctcaatgctaagaattatgtttagttaggaaaaaggaaagtcattttgacctcaggtagaaaaatagattgctttgagttttatgtagctttagactttaaaaagttagaatttattctgtaactaaaaattatttgaaaaaattatgcctctggtttaattattggtgattacacactctttctcttacccttgtgtattgaactatgtccataatcaagttgatgtggatcctgaaaagtgttatgaacatctgattggtatttgtcacatttattttaaaattagcatctgaacacttcaaagctgtcagtgtgtattggtttcaccaataaccactgcttgatccttacaattaaattttttaactaacta

SEQ ID NO: 68592 - DNA, 783 bp, Homo Sapiens
  misc_feature (46)..(88): n is a, c, g, or t
  misc_feature (92)..(126): n is a, c, g, or t
  misc_feature (234)..(316): n is a, c, g, or t
taaagaaacttgatataactcactatagggcgctagctcggttgannnnnnnnnnnnnnnnnnnnnnnnnnnnnnnnnnnnnnnnnnnccgnnnnnnnnnnnnnnnnnnnnnnnnnnnnnnnnnnncagtcgacggtaccggacatatgcccgggaattcggccattacggccggggattacaggcgtgtgtcaccacgctcggctaatttttgtatttttagtagagacaggnnnnnnnnnnnnnnnnnnnnnnnnnnnnnnnnnnnnnnnnnnnnnnnnnnnnnnnnnnnnnnnnnnnnnnnnnnnnnnnnnnntgagccactgtgcctggctgagttttcttaaagtgagcttaatttctgaactcttagtgattcatatatgtacataaatctgtgatcccatttcttattgcaccattcaggaacactttatataaatgagtggctttttatttcatattattagtagtatcatggttccattacaggcctattaacatcatacattgtcattagtctttgaagaaaaaatatgtaaatatatatgtgtaacatgagaatttctctctaaagcagggcttaaaattttttggaaaagtttgacaaagcataccacatgaattcagatttacctcaatgctaagaattatgtttagttaggaaaaaggaaagtcattttgacctcaggtagaaaaatagattgctttgagttttatgtagctttagactttaaaaagttagaatttattctgtaactaaaaattatttgaaaaaattat

SEQ ID NO: 68593 - DNA, 1005 bp, Homo Sapiens
aacggtaggtacgaggctgggttgtgaattcggccgaggggaagagcagccaacatggcggcggaacgcggcgcggggcagcaacagtcgcaggagatgatggaggttgacaggcgggtcgagtctgaagaatccggcgatgaagaagggaagaaacacagcagtggcatcgtggccgacctcagtgaacagagcctgaaggatggggaggagcggggggaggaggacccagaagaagaacatgagctgcctgtggacatggaaaccatcaacctggacagagatgcagaggatgttgatttgaatcactatcgcatagggaagattgaaggatttgaggtactgaagaaagtgaagactctctgcctccgccaaaatttaattaaatgcattgagaatctggaggagctacagagtcttcgagagctggatctttacgacaaccagatcaagaagattgagaatctggaggcgctaacagagctggagattctagatatttcttttaatctgctgagaaacatcgaaggggttgacaagttgacacgactgaaaaaactcttcttggtcaacaataaaatcagtaaaattgagaacttaagcaacttacatcaactacagatgctagagctgggatctaaccgcatccgggcaatcgaaaatatcgacaccttaaccaacctggagagtttgtttttggggaaaaacaaaattactaaacttcagaacctggatgcgctcaccaacctgacagtcctcagtatgcagagcaaccggctgaccaagatcgagggtctgcagaacctggtgaaactgcgggagctgtaccttagccacaatggcatcgaggtcatcgagggcctggagaacaatgtgcaggacagcctcacgtactgaggggaagtgtgctcacagagcccccacccctcctcaggtgcctccagctcaccctgtctgccccagtgcggtgttcaagacaaataaaagactttttctcattcaaac

SEQ ID NO: 68594 - DNA, 1204 bp, Homo Sapiens
caaggtagcgaggcctgggtggcgatttcggcacgagggcgcctccgcccccgggccgggcagatgcggtttcctcccgactcgcgatcaaaatggaagaaatgagctgcctgtggacatggaaaccatcaacctggacagagatgcagaggatgttgatttgaatcactatcgcatagggaagattgaaggatttgaggtactgaagaaagtgaagactctctgcctccgccaaaatttaattaaatgcattgagaatctggaggagctacagagtcttcgagagctggatctttacgacaaccagatcaagaagattgagaatctggaggcgctaacagagctggagattctagatatttcttttaatctgctgagaaacatcgaaggggttgacaagttgacacgactgaaaaaactcttcttggtcaacaataaaatcagtaaaattgagaacttaagcaacttacatcaactacagatgctagagctgggatctaaccgcatccgggcaatcgaaaatatcgacaccttaaccaacctggagagtttgtttttggggaaaaacaaaattactaaacttcagaacctggatgcgctcaccaacctgacagtcctcagtatgcagagcaaccggctgaccaagatcgagggtctgcagaacctggtgaacctgcgggagctgtaccttagccacaatggcatcgaggtcatcgagggcctggagaacaataacaaactcacgatgttggacattgcatcaaatagaatcaaaaagattgaaaatatcagccatctaacagagctgcaagagttctggatgaacgacaatctccttgagagctggagcgacctcgacgagctgaagggagccaggagcctggagacagtgtacctggagcggaaccccttgcagaaggacccccagtaccggcggaaggtcatgctcgccctcccctccgtgcggcagatcgatgccacgttcgtcaggttctgagtccttcttggctcctcatgtggtccctctcctcggaagaactgcccagccacgggtttttaacccacctgttgctcctgaggtcgtcactatatcaacagtcacaaacccaatggcaataaaggcactgacgatagctggcgcgcgcgacgccacacaccattttcagatgccgttgcaattaaatcttgccacactgtcaaaaaa

SEQ ID NO: 68595 - DNA, 368 bp, Homo Sapiens
gcctactactactatacggctgcgagaagacgacagaagggagccaggagcctggagacagtgtacctggagcggaaccccttgcagaaggacccccagtaccggcggaaggtcatgctcgccctcccctccgtgcggcagatcgatgccacgttcgtcaggttctgagtccttcttggctcctcatgtggtccctctcctcggaagaactgcccagccacgggtttttaacccacctgttgctcctgaggtcgtcactatatcaacagtcacaaacccaatggcaataaaggcactgacgatagctggcgcgcgcgacgtcacacaccattttcagatgccgttgcaattaaatcttgccacactgt

SEQ ID NO: 68596 - DNA, 686 bp, Homo Sapiens
  misc_feature (471)..(471): n is a, c, g, or t
  misc_feature (632)..(644): n is a, c, g, or t
gacagtgtggcaagatttaattgcaacggcatctgaaaatggtgtgtggcgtcgcgcgcgccagctatcgtcagtgcctttattgccattgggtttgtgactgttgatatagtgacgacctcaggagcaacaggtgggttaaaaacccgtggctgggcagttcttccgaggagagggaccacatgaggagccaagaaggactcaaaacctgacgaacgtggcatcgatctgccgcacggaggggagggcgagcatgaccttccgccggtactgggggtccttctgcaaggggttccgctccaggtacactgtctccaggctcctggctcccttcagctcgtcgaggtcgctccagctctcaaggagattgtcgttcatccagaactcttgcagctctgttagatggctgatattttcaatctttttgattctatttgatgcaatgtccaacatcgtgagtttgttattgtntctccaggccctcgatgacctcgatgccattgtggctaaagtacagctcccgcaagttcaccagggttctgcagaccctcgatcttggtcagccggttgctctgcatactgaggactgtcaagtttggtgaagcgcatccagggttctgaaagttagtaannnnnnnnnnnnnccccaaaaaccaactctccaggttggtaagggggtcgaattt

SEQ ID NO: 68597 - DNA, 1568 bp, Homo Sapiens
  misc_feature (1158)..(1166): n is a, c, g, or t
cagtcagacggtaccggacatatgcccgggaattcggccattacggacggggcccgcaggcaggactctgggacagacgcaggccagctgcccagagcccagaccaagcatggacgccgtggatgccaccatggagaaactccgggcacagtgcctgtcccgcggggcctcgggcatccagggcctggccaggtttttccgccaactagaccgggacgggagcagatccctggacgctgatgagttccggcagggtctggccaaactcgggctggtgctggaccaggcggaggcagagggtgtgtgcaggaagtgggaccgcaatggcagcgggacgctggatctggaggagttccttcgggcgctgcggccccccatgtcccaggcccgggaggctgtcatcgcagctgcatttgccaagctggaccgcagtggggacggcgtcgtgacggtggacgacctccgcggggtgtacagtggccgtgcccaccccaaggtgcgcagtggggagtggaccgaggacgaggtgctgcgccgcttcctggacaacttcgactcctctgagaaggacgggcaggtcacactggcggaattccaggactactacagcggcgtgagtgcctccatgaacacggatgaggagttcgtggccatgatgaccagtgcctggcagctgtgagcagctccggctcagccctgctgccctggcctgtcactccccacccctgccggagacctcccttccctgggccccttctctcctgggcagccacaccacagagcggggaggggcaggtgggggaatggaggctgcaggactggctagaccaggtccctgccggtccaccaggcggaggtgggacaaaggtcctaacaggagtcactggctcaggaccccagggagaaacgctctccccacccacgccatgctgaccagaggtcttgcagcccctgtggatgcccccgccgaggtcccccgatccccgcacccggactgctgctccctgcccctcccttgcgggtcccccaggaagccaggtgaccccaggtgggaggctgtgtgtggaggccatcctggaaggaagtttagacctgcccaggtgtggagcgaggggcacaggggcatcctaacctcagaaactgaaataaagcctttgnnnnnnnnntctgtaaaacatcaacccccaatcagaagatggcaaatggggaataaaaatagcaggtaacatgtccagcgggcccagtatctacattctggtgagcggcccgaggctgggagctctgggcgggggcagaccggcggggccttgcagcaggggtgggggtaaagtgcgggtggtggtggagagaacagggctgtggctggaccccagcactggtgacacgctgggtgggagcatgaggccccaggctgctggaggtcctcgcccggggaggtggaggccgttcctggtcaggggcttcctgaggcccctggggcatgcagaggccagggttttagttaaaagtttaatgtagttcccaaaatacatttcatatgacaatcttacataaatgttccaaaacac

SEQ ID NO: 68598 - DNA, 1082 bp, Homo Sapiens
ctccttagcctcccaatcctctcttaaaaaagtgatagctcagaaatatttgtaaaagcaaggtttttatttcattttggctctgtcattttcagaggcaaagaagttggcctgtaaaatagagtgctagagctcttacgcccctccccttcttcccaacttcctacttcctagcccttttatcaactcctagaatagttaaagagagacacatctagatgggatgaaaggtgccctaagcaggagaaactgaacaaaaggctagaggcatgggccaggtaaaaattgggcctagagtgaagactgtgctgtcgttaagagctttcgaggaaggagtacttactccccaatgatgatgaatggaaaaatacttttcagggagaattgaaggggttaaagtgttaaatatgttgcctagacaagggttctttaaagaaagacagcgcaactttgaatgctttcttacttgttttgtgacctaatttatgtggaagattgttatttcattaggatttagtaaaatttttttatctgattctaaacttattgtgaaaattgagctgtacagatattcttttgatttcaattgggaacatttggaagaacaacagtcttacttgcctgtacaatatagagacatatgaatagtcataacagttttcaacttgttcttgtttctgttaaactatattcctagaaacatagtttgaacaacttggtctttgttaggcttgtcaaattgccttcatggaaaaataatctacaaaagtatggtttaattgattgtcttacatgataattttccctggtaacaacttagtaagtgatatatcttttttcctaaattgcttaaatactgtgaaattgctctgacaaattggaagtgtaccattggcatatttgtcttcctttttatgcatgatggtaaaataaaagcatgttgttctgctagatttcttatttttcaccttacccataaatgtaatgcttgaatgaagttgttcatattaattaaaaattatggaatcattaaagtcctttaatccattaaagttcttaatggattaaaatcattaaagttc

SEQ ID NO: 68599 - DNA, 1248 bp, Homo Sapiens
  misc_feature (100)..(134): n is a, c, g, or t
ggaacccctttttgtgaaaactctacatatagggggccgctaagcctccgtctatccgaacgacgagcgcagcgagtcagtgatgcgaggaagcggccgnnnnnnnnnnnnnnnnnnnnnnnnnnnnnnnnnnncagtcgacggtaccggacatatgcccgggaattcggccattacggccgggggagtgggggagagagaggagaccaggacagctgctgagacctctaagaagtccagatactaagagcaaagatgtttcaaactgggggcctcattgtcttctacgggctgttagcccagaccatggcccagtttggaggcctgcccgtgcccctggaccagaccctgcccttgaatgtgaatccagccctgcccttgagtcccacaggtcttgcaggaagcttgacaaatgccctcagcaatggcctgctgtctgggggcctgttgggcattctggaaaaccttccgctcctggacatcctgaagcctggaggaggtacttctggtggcctccttgggggactgcttggaaaagtgacgtcagtgattcctggcctgaacaacatcattgacataaaggtcactgacccccagctgctggaacttggccttgtgcagagccctgatggccaccgtctctatgtcaccatccctctcggcataaagctccaagtgaatacgcccctggtcggtgcaagtctgttgaggctggctgtgaagctggacatcactgcagaaatcttagctgtgagagataagcaggagaggatccacctggtccttggtgactgcacccattcccctggaagcctgcaaatttctctgcttgatggacttggccccctccccattcaaggtcttctggacagcctcacagggatcttgaataaagtcctgcctgagttggttcagggcaacgtgtgccctctggtcaatgaggttctcagaggcttggacatcaccctggtgcatgacattgttaacatgctgatccacggactacagtttgtcatcaaggtctaagccttccaggaaggggctggcctctgctgagctgaactatttcttgctgctcaatccatttcctctggcccagcttcccagtgctcacagatggctggcccatgtgctggaagatgacacagttgccttctctccgaggaacctgccccctctcctttcccacccaggcgtgtgtaacatcccatgtgcctcaccgtaataaaatggctcttcttctgcatc

SEQ ID NO: 68600 - DNA, 731 bp, Homo Sapiens
aaaagtgacgtcagtgatcctggcctgaacaacatcatgacataaaggtcactgacccccagctgctggaacttggccttgtgcagagccctgatggccaccgtctctatgtcaccatccctctcggcataaagctccaagtgaatacgcccctggtcggtgcaagtctgttgaggctggctgtgaagctggacatcactgcagaaatcttagctgtgagagataagcaggagaggatccacctggtccttggtgactgcacccattcccctggaagcctgcaaatttctctgcttgatggacttggccccctccccattcaaggtcttctggacagcctcacagggatcttgaataaagtcctgcctgagttggttcagggcaacgtgtgccctctggtcaatgaggttctcagaggcttggacatcaccctggtgcatgacattgttaacatgctgatccacggactacagtttgtcatcaaggtctaagccttccaggaaggggctggcctctgctgagctgggtcttcccccaacagaactatttcttgctgctcaatccatttcctctggcccagcttcccagtgctcacagatggctggcccatgtgctggaagatgacacagttgccttctctccgaggaacctgccccctctcctttcccacccaggcgtgtgtaacatcccatgtgcctcacctaataaaatggctcttcttctgcatcagg

SEQ ID NO: 68601 - DNA, 682 bp, Homo Sapiens
ctgcttggaaaagtgacgtcagtgattcctggcctgaacaacatcattgacataaaggtcactgacccccagctgctggaacttggccttgtgcagagccctgatggccaccgtctctatgtcaccatccctctcggcataaagctccaagtgaatacgcccctggtcggtgcaagtctgttgaggctggctgtgaagctggacatcactgcagaaatcttagctgtgagagataagcaggagaggatccacctggtccttggtgactgcacccattcccctggaagcctgcaaatttctctgcttgatggacttggccccctccccattcaaggtcttctggacagcctcacagggatcttgaataaagtcctgcctgagttggttcagggcaacgtgtgccctctggtcaatgaggttctcagaggcttggacatcaccctggtgcatgacattgttaacatgctgatccacggactacagtttgtcatcaaggtctaagccttccaggaaggggctggcctctgctgagctgcttcccagtgctcacagatggctggcccatgtgctggaagatgacacagttgccttctctccgaggaacctgccccctctcctttcccaccaggcgtgtgtaacatcccatgtgcctcacctaataaaatggctcttcttctgcaaa

SEQ ID NO: 68602 - DNA, 837 bp, Homo Sapiens
  misc_feature (70)..(70): n is a, c, g, or t
  misc_feature (104)..(104): n is a, c, g, or t
  misc_feature (107)..(107): n is a, c, g, or t
  misc_feature (109)..(109): n is a, c, g, or t
  misc_feature (130)..(130): n is a, c, g, or t
  misc_feature (143)..(143): n is a, c, g, or t
  misc_feature (351)..(351): n is a, c, g, or t
  misc_feature (419)..(435): n is a, c, g, or t
cagatgaacaaatgaatgtggcctcaaagagagaacttactcccttctggatatttatgccacattcgtntgcaaaaggagatatatatatctttagtcagttntgngntatgagaaattatgggtattntgtgcatgctctntggagctgcacagttatgggaggactcccactgctgtgcaagttaagtcttttacaaaacaaggacagcagaggagggtttgcagagacctccctctgaaaaacacaaagaatggactctctcctgggatgaggacttgctttctttacctccggttctttccatgtcttagttggatgtccctgaaatggacacaggctgtgccatntgtgccagaaacattgtgttatcttttatgttgttgttgttgctgttaaactataatatgtgacttcnnnnnnnnnnnnnnnnngtttgaatgctttaaaaatcttttaagtctgtggatctgctgatgtacagtgcctttgctgctatggatcaaaatcaaaagaaccgtgtagatatactttattgtataagtagaaaattacttaatttcatactagaaatggatggatgctgcaagttgaaatggactgtccattgacgttcctaatgtggtagcagaaaaaaatggtgtcttaagtgcttagtgtttgatgtcattaacagtttcgtaaaactctacagtgtagaaagattttgatactaaactgtgcgttgtacatagttctaatgcattgtattgaccaccagtacttctataatggtagattgtttgtgaattcagacttttaagcattaaacataaataacttctagtatgcttatt

SEQ ID NO: 68603 - DNA, 1190 bp, Homo Sapiens
aactggacatatagaacagtgtgttaaaaaaagcaggctggtacggtccggaatcccgggatatcgtcgacccacgcgtcgttcctgagtagggccttgcttgagttcttcggaaagtctcatccacccccacatcgcctctttaggaagtcacttaatgttgggcttcattattcccacatccctttccttactacttgcctgcacttcttgagaaaaagactgcagaaaggagaggtggggctttcagtagaaacaagcaaaccgcaggtccctgtggggggactctccaggaagaagggtaatttcctgcctccttaaattggctgctactgtcagttattttgctcccaaccccagagcttcacttgctccttcacttcccagttccgcaagaaccgtgggcgacagttatggagaagcgtctgcaggaggctcagctgtacaaggaggaagggaaccagcgctaccgggaagggaagtaccgagatgctgtgagtaggtaccatcgagctctgcttcagctgcggggtctggatccgagtctgccctctccgttacctaatctcggacctcagggcccggccctcacgcctgaacaagaaaacatattgcataccacccagacagactgctataacaatctagctgcttgtctccttcagatggagcccgtgaactacgaacgagtgagagaatatagtcagaaagtcctggaacgacagcctgataatgccaaggccttgtatcgggccggagtggcctttttccatctgcaggactatgaccaggcccgccactacctcctggctgccgtgaataggcagcctaaagatgccaacgtccggcggtacctccagctgacacagtcagaactcagcagctaccatagaaaagagaagcagctctacctgggcatgtttggttaacaaagaagaaagatgctcctccagttgaacttaggtggaccattaaacatgcatgaaggagaaatctgagcctcagcaagagaaattaaccctatacctctgacccaggtggatttttgtttctagttctgcacaaacttcactacttagacagtctgagtctttttctgtctatccatctgtttatttctatacctttcaatacatgttattgttgcagatatttggcttgagaaatataatcagaaaacataaaaaaaa

SEQ ID NO: 68604 - DNA, 2402 bp, Homo Sapiens
  misc_feature (2322)..(2322): n is a, c, g, or t
  misc_feature (2331)..(2331): n is a, c, g, or t
aagaggcttggtaccggtccggaattccgggatatcgtcgaccacgcgtcgggagagcgaggggcggcggggcgcccgctggcgctcaagcatggcggcggcggcattgggcagctcctcaggctcggcgtcccggcgtggctgagctctgccagaacaccccggagacctttttggaggcctccaagctgctgctcacctatgctgacaacatcctcagaaaccctaatgatgaaaaatatagatccatccggatggaaacacagccttttctactagactcttgcctgtcagaggagctgttgaatgtttatttgaaatgggctttgaagagggagaaacacatctcatctttcctaaaaaagcttcagtggagcagctgcaaaaaattcgtgacctgattgccatagagagaagtagcagactggatggctcaaataagagccacaaagtaaagtcatctcagcaacctgcagccagtacccagcttcctacaacaccatcttcaaatcccagtgggttaaaccagcacacaaggaaccgtcaagggcagtcatcagatccaccatctgttcaacggttgctgtgactcagccattctagaagttcttcagtccaacattcagcatgtgctggtctatgaaaatcctgctcttcaggagaaagcgttggcttgtattccggtccaagaactaaaaacggaaatcacaagaaaagttatcgagagctagaaaaatggataaaggtatcaatataagtgatgaggattttcttttgctggagcttttgcactggtttaaggaagaattttttcactgggtgaataacgttttgtgcagcaaatgtggtggacagactaggtctagagatagatcattactgcccagtgatgatgagctgaagtggggtgcaaaggaagtggaagatcattactgtgatgcctgccagttcagcaatcgattcccaagatataataaccctgagaaacttttggaaacaagatgtggacggtgtggcgagtgggccaattgttttacactgtgctgccgagctgtagggtttgaagctcgctatgtttgggattacagcagaccatgtctggacagaagtctattctccttctcagcagcggtggctgcactgtgatgcatgtgaagatgtctgtgaccaagccactcctttatgaaataggatggggcaagaagctttcctatgtcatagcattttcaaaagatgaggtagttgatgtcacttggcgatattcctgcaaacatgaagaggtgattgccagaagaactaaggttaaagaagcattacttcgagacactattaatgggcttaataagcagaggcaactgtttttgtcagaaaacagaaggaaagaacttctccagaggataattgtggagcttgttgaatttatatctcccaaaacccctaaacctggagaacttgggggaagaatatctgggtcagtggcttggagagtagcccgaggtgaaatgggtctacagagaaaagaaaccttgtttattccctgtgaaaatgagaagatttctaaacagctccacctttgttacaatattgtgaaagatcgttatgttcgagtttcaaataacaatcaaaccatttctggatgggagaatggcgtgtggaaaatggaatctatattcagaaaagttgaaacagactggcacatggtatatttggcccgaaaggaaggatcatcttttgcttatatttcctggaagtttgagtgtgggtcagttggcctaaaagtagatagcatttctattagaacaagtagtcaaacttttcagactggaacagtagaatggaaattgcgatctgatacagcacaagtagaactgacaggcgataacagtcttcactcctatgctgatttttctggtgccactgaagttattttggaagcagaattaagcagaggagatggtgatgtcgcttggcaacacacccagctgtttagacaaagcttaaatgaccatgaagaaaattgtttggagataattataaaattcagtgacctttgagaacctgaacattatagaaaagctggcaataatcaaggacttactgaagtagtctgttggttcagtgcatgcttagttggcagttaccaccctgtgctagcatatttcttttgctagctatccatcatgtaaccctcatgaaaattatctttatacgtggactataataaaatattgaattaaaacctttcttccatatgtgactataatttggagtaaagtcttgttgactcaatatgggattttaatctaaaactgtaagtatggntttaaaagntaaataatgatattcatgattaaatgctattcatgattatgataaaatctttgggcttatgatagtaattt

SEQ ID NO: 68605 - DNA, 825 bp, Homo Sapiens
cctaggtacgaggctgggtgtgaatcggcacgagggagcgcagctgtgagggagtcgctgtgatccggggccccggaacccgagctggagctgaagcgcaggctgcggggcgcggagtcgggagtgcaggcctgagtgttccttccagcatgtcggagggggagtcccagacagtacttagcagtggctcagacccaaaggtagaatcctcatcttcagctcctggcctgacatcagtgtcacctcctgtgacctccacaacctcagctgcttccccagaggaagaagaagaaagtgaagatgagtctgagattttggaagagtcgccctgtgggcgctggcagaagaggcgagaagaggtgaatcaacggaatgtaccaggtattgacagtgcatacctggccatggatacagaggaaggtgtagaggttgtgtggaatgaggtacagttctctgaacgcaagaactacaagctgcaggaggaaaaggttcgtgctgtgtttgataatctgattcaattggagcatcttaacattgttaagtttcacaaatattgggctgacattaaagagaacaaggccagggtcatttttatcacagaatacatgtcatctgggagtctgaagcaatttctgaagaagaccaaaaagaaccacaagacgatgaatgaaaaggcatggaagcgttggtgcacacaaatcctctctgcctaagctaactgcactcctgtgaccccccaatatccatgggaacctgacctgtgacaccatcttcatccagcacaacggactcatcaagattggctctgtggctcctgacactatc

SEQ ID NO: 68606 - DNA, 2761 bp, Homo Sapiens
  misc_feature (2203)..(2294): n is a, c, g, or t
  misc_feature (2390)..(2398): n is a, c, g, or t
  misc_feature (2456)..(2486): n is a, c, g, or t
  misc_feature (2602)..(2615): n is a, c, g, or t
caaggtagcgaggcctgggtggcgaattcggcacgaggctgaagcgcaggctgcggggcgcggagtcgggagtgcaggcctgagtgttccttccagcatgtcggagggggagtcccagacagtacttagcagtggctcagacccaaaggtagaatcctcatcttcagctcctggcctgacatcagtgtcacctcctgtgacctccacaacctcagctgcttccccagaggaagaagaagaaagtgaagatgagtctgagattttggaagagtcgccctgtgggcgctggcagaagaggcgagaagaggtgaatcaacggaatgtaccaggtattgacagtgcatacctggccatggatacagaggaaggtgtagaggttgtgtggaatgaggtacagttctctgaacgcaagaactacaagctgcaggaggaaaaggttcgtgctgtgtttgataatctgattcaattggagcatcttaacattgttaagtttcacaaatattgggctgacattaaagagaacaaggccagggtcatttttatcacagaatacatgtcatctgggagtctgaagcaatttctgaagaagaccaaaaagaaccacaagacgatgaatgaaaaggcatggaagcgttggtgcacacaaatcctctctgccctaagctacctgcactcctgtgacccccccatcatccatgggaacctgacctgtgacaccatcttcatccagcacaacggactcatcaagattggctctgtggctcctgacactatcaacaatcatgtgaagacttgtcgagaagagcagaagaatctacacttctttgcaccagagtatggagaagtcactaatgtgacaacagcagtggacatctactcctttggcatgtgtgcactggagatggcagtgctggagattcagggcaatggagagtcctcatatgtgccacaggaagccatcagcagtgccatccagcttctagaagacccattacagagggagttcattcaaaagtgcctgcagtctgagcctgctcgcagaccaacagccagagaacttctgttccacccagcattgtttgaagtgccctcgctcaaactccttgcggcccactgcattgtgggacaccaacacatgatcccagagaacgctctagaggagatcaccaaaaacatggatactagtgccgtactggctgaaatccctgcaggaccaggaagagaaccagttcagactttgtactctcagtcaccagctctggaattagataaattccttgaagatgtcaggaatgggatctatcctctgacagcctttgggctgcctcggccccagcagccacagcaggaggaggtgacatcacctgtcgtgcccccctctgtcaagactccgacacctgaaccagctgaggtggagactcgcaaggtggtgctgatgcagtgcaacattgagtcggtggaggagggagtcaaacaccacctgacacttctgctgaagttggaggacaaactgaaccggcacctgagctgtgacctgatgccaaatgagaatatccccgagttggcggctgagctggtgcagctgggcttcattagtgaggctgaccagagccggttgacttctctgctagaagagaccttgaacaagttcaattttgccaggaacagtaccctcaactcagccgctgtcaccgtctcctcttagagctcactcgggccaggccctgatctgcgctgtggctgtccctggacgtgctgcagccctcctgtcccttccccccagtcagtattaccctgtgaagccccttccctcctttattattcaggagggctgggggggctccctggttctgagcatcatcctttcccctcccctctcttcctcccctctgcactttgtttacttgttttgcacagacgtgggcctgggccttctcagcagccgccttctagttgggggctagtcgctgatctgccggctcccgcccagcctgtgtggaaaggaggcccacgggcactaggggagccgaattctacaatcccgctggggcggccggggcgggagagaaaggtggtgctgcagtggtggccctggggggccattcgattcgcctcagttgctgctgtaataaaagtctactttttgctactagaaaagacaacacccatgaaaataaaagagaaaattagatttgttcccacnnnnnnnnnnnnnnnnnnnnnnnnnnnnnnnnnnnnnnnnnnnnnnnnnnnnnnnnnnnnnnnnnnnnnnnnnnnnnnnnnnnnnnnnnnnncaaaacacacacaacaaatttttaaaaaaactttggggggccctttggcgccctgggggcccctccaccccctaaaattgttttaaaacccccttnnnnnnnnnccgcggccaaaaaggggtccaaagggacaaccggtttttcaaaagagttcgggggctnnnnnnnnnnnnnnnnnnnnnnnnnnnnnnncggccgggagaaaaacccagagggttttacaacaccccataggggggttttaggggactttcccccgcactcccacccccagaagtaaaataggggggccccgtcttaacaaaatnnnnnnnnnnnnnnggggtaaccttctctaaaagggtttttgggacaccttgaaaaccccctccccgcgggggagggactcccccccaacaggcgggggagaaaatcacaaccccctgcccggttttgaaaaacaatatttgcgccccgggggagaaaaa

SEQ ID NO: 68607 - DNA, 820 bp, Homo Sapiens
catatgatctattggattcctattcacaaatgaaaattatcaaacaataatttgtctcgccaggcaatgctactagaagttacttatataggtgccgtagtgttcatttaatttcagtttaactgaagcgattttgcccttttccttccttctacgtggtcactctgctgttcaaagggtaagcaccatttgttcaggtaaagcaattggtgtttgaaatccttccgatagatacgccatctcagagggctgctaatataactaactgtacaagacacacataattttaggttggccattcttgtgtataggggtaatctaaagctagtagttacaccccacaaaagaaaataaattcttatgacctctttgatcccacctgaaatatctcacaataaacaacaaataaataataagcaaacaaaacaaacagtagccttccccagttgcaggggcctaaaatatctcctaatctgaatttcgtctcaggacaggaaactattccataggcttcctcgcaggcttctgtgctggagtttgtcccactgactttggttgtccatctctctacaagaagggaacattctgaaacttagtttaaatactactaggccttagaatcttttgtaggtagttgctgaaacttgaagttgaataatactttgaagtactatgttacattgcattatgaaaaccttcatttttgtagctgtctcttgatctgcccaacatgtcacacaaatatagaagaaacggaatctgcaataccacaaacattacttcccattttgacatgggcataaccatctactccccaaga

SEQ ID NO: 68608 - DNA, 854 bp, Homo Sapiens
gtgacatatagacacgttaaaaaagcaggctggtacgcgccggtatcccgggatatcgtcgacccacgcgtcgggactgtggagcgggcgcacgttccggaagcggcgagggtagccatgacggcctccgtgctgcgaagtatctcgctagccctgcgcccgactagcgggcttctgggaacttggcagacgcagcttagagagactcaccagcgagcgtcattgttgtctttctgggaactcattcccatgagatcagaacctcttcgaaaaaagaagaaggtagatcctaaaaaagaccaagaagcaaaggagcgcttgaaaaggaagatccgaaaactggaaaaggctactcaagagctaattcctattgaagattttattacccctctaaagttcttggataaagcaagagagcggcctcaggtggagctcacctttgaggagactgagaggagagctctgcttctgaagaagtggtccttgtacaagcagcaagagcgtaagatggagagggacaccatcagggctatgctagaagcccagcaggaagctctggaggaactgcaactggaatccccgaagctccatgctgaggccatcaagcgggatcctaacctgttcccctttgagaaggaagggccacattacacaccaccgatccctaactaccaaccccctgaaggcaggtacaatgacatcaccaaggtgtacacacaagtggagtttaagagatagacttgcaggctgctatccttaacatgctgcccctgagagtaggaatgaccagggttcaagtctgctttccacagaatcaggcatgctgttaataaatactggtttaatcaaaatgc

SEQ ID NO: 68609 - DNA, 848 bp, Homo Sapiens
  misc_feature (26)..(26): n is a, c, g, or t
ggcggggcgcgacacaaagaaatacnggaaatatcatgcgggtcttgtatttttgtgggctgaagagccagttattttattaaccagccatgccttgatttctggggggaaggcaagaccttgaaaccctgggtccattccctactcttcagggggccagcaaggttaagggatagcaagcctgcaaggtctatctctttaaactcccacttgtgtgtacacccttggtgatgtcattgtacctgccttcaggggggttggtagttagggatcggtgggtgtgtaatgtggcccttccttctcaaaggggaacaggttaggatcccgcttgatggcctcagcatggagcttcggggattccagttgcagttcctccagagcttcctgctgggcttctagcatagccctgatggtgtccctctccatcttacgctcttgctgcttgtacaaggaccacttcttcagaagcagagctctcctctcagtctcctcaaaggtgagctccacctgaggccgctctcttgctttatccaagaactttagaggggtaataaaatcttcaataggaattagctcttgagtagccttttccagttttcggatcttccttttcaagcgctcctttgcttcttggtcttttttaggatctaccttcttcttttttcgaagaggttctgatctcatgggaatgagttcccagaaagacaacaatgacgctcgctggtgagtctctctaagctgcgtctgccaagttcccagaagcccgctagtcgggcgcagggctagcgagatacttcgcagcacggaggccgtcatggctaccctcgccgcttccgggcgtgcgcccc

SEQ ID NO: 68610 - DNA, 2705 bp, Homo Sapiens
  misc_feature (2590)..(2590): n is a, c, g, or t
  misc_feature (2597)..(2597): n is a, c, g, or t
gtggtaccggtccggaattctcgggatatcgtcgacccacgcgtccgggccctccgggaagatggcggccgtgcaggcggccgaggtgaaagtggatggcagcgagccgaaactgagcaagaatgagctgaagagacgcctgaaagctgagaagaaagtagcagagaaggaggccaaacagaaagagctcagtgagaaacagctaagccaagccactgctgctgccaccaaccacaccactgataatggtgtgggtcctgaggaagagagcgtggacccaaatcaatactacaaaatccgcagtcaagcaattcatcagctgaaggtcaatggggaagacccatacccacacaagttccatgtagacatctcactcactgacttcatccaaaaatatagtcacctgcagcctggggatcacctgactgacatcaccttaaaggtggcaggtaggatccatgccaaaagagcttctgggggaaagctcatcttctatgatcttcgaggagagggggtgaagttgcaagtcatggccaattccagaaattataaatcagaagaagaatttattcatattaataacaaactgcgtcggggagacataattggagttcaggggaatcctggtaaaaccaagaagggtgagctgagcatcattccgtatgagatcacactgctgtctccctgtttgcatatgttacctcatcttcactttggcctcaaagacaaggaaacaaggtatcgccagagatacttggacttgatcctgaatgactttgtgaggcagaaatttatcatccgctctaagatcatcacatatataagaagtttcttagatgagctgggattcctagagattgaaactcccatgatgaacatcatcccagcgggagccgtggccaagcctttcatcacttatcacaacgagctggacatgaacttatatatgagaatagctccagaactctatcataagatgcttgtggttggtggcatcgaccgggtttatgaaattggacgccagttccggaatgaggggattgatttgacgcacaatcctgagttcaccacctgtgagttctacatggcctatgcagactatcacgatctcatggaaatcacggagaagatggtttcagggatggtgaagcatattacaggcagttacaaggtcacctaccacccagatggcccagagggccaagcctacgatgttgacttcaccccacccttccggcgaatcaacatggtagaagagcttgagaaagccctggggatgaagctgccagaaacgaacctctttgaaactgaagaaactcgcaaaattcttgatgatatctgtgtggcaaaagctgttgaatgccctccacctcggaccacagccaggctccttgacaagcttgttggggagttcctggaagtgacttgcatcaatcctacattcatctgtgatcacccacagataatgagccctttggctaaatggcaccgctctaaagagggtctgactgagcgctttgagctgtttgtcatgaagaaagagatatgcaatgcgtatactgagctgaatgatcccatgcggcagcggcagctttttgaagaacaggccaaggccaaggctgcaggtgatgatgaggccatgttcatagatgaaaacttctgtactgccctggaatatgggctgccccccacagctggctggggcatgggcattgatcgagtcgccatgtttctcacggactccaacaacatcaaggaagtacttctgtttcctgccatgaaacccgaagacaagaaggagaatgtagcaaccactgatacactggaaagcacaacagttggcacttctgtctagaaaataataattgcaagttgtataactcaggcgtctttgcatttctgcgaaagatcaaggtctgcaagggaattcttgtgtgctgctttccatttgacaccgcagttctgttcagccatcagaagagagacaaggaattaaaaatttctttttaatcctgttaccggccaaaggaagacacaggaggagagcaccacacaatggtcggccgcccccggcccctccgagaagcttttcctaaacccatccctttttgggccccgcggggccccggggcaggtgagggtggacacctcgggccgccaggcttgtgttcgccgacgaaacatccccggggcgccatggaaatcaaggggggttcggggcatttccttccaccccaatatccaaagagaaagcgccctctcggttcgcggcgccaactcccattcagacaggcactcgtcgcgaaaccgacacacccacccgaatgatggcggtgtcctccgtcgagacggcgtcatattcagcgtgtggggtactcccatgggccgccaggcgtgccacccctgcctcgcgtgggaaatgtgtcaacgatttcagcaaagactggttagcgtcgctcaggggcggcctgggcgaaagaccaaatctgggaagcccccggtgcttcggggaacatcttaggttttgaggagggacatgtgcgccaccgggcctgctttatagaatggcctcccgtacggagagcgggtnggagtcngacgcgacccgaccgtcgagaccgccgcgacgcccacggtcttccctctacgccctctgtgtggacgtgttgaccgcgcatccacatcttgtatgcgcactgtgtaga

SEQ ID NO: 68611 - DNA, 1136 bp, Homo Sapiens
taacggctaggtacgaggcctgggcggttgaattcggcacgaggcctccttacttttgggtcgggccctccgggaagatggcggccgtgcaggcggccgaggtgaaagtggatggcagcgagccgaaactgagcaagaagtggtggtaatcattagttccagggtgctctgccatgttgacgcaagctgctgtaaggcttgttagggggtccctgcgcaaaacctcctgggcagagtggggtcacagggaactgcgactgggtcaacttgctcctttcacagcgcctcacaaggacaagtcattttctgatcaaagaagtgagctgaagagacgcctgaaagctgagaagaaagtagcagagaaggaggccaaacagaaagagctcagtgagaaacagctaagccaagccactgctgctgccaccaaccacaccactgataatggtgtgggtcctgaggaagagagcgtggacccaaatcaatactacaaaatccgcagtcaagcaattcatcagctgaaggtcaatggggaagacccatacccacacaagttccatgtagacatctcactcactgacttcatccaaaaatatagtcacctgcagcctggggatcacctgactgacatcaccttaaaggtggcaggtaggatccatgccaaaagagcttctgggggaaagctcatcttctatgatcttcgaggagaggggggtgaagtgcaagtcatggccaattccagacattattactcagaagaagacttattcatattaataacaaactggcgtcggggagacatacatggcagtccggggaaatccggtaaaaccaggaaggtgagctgagcatcattccgttgagatccaggcagctcccgttggcttgttacgcaatctacgtggggctcaaagaccggacacgtttcgccagagacctgaatagagcccagcatgactaggggggcgaaaatataacccggcaaaaatcacgattataacaggacacaaaacaaggcacaaagaaaaccgtgcgtacccggagagcagcgacccataatacaaagcgcgagattgtaagagcgccaaagcacgtggagcgcgtcgaataccacgagcagtcacacggcgcacacatgg

SEQ ID NO: 68612 - DNA, 1740 bp, Homo Sapiens
  misc_feature (1318)..(1466): n is a, c, g, or t
  misc_feature (1502)..(1515): n is a, c, g, or t
  misc_feature (1531)..(1539): n is a, c, g, or t
  misc_feature (1581)..(1590): n is a, c, g, or t
  misc_feature (1634)..(1671): n is a, c, g, or t
gtggtaccggtccggaattcccgggatatcgtcgacccacgcgtccgctcagcttgtgagcctgagaacctggaatttagttccttcatgttctggagaaaccctttgcccaacatccgatcatgaactgcaggagctgctgattgacagaggtgaggacgttccaagtgaggaggaggaggaggaagaaaacgggtttgaagacagaaaagatgacagcgatgacgacgggggtggctggataacccccagtaacatcaagcagatccagcaggagctggagcagtgtgacgtccccgaggacgtgcagggttggctgcctgaccacagacttcgccatgcagaatgttctgctgcagatggggctgcacgtgctggcggtgaacggcatgctgattcgtgaggcccggagctacatcttgcgctgccatggctgtttcaagacaacgtctgacatgagccgagtgttctgctcacactgtgggaacaagaccctgaagaaagtgtccgtgaccgtcagcgacgacggcaccctgcacatgcacttctcccgcaaccccaaggtgctgaacccccgcggcctccggtactcgcttcccactcccaaagggggcaaatacgccatcaacccccatctcaccgaggatcagcgcttccctcagctgcgactctcccaaaaggccaggcagaaaaccaacgtgttcgcccctgactacatcgccggggtgtcaccctttgtcgagaatgacatctccagccgctcagctaccctgcaggtccgggacagcaccttgggagctgggcggagacgcttaaatcccaacgcttccagaaagaagtttgtgaagaaaaggtgaagagcgagttcccgcaggcaaattggatgggcgtctggccgccgtggagttccggtgacccatttccccagccgtgtcgtctccaggaccacccgatggaaataacaggcgggcttcacggtgcggctctgtccgcccatgccccgctgggtctgcagggaactggactgtcccatggcctgtgagcaccggagcgcctggctgcctgccaaggaagtgcaattgcataaaaacagaaagaacaacgccctggagccaatcttcaagaaaggaatttccaaaggataatatttttctaataaatgcggctgcaacctcctgtgcatttaattaaataggccaaatttttgctgcttaggtcatctcaaggctgatacttgagctgtgtgcccagagatcatgcatttagatttatatttttgccagaaaatacaaggttataataaaactaagaactaccnnnnnnnnnnnnnnnnnnnnnnnnnnnnnnnnnnnnnnnnnnnnnnnnnnnnnnnnnnnnnnnnnnnnnnnnnnnnnnnnnnnnnnnnnnnnnnnnnnnnnnnnnnnnnnnnnnnnnnnnnnnnnnnnnnnnnnnnnnnnnnnnnnnnngaaaaagggggcccctaaagggggctttattaaaannnnnnnnnnnnnncgttttttaaaacctnnnnnnnnnaaaaaccgccccttgggattttttggaaaaaaaccttctttnnnnnnnnnncaattttgggccaaccccccccaaaaatttaaaccccccggggnnnnnnnnnnnnnnnnnnnnnnnnnnnnnnnnnnnnnncggcaaatttcttggggttaaaaaatttttccaccggggatgttttttaaaaaattttcccccgggctt

SEQ ID NO: 68613 - DNA, 951 bp, Homo Sapiens
tataaaagacggccagtaactacaacggtcctaaggtagcgaggcctgggtggcgaattctggcacgaggcaacatggctccagtggagcacgttgtggcggatgctggggctttcctgcggcatgcggctctgcaggacatcgggaagaacatttacaccatccgggaggtggtcactgagattcgggacaaggccacacgcaggcggctcgctgtcctgccctacgagctgcggttcaaggagcccttaccggaatacgtgcggctggtgactgagttttcaaagaaaacaggagactaccccagcctctctgccacggacatccaagtgcttgcactcacataccagttggaagcagagtttgttggggtgtctcacctaaaacaagaaccacagaaggttaaggtgagctcatcgattcagcacccagaaacacctctgcacatttctggtttccatctgccctacaagcctaaacccccacaagaaacagaaaaaggacactcagcttgtgagcctgagaacctggaatttagttccttcatgttctggagaaaccctttgcccaacatcgatcatgaactgcaggagctgctgattgacagaggtgaggacgttccaagtgaggaggaggaggaggaagaaaacgggtttgaagacagaaaagatgacagcgatgacgacgggggtggctggataacccccagtaacatcaagcagatccagcaggagctggagcagtgtgacgtccccgaggacgtgcgggttggctgcctgaccacagacttcgccatgcagaatgttctgctgcagatggggctgcacgtgctggcggtgaacggcatgctgattcgtgaggcccggagctacatcttgcgctgccatgggctggttccaagacaacgtctgccactttgaacccgagtggttctggctccacacctgtggg

SEQ ID NO: 68614 - DNA, 1847 bp, Homo Sapiens
  misc_feature (1014)..(1030): n is a, c, g, or t
  misc_feature (1267)..(1277): n is a, c, g, or t
cggaagaagagattgcactgaccagaggaccgccaggtctgtgatgctccgtagtcgcagggatgaaggaaaaccatgggcggagcttgtcatggacagctcctaggtggacataaatggaaactcattggttctggggcacggcgggaagagggagacggccctggacggccgcaccaagaatttcacaacccaaacccgactagaaagcctgggttatggccacaccgtgcccttgtcagatggaggtaaggccttctgcatcatctactccgtcattggcattcccttcaccctcctgttcctgacggctgtggtccagcgcatcaccgtgcacgtcacccgcaggccggtcctctacttccacatccgctggggcttctccaagcaggtggtggccatcgtccatgccgtgctccttgggtttgtcactgtgtcctgcttcttcttcatcccggccgctgtcttctcagtcctggaggatgactggaacttcctggaatccttttatttttgttttatttccctgagcaccattggcctgggggattatgtgcctggggaaggctacaatcaaacaattcagagagctctataagattgggatcacgtgttacctgctacttggccttattgccatgttggtagttctggaaaccttctgtgaactccatgagctgaaaaacattcagcaaaaatgttctatgttgaagaaggacaaggacgaggatcaggtgcacatcatagagcatgaccaactgtccttctcctcgatcacagaccaggcagctggcatgaaagaggaccagaagcaaaatgagccttttgtggccacccagtcatctgcctgcgtggatggccctgcaaaccattgagcgtacgatttgttgcattatgctagagcaccagggtcagggtgcaaggaagaggcttaagtatgttcatttttatcagaatgcaaaagcgaaaattatgtcactttaagaaatagctactgtttgcaatgtcttattnnnnnnnnnnnnnnnnngacaaatggaacaaagaagctgtgaccccagcaggatgtctaatatgtgaggaaatgagatgtccacctaaaattcatatgtgacaaaattatctcgaccttacataggaggagaatacttgaagcagtatgctgctgtggttagaagcagattttatacttttaactggaaactgtggggtttgcatttagatcatttagctgatggctaaatagcaaaatttatatttagaagcnnnnnnnnnnngcatagagatgtgttttataaataggtttatgtgtactggtttgcatgtacccacccaaaatgattatttttgtagaatctaagttaaacttactatttataatgcataggtaaccattaactatgtacatataaagtataaatatgtttatattctgtacatatggtttaggtcaccagatcctagtgtagttctgaaactaagactatagatattttgtttcttttgatttctctttatactaaagaatccagagttgctacaataaaataaggggaataataaacttgagagtgaataaccatagtattctgctgcaataaatgtttctaccctcttgcgatagaatggtgtcagatgtctaacatgtttataaacatttttttgaattgaacaggttatgaaaaggatttattaaaaggttaagatactttgttttgaaagtacattgtgatttgcagccacctagcactaaagcatagaacttaaacacgaatccctaaatgaacagattatgttacattaatctgagaattttaaatttagaagctaaaataaataaaaatcac

SEQ ID NO: 68615 - DNA, 1455 bp, Homo Sapiens
  misc_feature (28)..(28): n is a, c, g, or t
  misc_feature (130)..(131): n is a, c, g, or t
  misc_feature (144)..(144): n is a, c, g, or t
  misc_feature (158)..(158): n is a, c, g, or t
  misc_feature (263)..(263): n is a, c, g, or t
  misc_feature (269)..(269): n is a, c, g, or t
  misc_feature (1035)..(1069): n is a, c, g, or t
taacaagccccgctgatccaagctttgncccatgaaagagtatgctgtcaccccagacgaatttaattatatagcagcatcaccaaacaaacagaggagatacccttgagagcgggagcaaacacagcanngaaagtgctgatnacaggtcatccccntagtgacttctgagcacacccagaaggagacacatccaggtagcaaaccatgtgattcttctgactctattcctcttctgccagtagttccttgagctcaaactntacttntgcaacaagcagaatgtacacatgttaaacaagggcatacaagcaggtaacttggagattgtgaacggtgccaaaaaacacactcgagatgttgggataactttcccaactccaagttccagcgaggctaaattggaagagaacagtgatgtgacttcttggtcagaagaaaaacgtgaagagaaaatctctttaccggttatcctgaggacagaaagttaaaaaagaacaagaagaattcccatgaaggagtttcctggtttgttcctgtggaaaatgtggagtctagatcaaagaaggaaaacgtgcctaacacttgtggccctggcatctcctggtttgaaccaataaccaagaccagaccctggagggagccactgcgggagcagaactgtcaggggcagcacctggacggtcggggctacctggcaggcccaggcagagaggctggcagagacctactgaagccatttgtgagagcaacccttcaggaatcgcttcagtttcacagacctgacttcatctcccgctctggggagcggataaagcgcctgaagttaatagtccaggagaggaagctgcagagcatgttacagaccgagcgggatgcactattcaacattgacagggaacggcagggccaccagaatcgcatgtgcccgctgcccaagagagtcttcctggctatccagaagaacaagcctatcagcaagaaggaaatgattcagaggtccaaacggatttatgagcagcttccagaagtacnnnnnnnnnnnnnnnnnnnnnnnnnnnnnnnnnnntataagtcataccggctgcgagcccagctatataaaaagagagtgaccaatcaacttctggggagaaaagttccctgggactgacacaagtttattttcctcagagccttggaattctattttatgaacctagagaagcagaatccttacttttgtgagtctggttgaataaagcttattctttgtccatgtgtattttagaaatagtaacttctaaagagtctggaacaaagtggtgattaaaattcctaatggtttgggagcaatactttctgcatagtggccttgtccaatggcctgtgtgttacaatgatatgatcatttctcaagaataagtccctttttgtatgtgtttttatacttttacaaaataaaaactttagatt

SEQ ID NO: 68616 - DNA, 877 bp, Homo Sapiens
  misc_feature (370)..(382): n is a, c, g, or t
  misc_feature (472)..(484): n is a, c, g, or t
  misc_feature (486)..(487): n is a, c, g, or t
  misc_feature (489)..(567): n is a, c, g, or t
  misc_feature (573)..(573): n is a, c, g, or t
  misc_feature (576)..(611): n is a, c, g, or t
  misc_feature (635)..(645): n is a, c, g, or t
  misc_feature (647)..(702): n is a, c, g, or t
  misc_feature (796)..(808): n is a, c, g, or t
cggtccggaattcccgggatatacagttgaaaaatatgccatttcataaagtctgaggattttcgtcaaccttactgaaacacactggtgctttcatcatcagaggtcaaattattatgataactattccattaagtttgccaaacatttgtcgtggttaccagtgcagcctgtcaaattctgctatttgacacagctttggaaagatttagttcttggtttttccgttttgtattagaatgactgttacagttttatttggctgtttaaagccaaattcagctatttaattatggtttcatggacactgttgagcaatgtacagtgtatggtgtgcttacctgtccactctagagcattgcttacaggnnnnnnnnnnnnnaagatgctgtgctgtaaaatactgtcatacttgctatttcctggtacagtgtagtttttcccctttcatttgaataaaagcatggcaccnnnnnnnnnnnnnannannnnnnnnnnnnnnnnnnnnnnnnnnnnnnnnnnnnnnnnnnnnnnnnnnnnnnnnnnnnnnnnnnnnnnnnnnnnnnncacaanccnnnnnnnnnnnnnnnnnnnnnnnnnnnnnnnnnnnncgcccatattttaccgccaccccnnnnnnnnnnngnnnnnnnnnnnnnnnnnnnnnnnnnnnnnnnnnnnnnnnnnnnnnnnnnnnnnnnnccccgcgttttttatacacccctcccggggtgggggaaaaaaccgcccccctccgggggaatctctttgaggaagaaaacaattttttttcttnnnnnnnnnnnnncgaatatattttggtggacacacaatccctcccccccaagaatattttttacccgcctcccccaggggg

SEQ ID NO: 68617 - DNA, 676 bp, Homo Sapiens
cggataagcatcacatgtgctgtggaaaggagaaaatatcagatacacagaaagactggaagttctttgagtcccttttatactttctgtacatatgtggcttggattgtcttccgacgtcaacacttgacagagattgaagaagaagtagggagactctttcgtaccaatatgttcaacattcctcgcaggaggcgtgaagatgaggaatcaggaggggaaaagaaacgcatgacttttgttcagttcaggagaatgatggcaaaacgcccagcaattaaaaaagctatcaacatgcgttctccagtcatgtctactctgctgccatctctcagagaaaaagctcaaaacgtctttgagaaaaagtatcatcaagtagacgtcagattcccagccgagatgcaaaagcatgtgggaactctggactctgtgcccatgccggtagttggcatcttgggggagcctcgatgtctattcaacccacatacgcttcacccccttgatccagaagaaaacacaaaatcatttgggagatatccttccttgatggaaaacaataacatgaggattcaggatacactggacttggtcatgaaaacactgtcctctcatacatcatgccctaagtaacctggtacattccatatctcaagtaaactactttgactttataaaa

SEQ ID NO: 68618 - DNA, 1883 bp, Homo Sapiens
  misc_feature (78)..(112): n is a, c, g, or t
atgtatagatcactatagggctactcggtcacaccgaacgacgagcgcagcgaggtcagtgagcgaggaagcggccgnnnnnnnnnnnnnnnnnnnnnnnnnnnnnnnnnnncagtcgacggtaccggacatatgcccgggaattcggccattacggccggggcttttccgggacaacatggcgccgtccacgccgctcttgacagtccgaggatcagaaggactgtacatggtgaatggaccaccacattttacagaaagcacagtgtttccaagggaatctgggaagaattgcaaagtctgtatctttagtaaggatgggaccttgtttgcctggggcaatggagaaaaagtaaatattatcagtgtcactaacaagggactactgcactccttcgacctcctgaaggcagtttgccttgaattctcacccaaaaatactgtcctggcaacgtggcagccttacactacttctaaagatggcacagctgggatacccaacctacaactttatgatgtgaaaactgggacatgtttgaaatctttcatccagaaaaaaatgcaaaattggtgtccatcctggtcagaagatgaaactctttgtgcccgcaatgttaacaatgaagttcacttctttgaaaacaacaattttagtatggaaagatttatgacataattttattacttactgtaatcgtatacagtttccattaacttttatgacatcatagggttttcctaaatactgttaatctattaatcaataattactcttacatacatttgcataattctttataagtctgaattcagtgaaaatctgtaacacaaaggttttcttttacaataactttttattatctggtaattgctattaagacatttgaatatcttttcctgaatttaattgctattgaaattctgtgacacaaattttttagatattttatcgtgtagaattttaaacttcagacacctagttctagtaaccatcagcttgtggccaatcttatctcatccatacatctctccagctaccatctcttactaagtgaaagcaaatcccagatatggttatacttttatatacttgttaaatatgtaattgtaaatatttcagagtagatttctgaagattggggcctttcattttttaaacttagccacaaaaccattatcacaaattattaaatatgtgttcaaatttctactaattgcaaatgttacaattttttttaaaactcgggatccaaataaagtacctgcacattgtgggtgatggatatatcttttatgtttctttgggtcctataagttcccactctatctgttattttattcttcataatttattgtttaagaaacaaggttatttgtctttcacgttttcccatagtttgaattttgcttttgtatcccatggtataatttaacatgttcatctgtcccctataaattgcaagttggctctagagtttcagcttcaggttcttttttaggtgagtaagggtaagactacattataaggtgatgttaacttcttttatcaagaagcacataatgtctggttgtctttaattttgtaggcttagctgacattaatgtttcatgcctggatgcattatttcatcagtggttgcaaattgttgatactctggttttttctccctcacttatttttcagctgtactgcttctataaagaaaaatttccccttctactatttggttacctagtgctgcatttatatagaaaaggcgggataaatattcttgctcttatcagttttaatataatgtattccacctctagcaaccttcattgtaaccaattagctttttccccattcttgtttttcgagagtgggcctcattcttttgtcc

SEQ ID NO: 68619 - DNA, 2133 bp, Homo Sapiens
  misc_feature (2075)..(2083): n is a, c, g, or t
ggtaccggtccggaattcccgggatatcgtctttccgggacaacatggcgccgtccacgccgctcttgacagtccgaggatcagaaggactgtacatggtgaatggaccaccacattttacagaaagcacagtgtttccaagggaatctgggaagaattgcaaagtctgtatctttagtaaggatgggaccttgtttgcctggggcaatggagaaaaagtaaatattatcagtgtcactaacaagggactactgcactccttcgacctcctgaaggcagtttgccttgaattctcacccaaaaatactgtcctggcaacgtggcagccttacactacttctaaagatggcacagctgggatacccaacctacaactttatgatgtgaaaactgggacatgtttgaaatctttcatccagaaaaaaatgcaaaattggtgtccatcctggtcagaagatgaaactctttgtgcccgcaatgttaacaatgaagttcacttctttgaaaacaacaattttaacacaattgcaaataaattgcatttgcaaaaaattaatgattttgtattatcacctggaccccaaccatacaaggtggctgtctatgttccaggaagtaaaggtgcaccttcatttgttagattatatcagtaccccaactttgctggacctcatgcagctttagctaataaaagtttctttaaggcagataaagttacaatgctgtggaataaaaaagctactgctgtgttggtaatagctagcacagatgttgacaagacaggagcttcctactatggagaacaaactctacactacattgcaacaaatggagaaagtgctgtagtgcaattaccaaaaaatggccccatttatgatgtagtttggaattctagttctactgagttttgtgctgtatatggttttatgcctgccaaagcgacaattttcaacttgaaatgtgatcctgtatttgactttggaactggtcctcgtaatgcagcctactatagccctcatggacatatattagtattagctggatttggaaatctgaggggacaaatggaagtgtgggatgtgaaaaactacaaacttatttctaaaccggtggcttctgattctacatattttgcttggtgcccggatggtgagcatattttaacagctacatgtgctcccaggttacgggttaataatggatacaaaatttggcattatactggctctatcttgcacaagtatgatgtgccatcaaatgcagaattatggcaggtttcttggcagccatttttggatggaatatttccagcaaaaacaataacttaccaagcagttccaagtgaagtacccaatgaggaacctaaagttgcaacagcttatagacccccagctttaagaaataaaccaatcaccaattccaaattgcatgaagaggaaccacctcagaatatgaaaccacaatcaggaaacgataagccattatcaaaaacagctcttaaaaatcaaaggaagcatgaagctaagaaagctgcaaagcaggaagcaagaagtgacaagagtccagatttggcacctactcctgccccacagagcacaccacgaaacactgtctctcagtcaatttctggggaccctgagatagacaaaaaaatcaagaacctaaagaagaaactgaaagcaatcgaacaactgaaagaacaagcagcaactggaaaacagctagaaaaaaatcagttggagaaaattcagaaagaaacagcccttctccaggagctggaagatttggaattgggtatttaaagattcacggaaagcaagttgatgaccagaaatcagtgcaaacacatcttctgttaaacccattggtatacacagaatattcctgtgcccacacttaatgtcaatctataattttaaccatttatccaagattctactaagtgtaaaattatttaataatgtctattaaattgatatttatatcttgcatcctatatcatgtcaatatgtgatatagaaaagagatacgtgaattttttagctaagcttgacagattgaaagacaagtgtcannnnnnnnngtagagggtgatatataccatgtaaatgaataaagacattttaaatttac

SEQ ID NO: 68620 - DNA, 2188 bp, Homo Sapiens
ggcgatagtactatagaccagtgtcacaaaagcaggctggtaccggtcggatatcccgggatatcgtcgaccacgcgctccgggtcaagggactccttttctgggttcgggtctttgcccttcccaagggactgttcttgtggcccttaatgggaagggggcaggggtgaggagctgagcctgctcaaggagtgggaagtggggctataggcagcctctctgatgcactctcttccatctctttccccaaggctccgtgactgtcaaactgggagtaggagaggggacaatttaggactgggctagattttcagaagaacatctacaatatcctatttataaatcttcctctgggaaaaggagtggtttctggctgaatactatcttaggctcaaggagaaacaaaataaaaattagcttccaggcagcctgtttttaaagaaatgggactaatgggagaagctgtttgtcactctaagagcatccaagccctggcccgtctgtgcactcttggctcctggggagatatatctgccttctaagaaggcaggccaggtcttgggcacagacctgcatttgttgaccttgcactccaactatagtgccttgcaagtgctcaacagtacatattggaatgaagtccctatgagagccatttctggccatgttctatacctcaaagtgaggctggcaggtacagagatgaactgtacacatgtgatacatttaagccactggaaaaacccctgtgcttgaaaatatttcctctatatcatgcctggagttccatcatagcccttcatttccttggctttagcatttaccttctcttaagaattaccagctttcccctttccctgagaggaagagcacatgttggtctcctcttagtgtgaacgagattgccaggcccttttctcctatgcacaccaggatagacaaggcaggggatactggcagcctgcatcatcctcccattgggctgacagctggccctactttcctccctctgctgcttggtccctcaccttgatgatgtggcttcgccccctccactctactgccagtgttctcccagggcttgctaaatccagctagacccctttcctgtcttatctagatctgggcagcatttgacatggtctgatcaccccttgcttcttggtatggcacttccctggcacctctgtggctagttgtcctacctccctggctgttcctttcaggcttccgtgcaggcttctccactggcccatgcacagtagggtctttcagggttctgctgtgggctccctagggaagcccatccatctggatggtttcaaggatggtgaggaatttagagttgacctccagccccaacatccttcctgatcacctgaaccacagttttgctgccctctaggtgcacagacaattcaggtccatggcccagatggtacttgctgtcttctgcaaacctgccccttctgggtacttcccttgaccccgagatcactcaggagccagacaggaaacttattctattcctgttttctctttctgcccaccacatccaatctctcaaaacggtcaggtctaccttaacatctcttgatttgagccactcccactgtcatcagctttcacctggattatcgtgacagcctcctactgcttctctatcatgtggccagagctatcttcctaaaatgcattgcatagttgatcaagtcactctctggcctaaaaccttccttggctccctgctgccctcaggataaagtctggacccctcagcatggcttgtgagactcatggtgtccttgtccctgctcacctctctggtctcatcacttgccttcttgcattctgggtcccagcctcctgtatccagagatgcagtggctctccattgccactctgattcctcctttcttttggtcacagagaaagggtactttctctgtcaaatctcaacttagacttgacttcctccaaggagctttggctatactctctcctcccgacccccaccctggcatactacacagatcactctgggctcacttgcctgcctaatggtcatctccccagtagactgtaagctccttgagggcaaggattgtgttggaatttttgtattaacagtgcctggcttggtgcctggcacctagaaagcactcaataaatgtttgtttaatgaaaa

SEQ ID NO: 68621 - DNA, 2047 bp, Homo Sapiens
  misc_feature (150)..(425): n is a, c, g, or t
tatttaagtctgtacttcagtgtcttcattgttttaaatgagagaactggactagattttatataagtacctactaaagcctagtgttttgcagttacttcccttccctgtccaaaattttgcctcctttgattttcaatatatatatannnnnnnnnnnnnnnnnnnnnnnnnnnnnnnnnnnnnnnnnnnnnnnnnnnnnnnnnnnnnnnnnnnnnnnnnnnnnnnnnnnnnnnnnnnnnnnnnnnnnnnnnnnnnnnnnnnnnnnnnnnnnnnnnnnnnnnnnnnnnnnnnnnnnnnnnnnnnnnnnnnnnnnnnnnnnnnnnnnnnnnnnnnnnnnnnnnnnnnnnnnnnnnnnnnnnnnnnnnnnnnnnnnnnnnnnnnnnnnnnnnnnnnnnnnnnnnnnnnnnnnnnnnnnnnnnnnnaactaactttcaaagtgactttcaaacacttccttctaacccatgattatccttttcaaaaccttgtctaaatccttcagagttccaaacatttccactgaacccatacttcatgagtttaaaacaaccaaaacagttcactttgttggcaaaggccatctctacccaagtaagattatttactcgttattcaatttagtaccgacacctccatccataacctacactattgtccactaaacactccctacctgtgtaaattccgtatcaagggtaaaaccttataagatttttcagacaactggcatttaagtgacttgtttataaattttaaaataaaccatgttctttgcagtatcctgccaggcaacacatcaaatatttcaaaaggcagccatacatttgctttaatgcttgctaaaacagcttaaggtctaatataattttaaaatagtcaaacaaatttgttttcactcttcatttcacaactatagagcagagaataagcccaatagtggccacttttactaactcatcaccatattcataaaactttcctctgcaattcattctacttcacatatcaatgcacttggtaagaaaataacaaaatgacaagcagtaaaatctaattcatgccagaacactggagaagttacatgggaagcaaaaacatacacaactttacaaaagttgggaatactgttttcaaataagcaataatcaaagtgggactttcatgctagaagtctcactcagtcaaaatcacgatttgtaagaacaagtggtgccacgagtgtccaaacatacagcacgatgccaatccaactggaagagattttcacccagacagctgtccactgacttttcatctcacgagagggttcatacctgtaccagttggtaagggtcatcatgatataaagtgaagccaggaaaagcatgaagtgaaagaaggaataactgtaagtgacaccatccctttcattatctacagctcggtgaacatcgtccccatcctccagtgatccatcacttctagctccaccatcttctattaatgtagattcatcacttgttagagtcagtttattaacctgactattgtttgaagtacggatgctggaataaaatacacacaacaaaaagagaattagtcctataattccttgagcatgccaccactggactgactgcccttcctttgggacagtgcttgttgtattgtagccaattatgcttagtagacttgggttgcaatttgtttctggttcattggtcatagctgaccatgtcaaatacattgtgtagactgtaattactgaagactgtaacaaaccagatcttggttgtgattcttggatttttggcagtatagacattacagaagcaccaacgcagaggagcatgttgacactgatgaacgccttgttttctgaacaactggctggatgagtgtagtagacaaagaacaggacgatagcaactaaagacagcagataattcagagctgtagctgataacaaggctgcataccaacatctcgagttcccttcttccattttttcaacccacgattcattccatgaatgtgcaaaatcaataagtaagactagttgtca

SEQ ID NO: 68622 - DNA, 1036 bp, Homo Sapiens
  misc_feature (95)..(362): n is a, c, g, or t
ggatgtttggaactctgaaggatttagacaaggttttgaaaaggataatcatgggttagaaggaagtgtttgaaagtcactttgaaagttagttnnnnnnnnnnnnnnnnnnnnnnnnnnnnnnnnnnnnnnnnnnnnnnnnnnnnnnnnnnnnnnnnnnnnnnnnnnnnnnnnnnnnnnnnnnnnnnnnnnnnnnnnnnnnnnnnnnnnnnnnnnnnnnnnnnnnnnnnnnnnnnnnnnnnnnnnnnnnnnnnnnnnnnnnnnnnnnnnnnnnnnnnnnnnnnnnnnnnnnnnnnnnnnnnnnnnnnnnnnnnnnnnnnnnnnnnnnnnnnnnnnnnnnnnnnnnnnnnnnnnnnnnnnnnaaaaaaatatatatatattgaaaatcaaaggaggcaaaattttgacagggaaggaagtaactgcaaaacactaggctttagtaggtacttatataaaatctagtccagttctctcatttaaaaaaatgaagacactgaagtacagacttaaatagctcagatagctaattaggaaatttcaagttggccaataatagcattctctctgacatttaaaaataatttctattcaaaatacatgcataattgattttacacctcattactggtggataatttatgtgatgtggattgctggtgtccagcatgacccataaacaggtcagaagaatgatggaatgttttagaataaactcctgcttatagtatactacacagttcaaaagatgtttaaaatgcttttgtatttactgccatgtaattgaaatatatagattattgtaacctttcaacctgaaaatcaagcagtatgagagtttagttatttgtatgtgtcactagtgtctaatgaagcttttaaaatctacaatttcttctttaaaaatatttattaatgtgaatggaatataacaattcagcttaattccccaaccttattctgtgtgtagacattgtattccacaattttgaatggctgtgttttacctctaaataaatgaattcagagaaaaaaa

SEQ ID NO: 68623 - DNA, 748 bp, Homo Sapiens
tttaagtaactggtctgtaagtgcatatctctagaacgtccccgcagatgaatgagggccagtggccttggcagaggcaggtgtggcctcgtagaggcagtgctggccgcgccagggcatcagtgctgatgtgggagctgtgcttccacctaagccgttggtaggggactgtggcatttaagaatgtagagagcgcatcctttttgatctcctgggcggagtgaacctgcaggggccaccccagaaaccttggttctgatgcactgcaagcaagtaaccagcttctcactccagtttcaagtggctattatgtaatataaattcaaagcacattgtgaatagaacctacatgaaaacatacactttgttgcccactgacatgttaccagaagttgtaccatgatgttgttttgacccctgtgagctgatggccccggccctgctctgtgcacatttctgtccgtgttccccagcactctggttggagagagtccacatcttcagctccgtgtggacatctccctgtacctctgcatcagcacatggatttaagagttatgtaatcgtgagagaatggtgtttgtggtttttccccctctttggctggtggaggataaagttcctgctcttttacctccaagacgagggcctcattgattcacttccagaagtgctgcacttctgaagaacaaggatgcactaaagttagcaagtttataataaagttaaatataaattattttgtttt

SEQ ID NO: 68624 - DNA, 1714 bp, Homo Sapiens
  misc_feature (99)..(101): n is a, c, g, or t
taaatacactatgttctggatgaaaagagcaggagtaacaattgatgagcaatattcagagtgaagtaaatctggaaatggtagactgtgttgggattnnngggagggccatgggaggggtacatcgtcaacatagcccgatcctgttacatttaagagtagcctcgtaggttgaatttcttctggtagcttcatggtaaatgcatccgaataagccatactggattgcagtgtttgtttctgtagggtgtttaaggacttgacttcctttctcccatgattcctctggactgcacacagcacccacaaccagccccatgcatgctgctgcctctgggcagtcgtagaatctcccacttcagtttctcgttgattgtactcacctttatggaatccaaatacatccaaaagggtaaggcagttttaaaaatgtgaaaacatttaaaaatgataatagcagggaattcttagattatagtaaatgccttttacttaactgtgcccagcaggctgggtgcgttaaaaagcccaagtattttgaaaaaactcgaacagatttgacaagggtagccagcttggagtctagcaacttgccaatgtgtttaccaatctgggggcttgtttttcttttcttctttcaaataaatggcagttaactggctttacagtaaacattgaagagaggaggatttgtttattgtcactgggaatctgaccactatactgtcctttttttgtattctgggtaaatgttttttggaaaagatttgtcttttctaagtggaagttaaatttgttatactgcccatcccctaaagccaacagagatttgtagatttaaagagatcacatttgaagacaatagtgtttaagaaagcaagcaagtcccttagcagtcaggtcataacagggcacatttctgaccgaaccctctcaaggcagaggaggagtttggtgggtttcatacaccctgcagattcctgttggctctaaccctcaattacctaatcttatgctttaacacataactgcattggatgtgagagtaacgtaccgtatggtcattgttctatatattaacattgaacactgctgcgattgctcaaggacattttatgttacggctttaaagcaaaggcatgattattagaaactatttaagcttttttctttgaaaaacaagctccttttacagaatataaacaacagtagtgcctgtggtttagcccaccaatcttgatgactaaaagtagctgatgcattgtgcatatgatgcttgagatggtttttgcaaaagcagaaatcgctgcaaggtaatcacaatagataaaagtggtattttaaacctttgaaataaatggatgtaactgtaccttggtacagcttttcacttgtttagtttttaaacgttagtataatctgaataaataaaatgttgccaaattcaatgtagaaagaatgtgacaacacaccttgggtagttctgcttgtgtttttgcatattgtaaaagcagtgtcacagctaaaaagaaagaaatcgtttctaacagtaaattattgtgctttagttgctagtttgtactgagagttgacctctccctgtgcagttttttgttctaaacttgtataaataacaattgtgtaatgtgtctccctcctacattgtaacaattgcttcagcctacgttataaataaagaaccactagattaaaa

SEQ ID NO: 68625 - DNA, 683 bp, Homo Sapiens
  misc_feature (594)..(594): n is a, c, g, or t
  misc_feature (627)..(627): n is a, c, g, or t
  misc_feature (660)..(660): n is a, c, g, or t
caggcttggaagtatttaatagcagacaaaatatagttcaatatgaaaagcattatatgagacaaaggcaattttcaaaaattgataaaacattccaccaaaaatcatgactatgcatctaacagcttcaaaatatagaaaatactcaaatgcaaaatcaacaaatctgcaattacagaaaaagacttcaacatacttttagaaagtagtaactcaagtagacaataatagctaacacttaccgggcacttcttatgtgagtggcactgaaacatgtgctttcatgcattacctaaggctagagaaaatgttaataacttagacaagtcatacatgtatcataaatatctttgtacctgacaaacagaataaacatctttttaaacaccattagataatctatcttaagtaatacaaaaatggggggaggggaataaaaatacaaaatattagaaacactatcgtcaaaatgaaagggcatggctgagtatggtacaaccgttcaacagaatattgtcattaaaaacatttatggaggctatattatatagtcaataacagaaaatgcttgaaaggttagaagtacatcatcanattatgttttatatagctgtaaaataaacccanatcatcttcaatgaacacatactattatggtanaaaaaagtctacaatttctaact

SEQ ID NO: 68626 - DNA, 540 bp, Homo Sapiens
  misc_feature (368)..(428): n is a, c, g, or t
tttttcaggcttggaagtatttaatagcagacaaaatatagttcaatatgaaaagcattatatgagacaaaggcaattttcaaaaattgataaaacattccaccaaaaatcatgactatgcatctaacagcttcaaaatatagaaaatactcaaatgcaaaatcaacaaatctgcaattacagaaaaagacttcaacatacttttagaaagtagtaactcaagtagacaataatagctaacacttaccgggcacttcttatgtgagtggcactgaaacatgtgctttcatgcattacctaaggctagagaaaatgttaataacttagacaagtcatacatgtatcataaatatctttgtacctgacannnnnnnnnnnnnnnnnnnnnnnnnnnnnnnnnnnnnnnnnnnnnnnnnnnnnnnnnnnnncctacccctaaagaacaataacaaccacaataacaactatcaccccagtaaacatggctggcaagaatacaattaaatgaacattatcactgatttggcaacagctcttatg

SEQ ID NO: 68627 - DNA, 646 bp, Homo Sapiens
gggacttccggtcgcgccagccgcccgttgccagttctgcgcgtgtgagtctctttcgccttgctccgggctttcttcgctcgcagcgcggcagggttatcaccagatctgggctttccccttcttgccgtcaggtgctacggccacgtggcccgcggcttcccgctcgcgcagtctggcagcccggagccttccgcggtcccccgcccgcccggggcccaacgacgccctactgggcgagcacgatttccgaggacagggggtccgggcccagcgctttcgattctcggaggagccgggtccgggggccgacggggctgtcctggaggtccacgtcccgcaggtgcgtgcagcagcacccgccaggaggcgcctgaggtcaggagcggatgtcggctgacttggctgggttcctgagggaccgggggtgcggacgctcagctgcgcagcttcctgctttaggttgacccccggagcaaaaacgtcggatatgaagcccttcggtgcattaaatgtctctcaattggagctggagtgagccttccaggaatttggctgccaaatgtggtgcagaagtaatactgtcagacagctcagaactgcctcactgtctggaagtctgtcggcaaagctgccaatgaataac

SEQ ID NO: 68628 - DNA, 1205 bp, Homo Sapiens
cacaataaggtcctaagtagcgaggcctgggtggctatccggcacgagggccttgctccgggctttcttcgctcgcagcgcggcagggttatcaccagatctgggctttccccttcttgccgtcaggtgctacggccacgtggcccgcggcttcccgctcgcgcagtctggcagcccggagccttccgcggtcccccgcccgcccggggcccaacgacgccctactgggcgagcacgatttccgaggacagggggtccgggcccagcgctttcgattctcggaggagccgggtccgggggccgacggggctgtcctggaggtccacgtcccgcagattggagctggagtgagccttccaggaattgtggctgccaaatgtggtgcagaagtaatactgtcagacagctcagaactgcctcactgtctggaagtctgtcggcaaagctgccaaatgaataacctgccacatctgcaggtggtaggactaacatggggtcatatatcttgggatcttctggctctaccaccacaagatattatccttgcatctgatgtgttctttgaaccagaagattttgaagacattttggctacaatatattttttgatgcacaagaatcccaaggtccaattgtggtctacttatcaagttaggagtgctgactggtcacttgaagctttactctacaaatgggatatgaaatgtgtccacattcctcttgagtcttttgatgcagacaaagaagatatagcagaatctacccttccaggaagacatacagttgaaatgctggtcatttcctttgcaaaggacagtctctgaattatacctacaacctgttctgggacagtatcaatactgatgagcaacctggcacacaaactatgagcagaccacttcagcttgagaatgcagtgggtctgaagatggtcaagtctgtttgccttagattttgatgtcacctagacaacacttaaactcatatgaaacaaaaattaaaatacgtattacaaggaaccaaatgcagattcgaacgtaattactggctgtctggccgccgtcggccactcaaaaagcttttccaaaacattccgtttggcggggcggccccacagcaggtaaagggtaacatgggacataagcggttttcctaggaagaagcctgggtccgtgaccaagggcattgtgattccccccccattt

SEQ ID NO: 68629 - DNA, 960 bp, Homo Sapiens
ttggtatatcagagtgtccttgcaaggaatgaccggcatttcaacggattgtctcctggaaggtagactctgctatatcttctttgtttgcatcaagactcaagaggaatgtggacacatggcattatcccatttgtagagtaaagcttcaagtgaccagtcagcactccctaacttgataagtagaccacaattggaccttgggattcttggtgcatcaaaatatatatgtagccaaaatgtcttcaaaatcttctggttcaaagaacacatcagatgcaaggataatatcttgtgctggtagagccagaagatcccaagatatatgaccccatgttagtcctaccacctgcagatgtggcaggttattcatttggcagctttgccgacagacttccagacagtgaggcagttctgagctgtctgacagtattacttctgcaccacatttggcagccaaaattcctggaaggctcactccagctccaatctctaagatggccttgcctggcagagatcttctgtgaaaccaaaggtactgggccaggaccacagcacagggccaaacatacattccatactggagatgcaggacctcaggcgcctcctggcgggtgctgctgcacgcacctgcgggacgtggacctccaggacagccccgtcggcccccggacccggctcctccgagaatcgaaagcgctgggcccggaccccctgtcctcggaaatcgtgctcgcccagtagggcgtcgttgggccccgggcgggcgggggaccgcggaaggctccgggctgccagactgcgcgagcgggaagccgcgggccacgtggccgtagcacctgacggcaagaaggggaaagcccagatctggtgataaccctgcccgcgctgcgagcgaagaaagcccggagcaaggcgaaagagactcacacgcgcagaactggccacgggcggctggcg

SEQ ID NO: 68630 - DNA, 731 bp, Homo Sapiens
  misc_feature (176)..(176): n is a, c, g, or t
tcatatcccatttgtagagtaaagcttcaagtgaccagtcagcactcctaacttgataagtagaccacaattggaccttgggattcttgtgcatcaaaaaatatattgtagccaaaatgtcttcaaaatcttctggttcaaagaacacatcagatgcaaggataatatcttgtgtnggtagagccagaagatcccaagatatatgaccccatgttagtcataccacctgcagatgtggcaggttattcatttggcagctttgccgacagacttccagacagtgaggcagttctgagctgtctgaccagtattacttctgcaccacatttggcagccaaaattcctggaaggctcactccagctccaatctcaggcgcctcctggcgggtgctgctgcacgcacctgcgggacgtggacctccaggacagccccgtcggcccccggacccggctcctccgagaatcgaaagcgctgggcccggaccccctgtcctcggaaatcgtgctcgcccagtagggcgtcgttgggccccgggcgggcgggggaccgcggaaggctccgggctgccagactgcgcgagcgggaagccgcgggccacgtggccgtagcacctgacggcaagaaggggaaagcccagatctggtgataaccctgccgcgctgcgagcgaagaaagcccggagcaaggcgaaagagactcacacgcgcagaactggcaacgggcggccgca

SEQ ID NO: 68631 - DNA, 1693 bp, Homo Sapiens
  misc_feature (225)..(276): n is a, c, g, or t
  misc_feature (956)..(971): n is a, c, g, or t
  misc_feature (1224)..(1239): n is a, c, g, or t
  misc_feature (1415)..(1477): n is a, c, g, or t
gggggaggaaccacactagctaaggacaggctgggtggttaatcggcacgaggcacgcatgtgcgggtgcataaccggcgaggctgggccagccgctccaccatttccccgactgcatggagacagtagaatgagtgaacccctgagttaacccgtaaggccttccgtgtaacctgcatctagagtttaagaagcttctgctgttttgccggaatggcggtgacnnnnnnnnnnnnnnnnnnnnnnnnnnnnnnnnnnnnnnnnnnnnnnnnnnnnaggaggatggtgaccttgggagtcgccctgtcagcacgcacatgcttgggacccactccacacactccctgccagctttgttgcagcctcagctggtggtgtctccgtccttatcctagcctagctcgcagggtgagaaccactggagtggctggggctggccagaggtcaccgtttctccttcctgtgtgctccagtggcttttgaagacactgggttgggacctttttcctgaagagagctgggtgtagccagagctactggcacctaccccgagcatctctctctgtaagcagcttcaggggcagtccgtttctctgtgcttctgaaacccccttctcacgtttcaggccccagttttaactcaaggcctggggcaggggcgtttaattgatgatgacagaggacacaggtttttgccagcaaaaaggaaaaccaaggcttggtggaagggaaaggtggtgtgtcccctgttccctattccatctccctgggacttcctgctcatcatagtacccagtgagcccagagatcctactagactgggtcagcaattctagagaaccttccggaatagtctgggaacatggtcaaggtggaaggggctcccctagagagggtgggggtgtagttacttcccagttggccagaaaactgggccttgcagacccccttagcannnnnnnnnnnnnnnnccttccctgctttctacttctttggggagccccttgtgttttggagtctgactggagtctcgcatcctggggcctgctccatccatccctcctgggcgccagaccctccatccaagccctgtgtctttccatagtcagggtcaggccctgcatctattccaaggggcactcagtacacattccataaattagctgggtgtccctgcacgcccaccccatgaaactcgagcaggtctctggaagccatttgttnnnnnnnnnnnnnnnngttttaaaaataccttttaattttctggtaattccagttctttgaagcatcctctgctgggtcttggggtgtgtggatggattggctgtctgatgggattggtaacccctcgctactcaagatggggggatacaaacaccttcagggaaggggagcctggttcttctcgttttccnnnnnnnnnnnnnnnnnnnnnnnnnnnnnnnnnnnnnnnnnnnnnnnnnnnnnnnnnnnnnnncacaatgaagtttcagcttctcaaccttctcccctacccagggctgtggacccagactggccttgagccacagtccctctttccctcctcaccctcttccccctgcgggctcccgggtctgtccatttgttactgtgctgtgctggggattggcgccgaggtggcgtgagattccacttgtgtagaactttgttgagtaaagatcagtttcttgtg

SEQ ID NO: 68632 - DNA, 593 bp, Homo Sapiens
  misc_feature (122)..(137): n is a, c, g, or t
  misc_feature (307)..(375): n is a, c, g, or t
aagaattcggcacgaggggaagctattccaaggggcactcagtatacattccataaattagctgggtgtccctgcacgcccaccccatgaaactcgagcaggtctctggaagccatttgttnnnnnnnnnnnnnnnngttttaaaaataccttttaattttctggtaattccagttctttgaagcatcctctgctgggtcttggggtgtgtggatggattggctgtctgatgggattggtaacccctcgctactcaagatggggggatacaaacaccttcagggaaggggagcctggttcttctcgnnnnnnnnnnnnnnnnnnnnnnnnnnnnnnnnnnnnnnnnnnnnnnnnnnnnnnnnnnnnnnnnnnnnncacaatgaagtttcagcttctcaaccttctcccctacccagggctgtggacccagactggccttgagccacagtccctctttccctcctcaccctcttccccctgcgggctcccgggtctgtccatttgttactgtgctgtgctggggattggcgccgaggtggcgtgagattccacttgtgtagaactttgttgagtaaagatcagtttcttgtgaa

SEQ ID NO: 68633 - DNA, 642 bp, Homo Sapiens
cacaagaaactgatctttactcaacaaagttctacacaagtggaatctcacgccacctcggcgccaatccccagcacagcacagtaacaaatggacagacccgggagccctcacaagtgttgtaatcctccgagttaagcaggttgcagagctggggcagcagctcgggccacatctgcagctcacccttggaagcgatggtggtgatgagaatgccaatggtggctcggatgagcgaggaggcatcgccaatgttgttgagacactcctgtttgatgaagtctgccacagggggtgggaagctctgatagtgtgccttcacgttgttcttgaggatgaggccactgagagagcgcgttggctcatcttctgacttgagtctggtcaggacgaaaatcaggtagttggtgaagtcaggaaactgattgagttgtttgagttcatcctgcacgatgcgctgagtggctgtgttgggcgactgtgagtctttgagcagctgcaggacctgctgcaagccctgctcgtctggctgccagtccatggcgcaaggcaagccggccccgggcagcagcggcggcaactcgcgctgcggcttctccagagactcgcgcggaaggagggagccaaagagagagaattaaa

SEQ ID NO: 68634 - DNA, 363 bp, Homo Sapiens
  misc_feature (269)..(284): n is a, c, g, or t
  misc_feature (333)..(333): n is a, c, g, or t
ggtttttgccagcaaaaaggaaaaccaaggcttggtggaagggaaaggtggtgtgtcccctgttccctattccatctccctgggacttcctgctcatcatagtacccagtgagcccagagatcctactagactgggtcagcaattctagagaaccttccggaatagtctgggaacatggtcaaggtggaaggggctcccctagagagggtgggggtgtagttacttcccagttggccagaaaactgggccttgcagacccccttagcannnnnnnnnnnnnnnnccttccctgctttctacttctttggggagccccttgtgttttgggagtnttgactggagtctcgcatcctgggggcctg

SEQ ID NO: 68635 - DNA, 787 bp, Homo Sapiens
tttttgcattaacagtaaccccaagaaaggcatcagggttctggagtggttgtttgagtgacacagcacaaggccttgatttcatcatgcttttgctgtggatgtagtgtagcttgctgaacaggtttatttcacagagcagtgtacattcttgtcttccaggggaacttcaacatggagttacttttgatccctcagttttaattcagtgtctaaagcctgagaaatgccagtggcctgacagcagcagacattgcacaaacccaggtttccaagagtgtgcccagtttctcttgaacctccagaattgtcatctgaaccatttctataacaatggcatcttaaatgggggtcatcagaatgtatttcctaatcatattagtgtgggaacaaatcgaaagagatgcttggaagactcagaagactttggagtaaagaaagctagaactgaaggtgagaccgctttgcgggtgggaagagcacacttatttttcctttctgtaatatgttttctttttatggctgagcgcaccttcgagatgagaccttcacttcaggtggtaatgcgcctggtggattgtgcggtgacggtggagatttctcctgtactgccactgcgaagatgggacttaacaaaagggaatgtgagggaaatactgatggcccaagtgtaaatgtctatgtggaactttttgagcacccatgtttacctgccgtgaattagattttttaatttgttgtatctgtttgaaatatatctattaaagaaaatctgccactgtgcctg

SEQ ID NO: 68636 - DNA, 1006 bp, Homo Sapiens
gcattaacagtaaccccaagaaaggcatcagggttctggagtggttgtttgagtgacacagcacaaggccttgatttcatcatgcttttgctgtggatgtagtgtagcttgctgaacaggtatggaagctgtctttgctgttaagtacttctcccgtttgtttatcaacctgcagctaacaggatgtctgcttttttacaggtttatttcacagagcagtgtacattcttgtcttccaggggaacttcaacatggagttacttttgatccctcagttttaattcagtgtctaaaggtttacaagttcaacttactctattttattcagctctttcacttactctgccatcacttcctacttgaatctgagttttagctactgtagaggtctcagacctttcctttttagtactattagccaggtaaaactttggttcttgtgagtggtagggatgagtttttaggacagtattcaaagcctttttaaaggaaccaactactcaaatgctctacaatgccaaaaatacaatactcctgcaggttttcccaagcaaggccaaaacaatcaaaatctgacagaaaaacacagctgttcagctctggaatctgatgataggctactttttaatgtcaggacatccttctaaacttccacttacagtgtcacatgtaagcatgaaggctggctcgttggtgagccattgctttgtttttaggaagacagttatgaatgccatggacaatctcagtacatgttgtttgttatgattttattcaccgctaaaggaatgggtattaacaattaagtgcatataatatagaattcagtttcaagtctgaagttagcgtaaatttagattcttcagactaacataaaacatgattttgagaagttaaataggaagatgccttttttagaagtttagcatatttagtttatctcccaaatcttgcttagaaatcaaatgtatataagagaagttagttacagagctagattgattaa

SEQ ID NO: 68637 - DNA, 1039 bp, Homo Sapiens
  misc_feature (772)..(772): n is a, c, g, or t
  misc_feature (787)..(787): n is a, c, g, or t
  misc_feature (1009)..(1009): n is a, c, g, or t
gggattcccgggatccgcggcgctagtctcgttcctttgtgctgcggcggcggcttctcgagtcctccccgacgcgtcctctaggccagcgagccccgcgctctccggtgacgaccatgtcggcggcgggacgggcgcgggcgtagaggcgggcttctccagcgaggagctgctctcgctccgtttcccgctgcaccgcgcctgccgcgacggggacctggccacgctctgctcgctgctgcagcagacaccccacgcccacctggcctctgaggactccttctatggctggacgcccgtgcactgggccgcgcatttcggcaagttggagtgcttagtgcagttggtgagagcgggacccacactcaacgtctccaccacacggtacgcgcagacgccagcccacattgcagcctttgggggacatcctcagtgcctggtctggctgattcaagcaggagccaacattaacaaaccggattgtgagggtgaaactcccattcacaaggcagctcgctctgggagcctagaatgcatcagtgcccttgtggcgaatggggctcacgtcgataatcctagaaagggggagcattccatatagaaactgctgaaactgccacaggtgcttctccgaaaaccttacagttgtggcattgaatgttcagtatcgcttcctttctgcacacgaggcatactgttgagcctgagaaatgccagtggcctgacagcagcagacattgcacaaacccagggtttcccagagtgtgcccangtttctcctgaaccntccagaattgtcatctgaaccatttctataacaagggcatcctaaatggggggtcatcagaatgtattttccaaatcatattaggggggggaacaaatcgaaagagatgcctgggaagactcaaaaaaactttggagtaaagaaagctagaactgtaagtggaaaccggcttttccgggtggggaagaacccaccttattttttccctttccgggaaaaggntttccctttttaggggttgacggccacctt

SEQ ID NO: 68638 - DNA, 1063 bp, Homo Sapiens
  misc_feature (159)..(826): n is a, c, g, or t
cgcaccattcagaatgtacacgcctactactcgttggtatctgtacagtggtgtgccatgcgatagtgttctaccggtggatcagacgtagtacggatagcgcagcgtcggctgaacggggtcgtgcacacagccagctggagcgacgacctacaccgnnnnnnnnnnnnnnnnnnnnnnnnnnnnnnnnnnnnnnnnnnnnnnnnnnnnnnnnnnnnnnnnnnnnnnnnnnnnnnnnnnnnnnnnnnnnnnnnnnnnnnnnnnnnnnnnnnnnnnnnnnnnnnnnnnnnnnnnnnnnnnnnnnnnnnnnnnnnnnnnnnnnnnnnnnnnnnnnnnnnnnnnnnnnnnnnnnnnnnnnnnnnnnnnnnnnnnnnnnnnnnnnnnnnnnnnnnnnnnnnnnnnnnnnnnnnnnnnnnnnnnnnnnnnnnnnnnnnnnnnnnnnnnnnnnnnnnnnnnnnnnnnnnnnnnnnnnnnnnnnnnnnnnnnnnnnnnnnnnnnnnnnnnnnnnnnnnnnnnnnnnnnnnnnnnnnnnnnnnnnnnnnnnnnnnnnnnnnnnnnnnnnnnnnnnnnnnnnnnnnnnnnnnnnnnnnnnnnnnnnnnnnnnnnnnnnnnnnnnnnnnnnnnnnnnnnnnnnnnnnnnnnnnnnnnnnnnnnnnnnnnnnnnnnnnnnnnnnnnnnnnnnnnnnnnnnnnnnnnnnnnnnnnnnnnnnnnnnnnnnnnnnnnnnnnnnnnnnnnnnnnnnnnnnnnnnnnnnnnnnnnnnnnnnnnnnnnnnnnnnnnnnnnnnnnnnnnnnnnnnnnnnnnnnnnnnnnnnnnnnnnnnnnnnaagaattcggcacgagggccgcggctgtaggcttttttcctaacatacctaagcaaacccagtgtcaggatggtaattcttattctttcgttcagttaagtttttcccttcatctgggcactgaagggatatgtgaaacaatgttaacatttttggtagtcttcaacccagggattgtttctgtttaacttcttataggaaagcttgagtaaaataaatattgtctttttgtatgtc

SEQ ID NO: 68639 - DNA, 1333 bp, Homo Sapiens
ccggggtaatctgagaaacaatgactaattcttgcatattttgtaacttccatgtgagggttttcagcattgatatttgtgcattttctaaacagagatgaggtggtatcttcacgtagaacattggtattcgcttgagaaaaaaagaatagttgaaccctatttctctttctttacaagatgggtccaggattcctcttttctctgccataaatgattaattaaatagcttttgtgtcttacattggtagccagccagccaaggctctgtttatgcttttggggggcatatattgggttccattctcacctatccacacaacatatccgtatatatcccctctactcttacttcccccaaatttaaagaagtatgggaaatgagaggcatttcccccaccccatttctctcctcacacacagactcatattactggtaggaacttgagaactttatttccaaagttgtcaaacatttaccaatcatattaatacaatgatgctatttgcaattcctgctcctaggggaagggagataagaaaccctcactctctacaggttggggtacaagtggcaacctggcttccatggccgtgtagaagcatggtgccctggcttctctgaggaagctggggttcatgacaatggcagatgtaaagtaattcttgaagtcagattgaggctgggagacagccgtagtagatgttctactttgttctgctgttctctagaaagaatatttggttttcctgtataggaatgagattaattcctttccaggtattttataattctgggaagcaaaacccatgcctccccctagccatttttactgttatcctatttagatggccatgaagaggatgctgtgaaattcccaacaaacattgatgctgacagtcatgcagtctgggagtggggaagtgatcttttgttcccatcctcttcttttagcagtaaaatagctgagggaaaagggagggaaaaggaagttatgggaatacctgtggtggttgtgatccctaggtcttgggagctcttggaggtgtctgtatcagtggatttcccatcccctgtgggaaattagtaggctcatttactgttttaggtctagcctatgtggattttttcctaacatacctaagcaaacccagtgtcaggatggtaattcttattctttcgttcagttaagtttttcccttcatctgggcactgaagggatatgtgaaacaatgttaacatttttggtagtcttcaaccagggattgtttctgtttaacttcttataggaaagcttgagtaaaataaatattgtctttttgtatgtcaaaa

SEQ ID NO: 68640 - DNA, 1831 bp, Homo Sapiens
  misc_feature (655)..(668): n is a, c, g, or t
  misc_feature (1281)..(1300): n is a, c, g, or t
  misc_feature (1331)..(1748): n is a, c, g, or t
  misc_feature (1750)..(1750): n is a, c, g, or t
tgcatagtgaactatagaaccagttttacaaaaaagcaggctggtaccggtcggaatcccgggatatcgtcaaccacgcgtccgggagtttgactctgacaccctccgcgagtttgtcactgctttcaaaaaaggaaaactgaagccagtcatcaaatcccagccagtgcccaagaacaacaagggacccgtcaaggtcgtggtgggaaagacctttgactccattgtgatggaccccaagaaggacgtcctcatcgagttctacgcgccatggtgcgggcactgcaagcagctagagcccgtgtacaacagcctggccaagaagtacaagggccaaaagggcctggtcatcgccaagatggacgccactgccaacgacgtccccagcgaccgctataaggtggagggcttccccaccatctacttcgcccccagtggggacaaaaagaacccagttaaatttgagggtggagacagagatctggagcatttgagcaagtttatagaagaacatgccacaaaactgagcaggaccaaggaagagctttgaaggcctgaggtctgcggaaggtgggaggaggcagacgccctgcgtggcccatggtcggggcgtccacgccgaggccggcaacaaacgacagtatctcggattccnnnnnnnnnnnnnnaaatttttaatactttggtgtttcacttcatgctctgaatactgaataaccatgaatgactgaatagtttagtccagatttttacagaggatacatctatttttatcattatttggggtttgaaaaatttttttttacaccttctaatttctttatttctcaaagcagataattcttctgtgtgaaaatgttttctttttttaatttaaggtttaaaattccttttccaaatcatgttgattttgctctttgctttttcgttgtctgagaaattgttggcgtagatttggcttctggtatgtgtttctgattgcttcctgttgagcacaaagtgagagctgccactgagcagccctgccaggggtgctgtttcaggctgggcatcgccaggcggcctccctgcaaaccaagggctgggggcaaaggggcatgatccagggtcccccagggtgggctcagctccagggagaggccacccacgtggcagccccacctcttgagagcccccagtgccggagcagaaaggaccctggacccagaggcagatactgcggggtggtagaaaaggtagagtaggctgtggcaatggaataaaacacgattaaaaacgttnnnnnnnnnnnnnnnnnnnngaccgcgtatcggcctcgtgccgaattcttnnnnnnnnnnnnnnnnnnnnnnnnnnnnnnnnnnnnnnnnnnnnnnnnnnnnnnnnnnnnnnnnnnnnnnnnnnnnnnnnnnnnnnnnnnnnnnnnnnnnnnnnnnnnnnnnnnnnnnnnnnnnnnnnnnnnnnnnnnnnnnnnnnnnnnnnnnnnnnnnnnnnnnnnnnnnnnnnnnnnnnnnnnnnnnnnnnnnnnnnnnnnnnnnnnnnnnnnnnnnnnnnnnnnnnnnnnnnnnnnnnnnnnnnnnnnnnnnnnnnnnnnnnnnnnnnnnnnnnnnnnnnnnnnnnnnnnnnnnnnnnnnnnnnnnnnnnnnnnnnnnnnnnnnnnnnnnnnnnnnnnnnnnnnnnnnnnnnnnnnnnnnnnnnnnnnnnnnnnnnnnnnnnnnnnnnnnnnnnnnnnnnnnnnnnnnnnnnnnangaacggtaaaggcgcgttgctggcgttttcataggtccgcccctgacagcacaaaaatcgagtcagtcaaagtgggaaccg

SEQ ID NO: 68641 - DNA, 2071 bp, Homo Sapiens
  misc_feature (2038)..(2038): n is a, c, g, or t
tcggctaggtacgaggctgggtggtgaatcggcacgaggcagcggccgccgacgctaggaggccgcgctccgcccccgctaccatgaggccccggaaagccttcctgctcctgctgctcttggggctggtgcagctgctggccgtggcgggtgccgagggcccggacgaggattcttctaacagagaaaatgccattgaggatgaagaggaggaggaggaggaagatgatgatgaggaagaagacgacttggaagttaaggaagaaaatggagtcttggtcctaaatgatgcaaactttgataattttgtggctgacaaagacacagtgctgctggagttttatgctccatggtgtggacattgcaagcagtttgctccggaatatgaaaaaattgccaacatattaaaggataaagatcctcccattcctgttgccaagatcgatgcaacctcagcgtctgtgctggccagcaggtttgatgtgagtggctaccccaccatcaagatccttaagaaggggcaggctgtagactacgagggctccagaacccaggaagaaattgttgccaaggtcagagaagtctcccagcccgactggacgcctccaccagaagtcacgcttgtgttgaccaaagagaactttgatgaagttgtgaatgatgcagatatcattctggtggagttttatgccccatggtgtggacactgcaagaaacttgcccccgagtatgagaaggccgccaaggagctcagcaagcgttctcctccaattcccctggcaaaggtcgacgccaccgcagaaacagacctggccaagaggtttgatgtctctggctatcccaccctgaaaattttccgcaaaggaaggccttatgactacaacggcccacgagaaaaatatggaatcgttgattacatgatcgagcagtccgggcctccctccaaggagattctgaccctgaagcaggtccaggagttcctgaaggatggagacgatgtcatcatcatcggggtctttaagggggagagtgacccagcctaccagcaataccaggatgccgctaacaacctgagagaagattacaaatttcaccacactttcagcacagaaatagcaaagttcttgaaagtctcccaggggcagttggttgtaatgcagcctgagaaattccagtccaagtatgagccccggagccacatgatggacgtccagggctccacccaggactcggccatcaaggacttcgtgctgaagtacgccctgcccctggttggccaccgcaaggtgtcaaacgatgctaagcgctacaccaggcgccccctggtggtcgtctactacagtgtggacttcagctttgattacagagctgcaactcagttttggcggagcaaagtcctagaggtggccaaggacttccctgagtacacctttgccattgcggacgaagaggactatgctggggaggtgaaggacctggggctcagcgagagtggggaggatgtcaatgccgccatcctggacgagagtgggaagaagttcgccatggagccagaggagtttgactctgacaccctccgcgagtttgtcactgctttcaaaaaaggaaaactgaagccagtcatcaaatcccagccagtgcccaagaacaacaagggacccgtcaaggtcgtggtgggaaagacctttgactccattgtgatggaccccaagaaggacgtcctcatcgagttctacgcgccatggtgcgggcactgcaagcagctagagcccgtgtacaacagcctggccaagaagtacaagggccaaaagggcctggtcatcgccaagatggacgccactgccaacgacgtccccagcgaccgctataaggtggagggcttccccaccatctacttcgcccccagtggggacaaaaagaaccagttaaatttgaagggggagacagagatctggagcatttgagcaagtttatagaagaacatgcccccaaactgagcacgacccaagaagagctttgaaggcctgaagtctgccgnaaagtggggagaggcaaacgcctggtgggccca

SEQ ID NO: 68642 - DNA, 955 bp, Homo Sapiens
  misc_feature (172)..(172): n is a, c, g, or t
  misc_feature (202)..(202): n is a, c, g, or t
  misc_feature (222)..(222): n is a, c, g, or t
cgtcgatgacgcgtgccacatattatgcactagcccagctcatttgtcgtgtattgttgattgacgtacatcaccagaaagttgctgatcgattatcgatccttaggattgcctgagccagatcgcagagctgtttagtgacttgaatcagagacccacagctgcttgtccntacctggatgcactgccttccataagtacntagtgagatagcgcggagcntcgcatgacaccatgagatcgggccctcttcccagtggttcactccttttcacacctgctggtccctcctcacccagcaggcctggtccacctctcattgcaagccccaagcactgagccagcaggtgccagggagccacccgccccccatcgcttctgcacacctcagactcaccccatcaccttggcagcaaagcactggctctgccgtctgacccctgatccaggcagccccctccgcagagaaaagggttggggagaagcctctgcagtcctggaagatgtggggtgctgggtgagaggcatcagcccccacaagtatgtttttgtgtcttaagatagcagtttactttgaaaaagtgaaaaaggcttccgggctgtcctctgcccagtgagatggaggacgctagagaaagtgctgagtgtcccgagagaggcccccgagccagtgcatggaggtccttcggcctggctcagctgggctgcaggatgcccactttgaggagggaggcacagggcttgggcgaggggcagaggccatcagaactgcccggcttttttggaaactgaggacccaacaactaaccacgtttacacgacttgagttttgaaccccgattaatgtctgtacgtcacctttcctagttctgaccctgagccctggggaacaggaaagcgtggctggcctcttgcactgctttgtctccaaaataaactactgaaatcaaaccgc

SEQ ID NO: 68643 - DNA, 938 bp, Homo Sapiens
agtcgctggaaggggtacctgcggatctgatttaggaaactacatactggactaattccctacgttgccacaattagatggtctggaaaaatcgtgtctactccttttatgtttgtacagcagttaggaagttcttcttctttttagatcctttaagaacaggaaagataaaaattcaagatattttagcatgcagcttcctagatgatttattggagctaagggatgaggaactgtccaaggagagtcaagaaacaaattggttttctgctccttctgccctaagagtttatggccagtacttgaatcttgataaagatcacaatggcatgctcagtaaagaagaactctcacgctatggaacagctaccatgaccaatgtcttcttagaccgtgttttccaggagtgtctcacttatgatggagaaatggactataagacctacttggactttgtccttgcattagaaaacagaaaggaacctgcagctctacaatatattttcaaactgcttgatattgagaacaaaggatacctgaatgtcttttcacttaattatttctttagggccatacaggaactaatgaaaatccatggacaagatcctgtttcatttcaagatgtcaaggatgaaatctttgacatggtaaaaccaaaggatcctttgaaaatctctcttcaggatttaatcaacagtaatcaaggagacacagtaaccaccattctaatcgatttgaatggcttctggacttacgagaacagagaggctcttgttgcaaatgacagtgaaaactctgcagaccttgatgatacatgatctctgaaagactagactgtcttatattatgagatacttgaatgctgcatgtaaagcctttaaagcaaaatcctcagaaatggtctaaataaaacacttgatatgcctagagaacaaaaa

SEQ ID NO: 68644 - DNA, 509 bp, Homo Sapiens
  misc_feature (58)..(58): n is a, c, g, or t
gactaggcttagtcaggcctgggtgggacattcggcacgaggagcctctgcagtcctnggaagatgtggggtgctgggtgagaggcatcagcccccacaagtatgttttggttgtcttaagatagcagtttactttgaaaaagtgaaaaaggcttccgggctgtcctctgcccagtgagatggaggacgctagagaaagtgctgagtgtcccgagagaggcccccgagccagtgcatggaggtccttcggcctggctcagctgggctgcaggatgcccactttgaggagggaggcacagggcttgggcgaggggcagaggccatcagaactgcccggcttttttggaaactgaggacccaacaactaaccacgtttacacgacttgagttttgaaccccgattaatgtctgtacgtcacctttcctagttctgaccctgagccctggggaacaggaaagcgtggctggcctcttgcactgctttgtctccaaaataaactactgaaatc

SEQ ID NO: 68645 - DNA, 2845 bp, Homo Sapiens
gtggtaccggtccggaattctcgggatatcgtcgacccacgcgtccgcccacgcgtccgccctcactcaagaacttctccgcaggcacatcagaccgtgagtccatcttcttcaacagccacaacgtgtcaaagccggagtcgtcatcggtcctgacggagctggacaagatcgagggcgtgttcgagcggccgagcgacgaggtcatccgggagctctcccgggccctgcggcaggcactgggcgtgtcactcttcggcatcgacatcatcatcaacaaccagacagggcagcacgccgtcattgacatcaatgccttcccaggctacgagggcgtgagcgagttcttcacagacctcctgaaccacatcgccactgtcctgcagggccagagcacagccatggcagccacaggggacgtggccctgctgaggcacagcaagcttctggccgagccggcgggcggcctggtgggcgagcggacatgcagcgccagccccggctgctgcggcagcatgatgggccaggacgcgccctggaaggctgaggccgacgcgggcggcaccgccaagctgccgcaccagagactcggctgcaacgccggcgtgtcgcccagcttccagcagcattgtgtggcctccctggccaccaaggcctcctcccagtagccacggagccgggacccagaggggcagcgcagggcgcagagcacacccgctgggccagcagctcccaacggcgatgctactactaagaatccccagtgatctgattcttctgttttttaatttttaacctgattctctgatgtcatgatctaaatgaggggtagtgggggatggaagagagtaccaggtggtccaccgttggggagtggggccgtccgcctgctctctactgtgcagacctcctaactgagtttacacacgcttgtgtttgcaacactaggtctggatgggaggtgaggggtgtgcgtatggctgccatgccagtgtctgtgcacatccctgtctgttggtctccatggccactgtggaccgggacccttgggggaagcctgcccatgtcgggctgtgggaggctgatcggtgcgtgtgagagtggcttcccttctgcctgactccccactccctgacctgccccttccttgtttttcctcctactggtctccaccaaggctttgttagcccccaccctgcctggtgtgcagctaacccctccctccccacagccagaggaggccacagacccctcaggggagttccgcgctggggtctgggctgtgctccctcactaaagggaaggaaaggaagctgggcgtcctccgggccccccaacacacgtcccatttagccctgcacagcggtctccttcccctaagccagcactgctgctccctggagcccgggaaggaggctgcctggctggaggcccgagccgatggcgcctgtgctgaggatttgtgctgtgatttgggcaaatcattccaggtctttgggcctccaccccctcgtctctagtggacatttgagatcagagagcaccacagggctggctttgtgccctaacccctgggatgcagcctgcctttccataaagtcacctaggtgaggataggcgcgggagcctcggcatgacaccatggagatcggggccctcttcccagtgggttcactccttttcacacctgctgggtccctcctcacccagcaggcctggtccacctctcattgcaagccccaagcactgagccagcaggtgccagggagccacccgccccccatcgcttctgcacacctcagactcaccccatcaccttggcagcaaagcactggctctgccgtctgacccctgatccaggcagccccctccgcagagaaaagggttggggagaagcctctgcagtcctggaagatgtggggtgctgggtgagaggcatcagcccccacaagtatgtttttgtgtcttaagatagcagtttactttgaaaaagtgaaaaaggcttccgggctgtcctctgcccagtgagatggaggacgctagagaaagtgctgagtgtcccgagagaggcccccgagccagtgcatggaggtccttcggcctggctcagctgggctgcaggatgcccactttgaggagggaggcacagggcttgggcgaggggcagaggccatcagaactgcccggcttttttggaaactgaggacccaacaactaaccacgtttacacgacttgagttttgaaccccgattaatgtctgtacgtcacctttcctagttctgaccctgagccctggggaacaggaaagcgtggctggcctcttgcactgctttgtctccaaaataaactactgaaatcaaaccgcatttcacacgtgtttacacatgttgctcaagtttgttatgtcatactcccagtccttaaaagacgtttaataaaacagctttaccttttaaaaataaaatttcaatcccagtctgcctcaggtacgggtgggggtgtgcagcgtgactcctggctgtgttcctgtaccgtttgtggcctccggggtcttgcgcgtccagggcccagataccgagtaactgccatgtggtgtcgtggtggcgtccataggcctccgtggtggggcgggggcggggctgtgggtgtgcagggcagctgcattttccaagagtggagatggaggatggagatttgcttcgtaaaggcctgggagctacatgggaggtagggaggggccagccacacacagggctggggggccggtggactctgcccagtgaagccaggggagtgtcagcaatgaggggcctggacagcgacgcgggacccgcacctgggagc

SEQ ID NO: 68646 - DNA, 1179 bp, Homo Sapiens
ccattacggtcctaagtagcgaggcctgggtggcgatctcggcacgagggcggcgagtgcgcgggtcgctcgccgccgcccttctcggcgggcagcgcgcgaggaccaggccgaggaggaagtggcggcggcggcggcgggactgcgcgccccagctccgatccccgttccgcgtccccgccgccgggaggaggtgcccactcgctcgcggcgcgcgccggccgccagactcggcctgtgggcgatttcctccggacccaggctccccgcccgaggaggaagatgcagacctttctgaaagggaagagagttggctactggctgagcgagaagaaaatcaagaagctgaatttccaggccttcgccgagctgtgcaggaagcgagggatggaggttgtgcagctgaaccttagccggccgatcgaggagcagggccccctggacgtcatcatccacaagctgactgacgtcatccttgaagccgaccagaatgatagccagtccctggagctggtgcacaggttccaggagtacatcgatgcccaccctgagaccatcgtcctggacccgctccctgccatcagaaccctgcttgaccgctccaagtcctatgagctcatccggaagattgaggcctacatggaagacgacaggatctgctcgccacccttcatggagctcacgagcctgtgcggggatgacaccatgcggctgctggagaagaacggcttgactttcccattcatttgcaaaaccagagtggctcatggcaccaactctcacgagatggctatcgtgttcaaccaggagggcctgaacgccatccagccaccctgcgtggtccagaatttcatcaaccacaacgccgtcctgtacaaggtgttccgtggttggcgagtcctacaccgtggtccagaggccctcactcaagaacttctccgcaggcacatcagacccgtgagtccatcttccttcaacagccacaacgtgtcaaagccggagtcgtcatcggtcctgacggagctggacaagatcgagggcgtgttcgagcggccgagcgacgaggtcatccgggagctctcccgggccctgcggcaggcactgggcgtgtcactcttcggcatcgacatcatcatcaacaaccagacagggcagcacgccgtcattgacatcaatgcc

SEQ ID NO: 68647 - DNA, 1031 bp, Homo Sapiens
cgccaggtacgaggctgggtggtttaaatcggcacgaggtgatctgattcttctgttttttaatttttaacctgattctctgatgtcatgatctaaatgaggggtagtgggggatggaagagagtaccaggtggtccaccgttggggagtggggccgtccgcctgctctctactgtgcagacctcctaactgagtttacacacgcttgtgtttgcaacactaggtctggatgggaggtgaggggtgtgcgtatggctgccatgccggtgtctgtgcacatccctgtctgttggtctccatggccactgtggaccgggacccttgggggaagcctgcccatgtcgggctgtgggaggctgatcggtgcatgtgagagtggcttcccttctgcctgactccccactccctgacctgccccttccttgtttttcctcctactggtctccaccaaggctttgttagcccccaccctgcctggtgtgcagctaacccctccctccccacagccagaggaggccacagacccctcaggggagttcccgcgctggtgtctgggctgtgctccctcactaaagggaaggaaaggaagctgggcgtcctctgggcccccaacacacgtcccatttagccctccacccccttgtctctagtggacatgtgagatcagagagcaccacagggctggctttgtgccctaaccctggatgcagctgctttcataaagtcactagtgaggataggcgcggaagctcggatgacccatggagatcggggcctcttcccgtgggttcaatccttttcaaccgctggtcctcctcacccagaggctggtcacttcattgaaggccaagcctggacagagtgcagggagcaccgccccatgtttgaactgagtaccaactggagaagcggttgcgtgaccgttcggagccctggaaagtgggagagctggcagaaagtggggggagacccatttgtttaaagtgaaaagggtcccgagaggatgagcgaaccgagtttgtgaagaggat

SEQ ID NO: 68648 - DNA, 1080 bp, Homo Sapiens
  misc_feature (316)..(325): n is a, c, g, or t
gcttgggtcgcctctgaaggagaaccattttccatctctttcatagttttttcccccagtcagcgtggtagcggtattctccgcggcagtgacagtaattgtttttgcctctttagccaagacttccgccctcgatcaagatggtggttggacggccttcctaacctttacggggcctggcggtgctgacgcctgagctggtaggggtggagcaggtaggaaacagcaaatgcagaagctgctgcgcggaagtcggccatggactggaaagaagttcttcgtcggcgcctagcgacgcccaacacctgtccaaacnnnnnnnnnngtgaacaagaattaaaagatgaagaacatggatttatttacaaaatattactccgaatggaaaggaggtagaaaaaacacaaatgaattctataagaccattccccggttttattataggctgcctgctgaagatgaagtcttactacagaaattaagagaggaatcaagagctgtctttctacaaagaaaaagcagagaactgttagataatgaagaattacagaacttatggttttggctggacaaacaccagacaccacctatgattggagaggaagcgatgatcaattacgaaaactttttgaaggttggtgaaaaggctggagcaaagtgcaagcaatttttcacagcaaaagtctttgctaaactccttcatacagattcatatggaagaatttccatcatgcagttctttaattatgtcatgagaaaagttgggcttcatcaaacaagaataggactcagtttatatgatgtcgctgggcaggggtaccttcgggaatctgatttagaaaactacatattggaacttatccctacgttgccacaattagatggtctggaaaaatctttctactccttttatgttggtacagcagttaggaagttcttcttctttttagatcctttaagaacaggtaaaagcaaaatcttatctaacttacgatattcatgaggatactattatatctaaatctcaataactagagaaaactcttgaacaactatcatttattttcctgtcactgccat

SEQ ID NO: 68649 - DNA, 1105 bp, Homo Sapiens
  misc_feature (58)..(58): n is a, c, g, or t
  misc_feature (60)..(60): n is a, c, g, or t
  misc_feature (68)..(68): n is a, c, g, or t
  misc_feature (93)..(93): n is a, c, g, or t
  misc_feature (118)..(118): n is a, c, g, or t
  misc_feature (305)..(400): n is a, c, g, or t
  misc_feature (1028)..(1046): n is a, c, g, or t
gtaacagatctaccttccatcccaagacagccgctcagagacagatgcatggacatgncnaaagcctntctgcaaaagggtagacacagactntagattgtcaggcagccccactccngaccagcagacactccaagcgtcaaagtgaagccgtgcagactggtcactgaatgacctgatagatagctggagcataaactctgcaaggctcctctatcctgtgtcctgagctgtgtcccttctcagtctgagggcctaacctagagcaggttccatagtgagaaaattcaatgtagcagactacnnnnnnnnnnnnnnnnnnnnnnnnnnnnnnnnnnnnnnnnnnnnnnnnnnnnnnnnnnnnnnnnnnnnnnnnnnnnnnnnnnnnnnnnnnnnnnnnagagacaagcaagcaatgaacaaattagcagaaaacctagttttagtgaaaaatgctgtaaagaaaatagaaatgcgatagagtgctggcaggctagtgtagataagtggtctgaaaaggtgtctctgagccgagggcatgtgagctggggcctaaacaactagaaggagagagccacgtgaacatccggcgaaggggacccaggcagagagaaaaggaaatccaagccctgaggtaggaatgagcaggtcagattcaaggcagtgaggtcaggccgcatgaacctggaggggaatcggggacttcatgcgaaactccagcctaggctttcaaagtcaaagggtgatacagtgggtaccaagctcctctgctccccactttgtagagcctagcatgaggtggcatgtactagaattggatcctaggtgcttagccctgcaatatcagggcctcactggtgggagctgcctcgggctgggttgcttggtcatagagccatagaaggaagctgtcagcccggagtgcctgccacctagacactgatgccattgtgtgctgcctcaagactgctggagtcaggacattttatagagccttttccagttttactaaaaaatttttccattgnnnnnnnnnnnnnnnnnnncctgagcaggcggccgcaagcttattccctttagttgagggttaattttagcttggcac

SEQ ID NO: 68650 - DNA, 1751 bp, Homo Sapiens
  misc_feature (413)..(429): n is a, c, g, or t
  misc_feature (1609)..(1655): n is a, c, g, or t
gttgggcgtttgtcgcgcccgctacagcatagtgggtatactgacacccataccgcgatgtcttcttaatcctgagcccgtcgccacgattgttgggtcaagacagatatgcggtgaggcaattctccgcaagtcagaaaccaagttgggaaaaccgtgttagagcagaacacttggctaagggcagactggaggtccccggtctcaatagctacactccgcagaatgaggggagaacggaaccgggaaataatacagtcagtgctagttaattgaggaaaagggaaaaatgaaaccaaactcaagtcggtaaagtttatcaaaagagtcaatgatgtagccttccccactctctgtcacacacgcttgctaacaagtatattaaattaagccaaaatttaacctgaatgcgnnnnnnnnnnnnnnnnnattaagatctgagataggaacggtcatacttagtactgaaaggcagacaataaaatgggccatgaaaggggggggaaaggtactgtctattgttcgagggattcaaccagagataaaacctatatacaagcatgtgtgtagctcgaaataaaaataaaaggactatttcatgtcatgactgcttgttggcttcctcttcatatgcattccctgtgccattctgtacataggatgaaccagaaccaaggccatacaaatgaccacaatatttggcatcatcaatatgatcttcaaagaacatttctctcattttgaaaaaggccattcctgtgagcaatgaatcagatcctgcctgatgttgtggtcctatccgttccagctctaactgttctgccacctcctgtaatccacctttgagatttttgcagctcttcatgaggtacttcacatcataaatgacaggaaaaaacaatcgaaggatctcaaagaagtcaagttcttcttcaggcaagttagagttggttaggattttgattaagtagccaaagtcgtaaccgctatgaaatgacaaccatttgaccccttcacagaggaccactccagaagtcataagaagttctgcaaagtactgggtttcaattccttcctcctcatgttttttaaactggataccagatgttgttagtagctctatagagtcctgggcatacatgtcctccgtcaaattaaatttaaaattaaactgccaagttgaagttcctggagggtattctccttgctcattcataaatgtcagtcctagctgaattatctttaacaagtctacattacaccgcaatagttggtattgatagtcagcattgctcctgaattctccaatgggtcttgcaaccacacctggaaactcggtgtccatagcaacgtaattatattttcggataacttgacgaattttcttcatctcttcatccaagttgcaagcccaaacttcacaaattctttggctatgatctacagttgccgctggcatagtgagggcacaagggagtctagatgccaagcatcaaaatgttatacttgattgaagatttgtttcataaaatattttatcctttatttatgtacttgtgtcgctgagctcgcgctcctcctcctcctcctcgccatagagacagcactnnnnnnnnnnnnnnnnnnnnnnnnnnnnnnnnnnnnnnnnnnnnnnngccccatagacacctctcgcccagcgaagggaaaggcgagcaggagctgcgccgcaccgtgctgcgccgtcgcttttcgcacgtcctgacgggccc

SEQ ID NO: 68651 - DNA, 596 bp, Homo Sapiens
acaaatcggactgcttctaccagacatactcatcaggggtggatgcggtgagggagtggtaccgcttccgctacatcaacatcctgtcgaggctgccagagactctgccatccctggaggaggacacgctgggcaacttcatcttcgcctgccgcttcaaccaggtctcctgcaaccaggcgaattactctcacttccaccacccgatgtatggaaactgctatactttcaatgacaagaacaactccaacctctggatgtcttccatgcctggaatcaacaacggtctgtccctgatgctgcgcgcagagcagaatgacttcattcccctgctgtccacagtgactggggcccgggtaatggtgcacgggcaggatgaacctgcctttatggatgatggtggctttaacttgcggcctggcgtggagacctccatcagcatgaggaaggaaaccctggacagacttgggggcgattatggcgactacaccaagaatggcagtgatgttcctgttgagaacctttacccttcaaagtacacacagcaggtgtgtattcactcctgcttccaggagagcatgatcaaggagtgtggc

SEQ ID NO: 68652 - DNA, 2394 bp, Homo Sapiens
tccggctaggtagcgaggctgggtggtgaatcggcacgagggctccagctgtgcaaccagaacaaatcggactgcttctaccagacatactcatcagtgagtggatgcggtgagggagtggtaccgcttccactacatcaacatcctgtcgaggctgccagagactctgccatccctggaggaggacacgctgggcaacttcatcttcgcctgccgcttcaaccaggaattactctcacttccaccacccgatgtatggaaactgctatactttcaatgacaagaacaactccaacctctggatgtcttccatgcctggaatcaacaacggtctgtccctgatgctgcgcgcagagcagaatgacttcattcccctgctgtccacagtgactggggcccgggtaatggtgcacgggcaggatgaacctgcctttatggatgatggtggctttaacttgcggcctggcgtggagacctccatcagcatgaggaaggaaaccctggacagacttgggggcgattatggcgactgcaccaagaatggcagtgatgttcctgttgagaacctttacccttcaaagtacacacagcaggtgtgtattcactcctgcttccaggagagcatgatcaaggagtgtggctgtgcctacatcttctatccgcggccccagaacgtggagtactgtgactacagaaagcacagttcctgggggtactgctactataagctccaggttgacttctcctcagaccacctgggctgtttcaccaagtgccggaagccatgcagcgtgaccagctaccagctctctgctggttactcacgatggccctcggtgacatcccaggaatgggtcttccagatgctatcgcgacagaacaattacaccgtcaacaacaagagaaatggagtggccaaagtcaacatcttcttcaaggagctgaactacaaaaccaattctgagtctccctctgtcacgatggtcaccctcctgtccaacctgggcagccagtggagcctgtggttcggctcctcggtgttgtctgtggtggagatggctgagctcgtctttgacctgctggtcatcatgttcctcatgctgctccgaaggttccgaagccgatactggtctccaggccgagggggcaggggtgctcaggaggtagcctccaccctggcatcctcccctccttcccacttctgcccccaccccatgtctctgtccttgtcccagccaggccctgctccctctccagccttgacagcccctccccctgcctatgccaccctgggcccccgcccatctccagggggctctgcaggggccagttcctccgcctgtcctctgggggggccctgagagggaaggagaggtttctcacaccaaggcagatgctcctctggtgggagggtgctggccctggcaagattgaaggatgtgcagggcttcctctcagagccgcccaaactgccgttgatgtgtggaggggaagcaagatgggtaagggctcaagaagttgctccaagaacagtagctgatgaagctgcccagaagtgccttggctccagccctgtaccccttggtactgcctctgaacactctggtttccccacccaactgcggctaagtctctttttcccttggatcagccaagcgaaacttggagctttgacaaggaactttcctaagaaaccgctgataaccaggacaaaacacaaccaagggtacacgcaggcatgcacgggtttcctgcccagcgacggcttaagccagcccccgactggcctggccacactgctctccagtagcacagatgtctgctcctcctcttgaacttgggtgggaaaccccacccaaaagccccctttgttacttaggcaattccccttccctgactcccgagggctagggctagagcagacccgggtaagtaaaggcagacccagggctcctctagcctcatacccgtgccctcacagagccatgccccggcacctctgccctgtgtctttcatacctctacatgtctgcttgagatatttcctcagcctgaaagtttccccaaccatctgccagagaactcctatgcatcccttagaaccctgctcagacaccattacttttgtgaacgcttctgccacatcttgtcttccccaaaattgatcactccgccttctcctgggctcccgtagcacactataacatctgctggagtgttgctgttgcaccatactttcttgtacatttgtgtctcccttcccaactagactgtaagtgccttgcggtcagggactgaatcttgcccgtttatgtatgctccatgtctagcccatcatcctgcttggagcaagtaggcaggagctcaataaatgtttgttgcatgaaggaaaaa

SEQ ID NO: 68653 - DNA, 627 bp, Homo Sapiens
gtgtctggtttcacctttcccactgcttccctcactgctgtgctgcagtcttcagctcgccaaaacaacgtttcagtggacagcctctcctgggagtttatcgtttccactgtggatgacagcaacctagtgtatccccccaaggatggtgtctgggtccggggcctgtacctggaaggtgctggctgggaccggaagaactcctgcttggtggagcagagcccatgcagcttgtctgcctcatgcccacgatccacttccggcctgcagagagccgcaagaagagcgccaagggcatgtactcctgcccctgctattactatcccaaccgggcaggcagctcagaccgagcctcctttgtcatcggcattgacctgcggtctggggccatgacacctgatcattggatcaagaggggcactgctctactcatgagcctggacagctgagacctcctcctcttctccgcttgagagagagggtcagggactccaggagctaagacagatgttgcacctaggactgaggccggacctcactcagactttgaccttggccgaatttgtgtgatgtggccctggagatacctagttgtgttagccataaaagtgaaagagttgtattgga

SEQ ID NO: 68654 - DNA, 1064 bp, Homo Sapiens
  misc_feature (955)..(986): n is a, c, g, or t
catctcttctcccaggcctgagctgaagcctgtggacaaggaatcagaggtcgtaatgaagttccctgatgggtttgagaagttctcgccgccaattctgcagctagatgaggtggatttctactacgatccgaagcacgtcatcttcagtcgcctctctgtgtctgctgatctcgagtctcgcatctgtgtggttggagagaatggggctgggaagtctaccatgctgaagctgcttttgggggacctggcacctgttcggggcatcagacacgctcacaggaatctgaagattggctatttcagccagcaccatgtggagcagctggacctaaacgtcagtgctgtggaactgctggcacgcaagtttcctgggcgccctgaggaggagtaccgtcaccagctgggtcggtatggcatctccggagaactggccatgcgtcctcttgccagcctgtctgggggccagaagagccgagtggcctttgctcagatgactatgccctgccccaacttctacattctggatgaacccacaaaccacctggacatggagaccattgaggctctgggccgtgccctcaacaatttcaggggtggtgtgattctggtgtcccacgatgagcgctttatcaggctggtgtgccgggagttgtgggtatgcgaaggaggcggcgtcacccgtgtggaaggaggatttgaccagtaccgcgccctcctccaggaacagttccgccgcgaaggcttcctctagggccaccaggctgaggactcgcccaggacatggactggtctctcagacccctgggccaccatgtaggccaccactccaggccgtggacttcccccaacttggggacagccttattcccaaatgtctctatccttttgactggagcatcttctgcacaaccttgggagcccatccaagggttggtgaggactggtctccccnnnnnnnnnnnnnnnnnnnnnnnnnnnnnnnnatagattcccccactgccccagctctgactggaccccaagtggctgctatgtaaattaaatctctccccgcgtcaaaa

SEQ ID NO: 68655 - DNA, 681 bp, Homo Sapiens
taaaccccaaggataaagtctccttaattaaagatgaatagcatttctttttggagggtttagagattcttactaatatgttgaactaaaatagaaagaaaatgttgctgtcatgtaatttaaacaatgtaaatattttatggaataatggcttttcaaatacatttcttaaggaactgtttatgattattactggatttgtcatttttgataatttaaatattgctgctgctttgtagatgatgagaagaaatgttaaagtgctttctaaaaggaaattttttcacctttggaggagaatatattagagttgtgggtaatttttcacagccacctatgtacatactaattacccattggatacttatatctaaaagtctcatgctgaagtatagtttttgggaaagaatgattttaaataaagagattgtaaaagtaaaaaactgtaaatgtatatgtatgatagaattgtttcctctaagtgtagtttttctttcaactaaaattcagtttatgtgtaaaataattcagtcattaatagaaatggagtgatttcacagtgtgtactgttttgccacatacttctaaagaacacaattttatataattttgaaatcatgtatgtttaaattagaaaaccaaaaatcatgaacattctaagagaaaataaatatagaattt

SEQ ID NO: 68656 - DNA, 380 bp, Homo Sapiens
gttccactcttacgagactgcaccaactcggatcatcagaaatggttcttcaaagagcgcatgttatgaagcctcgtgtatcaaggagcccatcgaaggagactgtggagccaggactctgcccaacaaagacttagctaagcagtgaccagaacccaccaaaaactaggctgcattgctttgaagaggcaatcattttgccatttgtgaaagttgtgttggatttagtaaaaatgtgaataagctttgtacttattttgagaactttttaaatgttccaaaataccctattttcaaagggtaatcgtaagatgttaacccttggtatttagaaaattaaaaccttataatatttttctatcaagatgtatattttacag

SEQ ID NO: 68657 - DNA, 1222 bp, Homo Sapiens
  misc_feature (275)..(321): n is a, c, g, or t
cattgagtccactgaaccccaaaagcagtgctcaaagaaaaagaaaaaacgggacagagttgaagcatctagcttacctgaagtcagaacagggaagaggaagagaagcagctctgaagatgcagaatccctagctccccgatcaaaagtaaagaaaattattcagaaagacatcattaaggaagcatcagaagcttccaaggaaaatagagatatagaaatctctactgaagaggaaaaggatactggagatctaaaagatagctctctcttgnnnnnnnnnnnnnnnnnnnnnnnnnnnnnnnnnnnnnnnnnnnnnnngggagaagaagttataccattaagagtgctatcaaagagcgaatggatggatttgaaaaaagagtatttagcgctacaaaaagctagcatggcttctttaaaaaaaacaatatcccaaataaaatcagagtcagaaatggaaacagacagtggagtacctcaaaacactggaatgaaaaatgaaaaaacagccaacagggaagagtgtcgcacccaggagaaagttaatgcaacaggaccacagttcgtgagtggagtgattgtgaagatcattagcacagagcctctacctggcaggaaacaagtccgggatactttggcagcaatctcagaagttctttatgttgatttgctagaaggggatacagaatgccatgctagatttaaaactcctgaggatgctcaagcagtaataaatgcctatacagaaattaacaagaaacactgctggaaactcgagatcctttctggtgatcacgaacaaaggtattggcagaagattttggttgatagacaggcaaaacttaatcagcctcgggaaaagaaaagaggcactgaaaagttaatcaccaaagctgaaaagattagactggcaaagactcaacaagcgagtaaacatataagattttctgaatatgattgaaaagaaaaacagttcacctcttaatacttcacaagatacttgagctgttcttgggagattcacttttattatggtagcactgcataattaatgtgtttttaattaaaagaaatatctttgttcctcaacttgtaaataagacttttttctagagacaaatatgatgtataccacaatttttcttaaacattttatttgttgaaattatcttagatgtcagtgtcaggtgatttagtaaataaatgtgttttgaacatt

SEQ ID NO: 68658 - DNA, 1412 bp, Homo Sapiens
  misc_feature (143)..(213): n is a, c, g, or t
  misc_feature (777)..(827): n is a, c, g, or t
  misc_feature (1191)..(1249): n is a, c, g, or t
cagtcgacggtaccggacatatgcccgggaattcggccattacggccgggggagagaagcagtagtcaataaagagagtgccgtatttcgcagattggagctgagctgtggctgccagaagatagcgaacgaatggaaactgnnnnnnnnnnnnnnnnnnnnnnnnnnnnnnnnnnnnnnnnnnnnnnnnnnnnnnnnnnnnnnnnnnnnnnncggtcacgagttaaacaggtgcttgcagatattgctaagcaagtggacttctggtttggggatgcaaatcttcacaaggatagatttcttcgagaacagatagaaaaatctagagatggatatgttgatatatcactacttgtgtcttttaacaaaatgaaaaaattgactactgatgggaagttaattgccagagcattgagaagttcagctgttgtagagcttgatttggaaggcaccagaatccggaggaaaaaacctctgggggaaagaccaaaggatgaggatgaacgcacagtgtatgtggagttacttcccaaaaatgttaatcacagctggattgaaagagtatttgggaaatgtggcaatgttgtttatataagtataccacattataagtctactggagatccaaagggatttgcgtttgtggaatttgaaacaaaagaacaagcagcaaaagcaattgagtttcttaacaacccaccagaagaagcaccaagaaaacctggcatatttcctaaaacagtgaaaaataagcccattccagccttaagagttgtnnnnnnnnnnnnnnnnnnnnnnnnnnnnnnnnnnnnnnnnnnnnnnnnnnncaatatccaagccaaagaagaaaacatggacacaagcaacaccagcatcagtaaaatgaaaagatccagacccacatctgagggctctgacattgagtccactgaaccccaaaagcagtgctcaaagaaaaagaaaaaacgggacagagttgaagcatctagcttacctgaagtcagaacagggaagaggaagagaagcagctctgaagatgcagaatccctagctccccgatcaaaagtaaagaaaattattcagaaagacatcattaaggaagcatcagaagcttccaaggaaaatagagatatagaaatctctactgaagaggaaaaggatactggagatctaaaagatagctctctcttnnnnnnnnnnnnnnnnnnnnnnnnnnnnnnnnnnnnnnnnnnnnnnnnnnnnnnnnnnnttataccattaagagtgctatcaaagagcgaatggatggatttgaaaaaagagtatttagcgctacaaaaagctagcatggcttctttaaaaaaaacaatatcccaaataaaatcagagtcagaaatggaaacagacagtggagtacctcaaaacactggaat

SEQ ID NO: 68659 - DNA, 997 bp, Homo Sapiens
  misc_feature (82)..(116): n is a, c, g, or t
  misc_feature (633)..(643): n is a, c, g, or t
  misc_feature (984)..(984): n is a, c, g, or t
aaaggacttgaataatcatatgggcgctagccggttacagccgaacgacgagcgcagcgagtagtgagcgaggaagcggcgnnnnnnnnnnnnnnnnnnnnnnnnnnnnnnnnnnncagtcgacggtaccggacatatgcccgggaattcggccattacggccgggggggcggtcgcgttggcagcggatgcgggaagccggactctgggcgtcatgtactacaagtttagtggcttcacgcagaagttggcaggagcatgggcttcggaggcctatagcccgcagggattaaagcctgtggtttccacagaagcaccacctatcatatttgccacaccaactaaactgacctccgattccacagtgtatgattatgctgggaaaaacaaagttccagagctacaaaagtttttccagaaagctgatggtgtgcccgtctacctgaaacgaggcctgcctgaccaaatgctttaccggaccaccatggcgctgactgtgggagggaccatctactgcctgatcgccctctacatggcttcgcagcccaaaaacaaatgagttaggctgcagaggactggtttgttttttggcataaaccctttgaagttcctttttcattgttaaattaaaannnnnnnnnnnacttggatggcttaacatttttgcaagaaaaataggaagatatgaagatgatgttttggtttgtttatgaaatgcatatggcttgtcagagctcattcgacagttaaagccattgtttaaagaaacggtgccttgctctgtgtttgtgctcctgatttccctggaggttctggatgaaggctgaacacaggcttgttaatgtcagtctgtgctgaggacctcagggacttgaggttgcatttttgagcatggggtgcaagagccttttctggatttggatgtggctatggaaaagacacagaagcccaagtcatgtgcatgaaatggagagtttgagttantcacctccgggga

SEQ ID NO: 68660 - DNA, 943 bp, Homo Sapiens
  misc_feature (105)..(139): n is a, c, g, or t
ggggggagagtagaaggaaagcctgtagtcgatccactgatatgtggcggcagttcgcgagccgaacgacgagcgcagcgagtcagtcgagcgaggaagcggcgnnnnnnnnnnnnnnnnnnnnnnnnnnnnnnnnnnncagtcgacggtaccggacatatgcccgggaattcggccattacggtccggggggggcggtcgcgttggcagcggatgcgggaagccggactctgggcgtcatgtactacaagtttagtggcttcacgcagaagttggcaggagcatgggcttcggaggcctatagcccgcagggattaaagcctgtggtttccacagaagcaccacctatcatatttgccacaccaactaaactgacctccgattccacagtgtatgattatgctgggaaaaacaaagttccagagctacaaaagtttttccagaaagctgatggtgtgcccgtctacctgaaacgaggcctgcctgaccaaatgctttaccggaccaccatggcgctgactgtgggagggaccatctactgcctgatcgccctctacatggcttcgcagcccaaaaacaaatgagttaggctgcagaggactggtttgttttttggcataaaccctttgaagttcctttttcattgttaaattaaaattttttttcttacttggatggcttaacatttttgcaagaaaaataggaagatatgaagatgatgttttggtttgtttatgaaatgcatatggcttgtcagagctcattcgacagttaaagccattggtttaaagaaaacggtgctttgcctctgtggtttgtgcctcctgatttcccctggagggttctgggatgaaaggctgaaacacagggcttggttaattgtcagtcctgtggctgaaggacctccgggggaccttgagggttgcctttttttgagccatgg

SEQ ID NO: 68661 - DNA, 1728 bp, Homo Sapiens
  misc_feature (524)..(534): n is a, c, g, or t
  misc_feature (1425)..(1433): n is a, c, g, or t
  misc_feature (1641)..(1650): n is a, c, g, or t
cagtcgacggtaccggacatatgcccgggaattcggccattacggccggggctctctggggcggtcgcgttggcagcggatgcgggaagccggactctgggcgtcatgtactacaagtttagtggcttcacgcagaagttggcaggagcatgggcttcggaggcctatagcccgcagggattaaagcctgtggtttccacagaagcaccacctatcatatttgccacaccaactaaactgacctccgattccacagtgtatgattatgctgggaaaaacaaagttccagagctacaaaagtttttccagaaagctgatggtgtgcccgtctacctgaaacgaggcctgcctgaccaaatgctttaccggaccaccatggcgctgactgtgggagggaccatctactgcctgatcgccctctacatggcttcgcagcccaaaaacaaatgagttaggctgcagaggactggtttgttttttggcataaaccctttgaagttcctttttcattgttaaattaaaannnnnnnnnnnacttggatggcttaacatttttgcaagaaaaataggaagatatgaagatgatgttttggtttgtttatgaaatgcatatggcttgtcagagctcattcgacagttaaagccattgtttaaagaaatggtgctttgctctgtgtttgtgctcctgatttccctggaggttctggatgaaggctgaacacaggcttgttaatgtcagtctgtgctgaggacctcagggacttgaggttgcatttttgagcatggggtgcaggagcctttctggatttggatgtggctatggaaagaacacagaagccaaggtcatgtgcatgaaatgaggagtttgagttagtcacctcggggattttttccattttgcagtaaaatgttaaattaatgtagcctgcctctatttgttgggcaggtaatttcaaagggttatttgcctcatctcctatctttagtgaaatcttatgtgtaattattccaccgtgggaacagagaatacctgtttagtgttgcactttagactggtgtctgttttgttaatgcagctgtgccacaaattctcctttatcttttaaaaatgttatagctttaaattttgatttattttgactgtggaataaatacatgaatgaaaaattgtgaccacctaaaccccaaatggatgagagtatgcctggtggggccgctcttcggcccttcgaaaaaaacttttcctaaacccatttccgtattgggggccccgggcccccccattatagttaaagtgggaaacaatgggccccatagggctttggtgttcccctcaggggaagataccccttgggttccattggaatttaacgggcgctttggggattctctcccccccgcaattaaaagaaaggacggcgcgcnnnnnnnnncaaaaccccgaaaccggtttccgtcggaagcgcaaattcccaagaatagggaagacttttttgttaaggcgcccattttaccgtgggggactccgtatatccccgcgatgtgaaagtccccaaacgcggcggccgttcccaactttcacaaaatataacgccccccccggccccgttggccacactgtcatatggggaaagataactnnnnnnnnnnaatagtcccttttgtaagggcaatttctctggcgcccacactttggggaagacgccccccccacaaaaccgtgcggtc

SEQ ID NO: 68662 - DNA, 1049 bp, Homo Sapiens
aagttgagaccaaatcggtgaagtgttgagcaagtaacatttatgatgtgtgtatattggaacaaatgtaaaagggttacaaagattagaaacagagtcataaaaaatggcttgatttataaaggcattacttttggtgctttatataatggcatatattgaactaaaaatttgtatatacagtatgtcagcatttcttagtaacttctcttgaatccatttttaatatctaatattgtacaggttggggagttacattcttcaggccaatactatccagactatataaatttataaaataaattgaaaaattcattcccctgtattcaagaccaaagcacataaatgctaatgtagggctcagaggggaaatacagttctcctgcatatttgagaaaatgtgaagtcctttcaagaaaatctaataaacataataatcatagcctgctgacactaaggaaaaaggacctcattcactctttcttttatgcagtgatttactggtccctactgatttccaaattggatcacgatagtaaattatccatgctggtacctgtgaaagtaagccctgggatccatatttgttttgtgttctgcttaaatcagcaagaatgataaatttgatggtgtgaaattggaagtatcaagggctttctttggtgattgagggaaataatgtctctacttgtaatttattgtgaccctttttcactgtatatgctttgtatgtctaatatttatttcaatgcaaattcaattgttccttcatctgtattgttatatctaagattttattgatgttaaaatctaattgtggaataaaaatctctctggaatttagcagatacaaaaatgttatcttgcaaaagaactaagaacatttgtagttagaaatcagctttcctttgagcttaattgcctttttgttagaataagctgaatttgaacacactcctcttatcctcagcccatcacaaataatagagatgccatgattttgaggtctgatgggaaactggtaaaaatgtgatctaaggtgtaactgg

SEQ ID NO: 68663 - DNA, 582 bp, Homo Sapiens
  misc_feature (343)..(461): n is a, c, g, or t
actttaaaaaaattttattggttgatagcaaaatttccatttctatgtttttgcaattaataatagaaatatataggagacaatgtcaggaaacagataaaattgtaatttaaataaaaacaaacagtgagagcgtaagatttataaacatgtaaaattagtcaaattttgttttacaacaaaaagacaaatctggctaatggcccacttgttcaaatagcattaaaaacagaattgtcacacacaccaaaaataatttgttccagttatttcaactgtacattggtcctcattaaaagagaatgaaaagtacagagaaaatattttttaaaaatctcatcannnnnnnnnnnnnnnnnnnnnnnnnnnnnnnnnnnnnnnnnnnnnnnnnnnnnnnnnnnnnnnnnnnnnnnnnnnnnnnnnnnnnnnnnnnnnnnnnnnnnnnnnnnnnnnnnnnnnnntatttttttaatttaaaaaataaaagaataaaattgtgtagctcagtatagtatcaagattaatctgcctactcacatttctacactttataaaaatgtaataaaagaaaattatctttct

SEQ ID NO: 68664 - DNA, 1061 bp, Homo Sapiens
  misc_feature (74)..(74): n is a, c, g, or t
  misc_feature (76)..(76): n is a, c, g, or t
  misc_feature (109)..(109): n is a, c, g, or t
  misc_feature (189)..(189): n is a, c, g, or t
  misc_feature (207)..(207): n is a, c, g, or t
cagtacatttgtcggtctttttttgatttggcgaacattcacccggacagttgactgatcgaattatcgactcntntaggattgccctcgagcaagattcgcacgagcntatgtgctgtgtcagccaaaagcagcagtggcagccactcagtgatgagacaactgttgagtgtggcaaaatggcgcctntgaagaaagagagcctanggagagcagccctgtaatgtatccagtcagctgcatggtactgacttgagctgaggagtcaaactcttctttctgtatgacatatacatatacttgtttataaaataatcatttgcccagggaaaaaaccacaacgctgtttcaagctttagtcttatgtgttgaaatgtttttgtaagccttggcatgaattagtgttctagactctgctttgcacagcttgcacttacagtgattgtacatattgtacatctttgtacagagacatcttggcacctcatcccaacaaatcacatttgtagaaatgtaatgcggttctgagtggcttgaaatgtacagaatgttttgaaagtgttttattaagaatcacacaaaaataaatgtattaaaattaaattcattctcttattggtgacttatggaaataaagcatcaatattggatgtatttaattcctagtttgttttccattctggaataaaaaggtatttgctgataaaaggcataacgagacatagtgctgctaccactgaataagtgatactttggaaagatgcatgccagtggatgccagaggaccaggctaatgacttgtgtgtgctgatgtgtttccatttgtatttaatgtgtgtagaccctcctctgttcatcaatcaaaaagcatttcctaggcagctcctcgcctgtcactgtgcatatggaaacagggacatctccatcattactggcttagttttgctttcctttgacacagtaaggcaaaggccaagctttcaaaagagtaaaggatactttcacaatttcccttcatatggatatgattccagtcaaaaataaaatgcacaccaaaatgt

SEQ ID NO: 68665 - DNA, 693 bp, Homo Sapiens
  misc_feature (413)..(433): n is a, c, g, or t
ctttcctggcacatttgcagcttgtcaacacagcggaaatcacgggagaatgttgagcccttccctgggctcagctgcttgctctgttcataagctttaatagcccccggggctctgggccaggtgacccggctttaaatccctgctgtgtgaacttaggcaggtacctcccctctctgggctcttcttttccatcaagcagacagaaaacctcaaccccacaaggttgctgtgagaagaagtgggaagctgctggttccctgggcacaggaagtgcttgttccttgttctggagactcaagacattcccagaatcttcttaagcagagctgctggggagtagcccctgtagcaagtaccatgctcttgacaggcagcatgagagcgtgactcccatgacccacctgtgctcnnnnnnnnnnnnnnnnnnnnngcaaaccaggaaaactgactacacaaacattgtagaaagattagaaaatagaagcagaaagaagactcattggccatcccactctctggggtgaatactgttatattttcttctaggcctttttctatgaatatatagaatatagattttgccaccgtggtatcctactatgcacactgttttcttataatctgcttttgcacttaactgtacattgtgaacctctttccatgtcaacaaatacatgtttatctcatcgc

SEQ ID NO: 68666 - DNA, 1179 bp, Homo Sapiens
cagcggtgtgtacctgccgacagcataatgcgagacaaggtccagctattccacccggcatacaagcttatggagcagccccctttgaagatctccaggtggacttcacagagatgccaaagtgtagaggtaacaagtatttactagttcttgggcgtacctactctgggcaggtggaggcttatccaacacgaactgagaaagctcatgaagtaacccgtgtgcttcttcgagatcttattcctagatttgaactgcccttacggatcggctcagataacaggccagcatttgtggctgacttagtacagaagacggcaaagatatcagggatcacatggaaactgcatgctgcctaccagcctcagagttccggaaaggtagagcgaatgaatcaaactatcaaaaatagtttagggaaagtatgtcaagaaacaggattaaaatggatacaggctctccctatggtattatttaaaattagatgtaccccttctaaaagaacaggatattccccttatgaaatattatatcataggccccctcctatattgcggggacttccaggcaactccccgagagttaggtgaaatttgagttacagcgacagctacaggccttaggaaaacattacacaaacaatctcagcctgggtaaatgagagatgccctgttagcttattctccccagttcaccctttctccccaggtgatcgagtgtggatcaagaactggaacgtagcctctttgtgtccactgtggaaaggaccccagactgtcgttctgagcactcccaccgctgtgaaggtagaaggaatcccagcctggatccaccacagccatgtaaaacctgcagcgcctgaaacctgggaggcaagaccaagcccagacaacccctgcagagtgaccctgaagaagacgacaagccctgctccagtcacacccggaagctgactggtccacgcacggccgaagcctgaggaagctcatcatgagattcatttttcttaaattttggacttatacagtaagggcttcaactgatcttactcaaactggggactgttcccagtgtactcatcaggtcaccgaagtaggacagcaaattaaaacaatctttctgttctatagttattatgaatgtatggaaacaataaaagaaacttgtttgtataatgcc

SEQ ID NO: 68667 - DNA, 1077 bp, Homo Sapiens
cagtcgacggtaccggacatatgcccgggaattcggccattacggccgggggtgttacctgccgacagcataaagcgaggcaaggtccagctgttccaccccggcatacaagcttatagagcagccccctttgaagatctccaggtggacttcacagagatgccaaagtgtagaggtgatcgagtgtggatcaagaactggaacgtagcctctttgtgtccacggtggaaaggaccccagactgtcgtcctgagcactcccaccgctgtgaaggtagaaggaatcccagcctggatccaccacagccatgtaaaacctgcagcgcctgaaacctgggaggcaagaccaagcccagacaacccttgcagagtgaccctgaagaagatgacaagccctgctccagtcacacccagaagctgactggtccacgcacagccgaagcatgaggaagctcatcgtgagattcatttttcttaaattttggacttatacagtaagggcttcaactgatcttactcaaactggggactattcccagtgtattcatcaggtcaccgaagtaggacagcaaatgaaaacaatctttctgttctatagttattatcaatgtatggaaacaataaaagaaacttgtttgtataatgccactcagtacaaggtatgtagcccaggaaatgactgacctgatgtgtgttataacccatctgaggcccctacaaccaccagttttgaaataagattaagaactggccttttcctaggtgatacaagttgaaataataactagaacagaacgaacaacaggaatccccaaaacgaagttaactttcaagattgtgacgcctgtgcagccattaatagtaacaagctaggaacaggatgtggttctctttaactgggaaaaggagctaccgagtagacagcataacatatgtttgtcaatgagtcacgggtttgtggacaatgtggcctctttggccctgtgttattaggctacttggacaaagaccacaaggatttggtccatccttcaaaaggggaagccaacccttcctgtgctgcccgtcactggtaccc

SEQ ID NO: 68668 - DNA, 1518 bp, Homo Sapiens
  misc_feature (670)..(737): n is a, c, g, or t
  misc_feature (1114)..(1127): n is a, c, g, or t
ccagaaaatatctcagaagaaaatgcaacccacatatttattgccattaaaagtatagataaaagcaatttgacatcaaaagtatccaacattgcacaagtaactttgtttatccctcaagcaaatcctgatgacattgatcctactcctactcctactcctactcctgataaaagtcataattctggagttaatatttctacgctggtattgtctgtgattgggtctgttgtaattgttaactttattttaagtaccaccatttgaaccttaacgaagaaaaaaatcttcaagtagacctagaagagagttttaaaaaacaaaacaatgtaagtaaaggatatttctgaatcttaaaattcatcccatgtgtgatcataaactcataaaaataattttaagatgtcggaaaaggatactttgattaaataaaaacactcatggatatgtaaaaactgtcaagattaaaatttaatagtttcatttatttgttattttatttgtaagaaatagtgatgaacaaagatcctttttcatactgatacctggttgtatattatttgatgcaacagttttctgaaatgatatttcaaattgcatcaagaaattaaaatcatctatctgagtagtcaaaatacaagtaaaggagagcaaataaacaacatttggnnnnnnnnnnnnnnnnnnnnnnnnnnnnnnnnnnnnnnnnnnnnnnnnnnnnnnnnnnnnnnnnnnnngaccagacacggaaactcctatccacataaacttcctcccatgctccctagacccgccgactcatcgttgcacaaccctccctgcacccactatatttcccccccgggattgtggcgggcagtccactctcggacacaaccgccgttgtgcacgccgccgccccgcgaggagaccacaccgggagtggccattaaggcgcttccggcgataagggccccgagggttgccaccctggttggcggcgccacctataccccgtccccctcggggaacgatttttcgcgacccacgacgctgttgccggggtaggtgatagctctcgcggccggggccttgtaaagaagattgtcttcgggggccgttaacgaaaacccgnnnnnnnnnnnnnnaaggcttccgtcctcttcgcgatttcgcccgatggcgcttaacccgcggccggctcgcggcttctgttccgcccggcctcgcgttacgccgcccggtgtgcgcctttttcgcctgccggcagttggtccctcgaacgatgcttgcctgtgcacgcccgtcgtttcgcgcggtatttaccctgctgccgctgttatgttccgcacggagtcgccggtggtgcgcgcgtatcccgctgccgccgtttccccccgcacgggggtatattacccgcctgttcccttttatcgggcgcgcggtattcgccggtccacgcctgtattcggcagacaactgtgcgcccgccgcgcggttcgtccccccggatattccgcgctccgccgccgctgtccg

SEQ ID NO: 68669 - DNA, 607 bp, Homo Sapiens
gcacgaggggttactttattggttgggaaagggagaagctgtggtcagcccaagagggaatacagagtcttgttaagtgatagaaggaaaatactaacagaacacatgtaacaggaacaacattttagaggaaacaggacaaaaacttccctaaactcaagatactacaccagaagtgggcagtactcactatgttcaggggaacaaaaagataaaaactaaaaagcatcagactgttttttgtgtgaaggaaatttgtaaggtaggagaattaggtcacttactacagcacaaattgcatgtctatctaaattgacgtttaagtgcaaaagcatggatattactcatgcagttttactggaaaaccatacagatgtttttcaggaatgtacagaatgaatcaaaggaaataactgatcgacaggaaaactgtaggaaatttgtgggctggctgtgaggcagtggctcctattatgtacaattttagtgctaagtactgtgttaatgatggctatcaaacaatatgttaacatctgaaaggaaatatgtatattgagcataataaatattttataaataacaataaatcatttgattttaaaaaaaa

SEQ ID NO: 68670 - DNA, 1516 bp, Homo Sapiens
  misc_feature (84)..(84): n is a, c, g, or t
  misc_feature (241)..(241): n is a, c, g, or t
  misc_feature (1051)..(1458): n is a, c, g, or t
  misc_feature (1463)..(1463): n is a, c, g, or t
  misc_feature (1473)..(1473): n is a, c, g, or t
  misc_feature (1479)..(1479): n is a, c, g, or t
  misc_feature (1504)..(1504): n is a, c, g, or t
ttccccggtgcgtctatatcagtgcagacggtccgatggagcggcgtgggcacgcatatgtggtggccatcctagcccccagcntccatttgttccggtgtatgtgttggaattggcggataacattcccacaggaacagctgtacatgattcggatttatacggctcctttagggaattggcctcggagcccaggattcggcacgaggggaggggtggtaaagaacttgctgaaaatacncacatttagaaaaggttggctcttacccatgggatgtggccttcgcaacgttgactgtctttagctttctaatagaagtttaagaaaagtttccgtttgcacaagaaaataacgcttgggcattaaatgaatgcctttatagatagtcacttgtttctacaattcagtatttgatgtggtcgtgtaaatatgtacaatattgtaaatacataaaaaatatacaaatttttggctgctgtgaagatgtaattttatcttttaacatttataattatatgaggaaatttgacctcagtgatcacgagaagaaagccatgaccgaccaatatgttgacatactgatcctctactctgagtggggctaaataagttattttctctgaccgcctactggaaatatttttaagtggaaccaaaataggcatccttacaaatcaggaagactgacttgacacgtttgtaaatggtagaacggtggctactgtgagtggggagcagaaccgcaccactgttatactgggataacaatttttttgagaaggataaagtggcattattttattttacaaggtgcccagatcccagttatccttgtatccatgtaatttcagatgaattattaagcaaacattttaaagtgaattcattattaaaaactattcatttttttcctttggccataaatgtgtaattgtcattaaaattctaaggtcatttcaactgttttaagctgtatatttctttaattctgcttactatttcatggaaaaaaataaatttctcaattttaaacctcttgccgaattcttnnnnnnnnnnnnnnnnnnnnnnnnnnnnnnnnnnnnnnnnnnnnnnnnnnnnnnnnnnnnnnnnnnnnnnnnnnnnnnnnnnnnnnnnnnnnnnnnnnnnnnnnnnnnnnnnnnnnnnnnnnnnnnnnnnnnnnnnnnnnnnnnnnnnnnnnnnnnnnnnnnnnnnnnnnnnnnnnnnnnnnnnnnnnnnnnnnnnnnnnnnnnnnnnnnnnnnnnnnnnnnnnnnnnnnnnnnnnnnnnnnnnnnnnnnnnnnnnnnnnnnnnnnnnnnnnnnnnnnnnnnnnnnnnnnnnnnnnnnnnnnnnnnnnnnnnnnnnnnnnnnnnnnnnnnnnnnnnnnnnnnnnnnnnnnnnnnnnnnnnnnnnnnnnnnnnnnnnnnnnnnnnnnnnnnnnnnnnnnnnnnnnnnnnaacanaagggcagancgtaanagggcgcgtgctggcgttttcatangctcgccccctg

SEQ ID NO: 68671 - DNA, 689 bp, Homo Sapiens
atctggaattctaaagcccctgctccagtaacatatggatcattattattgtactagtctcatgtttaaatgggattatataatgataacagtttaaagaaaatcataatcttatatttttaatgtggatgcatataacctgtgagtgaaaaatcactgaatgatttaattgtaaaagtagtcttatgtggtgtttgtagtctgatagagcttgaaaggacattttaaaagctaatgtctccaattttgttaaccttcgattttatgccagtataattcagaacatagaaaagtaatgattcacttgggctcattttagactggtcctgggtcaccctgccacacttgtttcctagtgtttctgtggcagacattgctaatcaattacagcccttttctgtactgagccttggataaagggtcaggctcctttttagttcagagattcaggcagccactcccagtgggttgtagataatgtgcaagataaaaactattttctcttccaaatctaagtactaagctcctagtataaggtgttgttacagaataccagagaccatgttagagacaactacatctcttcaaaaaacagccaacagagacaaaggaaaagtgtttaaatagtaagctgttcttcttaatcagaactatcctattgactaataaataatctgcataattctaaa

SEQ ID NO: 68672 - DNA, 565 bp, Homo Sapiens
ttttataatcaaattgagtattaatctttaatgcattgggttttctcatttgtaaaaagacatgaatgaagttttgaggttcgtgagatttcatcttttcttgaatggtcacttaaagtccaacttgacaatgaactgctctgaaaacataatatgatatataattgcagaagcaggtagagtataaagatgatgactagatggtttctgaagaaatcaagagaatggtaagaaagtgagagtgacagctttaaggagatatatactacatgtgactaaaataagcttaaatgatactctctactcacagagtgccttttgaatttttaccagaattcattcattaattttaacttaataagacacagcaagagcagtattaggtctaaattacctttaaaaatttggctgcagacattaaatgattacaaaacactatgatcatcttctgaaggtattctacacatcttaatatggctactgacatcctaagcaaaatgtcaaagtggcagattaacagctttctcatgaactactctagacagagatacacacctttagtgat

SEQ ID NO: 68673 - DNA, 758 bp, Homo Sapiens
ggtgaactcccttgagcagcgctataagggactttgcactttaaaaaggggatgcctgtcagtaaatcccctgtgcattgactagaactggggggctgcgcccgctccctccttaatcctagatgatttgctcatgaaatagaggtgggggacgaccgcatgcactctgggaggtgcagccctaaggggtggactccagatctccctgcaagagacagcttggcttggctttggctgttggggaggagtccctgccatcccggtgagcctggggctgttgcttagggtcttctgggtggacacgtggagaaagagaaggcaaacgttggaacactaggaaaagctagaaattcagacaacacacatggatccccttaaaacatgtaaatgtgtcagaacacggttgacctgccgccttcttgaacctggtggcccccgttggaactatcagtggcgtctcccatgcacacgccctctgctttctctttcctagactcgcggtgctcacatccagacattaccttgttggtagcccccaagtggcgtgcagtgacaccagtatcttctctgttgcatttttgcaatcttgtgtcccgctcggtgatgttctacaaactctgttttaaggttgagaaagtttcaagggtgaagatctcaaaacagtgctaaaatcaaaggtgtttgctgtgaagaaaaacatgtgtatatattgcaccttgagttgtcagaaggtagaaactgaaataaactaactttaa

SEQ ID NO: 68674 - DNA, 1268 bp, Homo Sapiens
ccctcccgccccttcccactcaccccggcagacgccggggacagaggcctgcccgggcgcggtcagccccggccctgtggctcggagtgctgcccccgtgccccctggtctctggtccggacactcctagagaacgcagccctagagcctgcctggagcgtttctagcaagtgagagagatgggagctcctctcctggagggttgcaggtggaactcagtcattagactcctcctccaaaggccccctacgccaatcaagggcaaaaagtctacatactttcatcctgactctgccccctgctggctcttctgcccaattggaggaaagcaaccggtggatcctcaaacaacactggtgtgacctgagggcagaaaggttctgcccgggaaggtcaccagcaccaacaccacggtagtgcctgaaatttcaccattgctgtcaagttcctttgggttaagcattaccactcaggcatttgactgaagatgcagctcactaccccattctctctttacgcttagctatcagcttttcaaagtgggttattctggagtttatgcttggagagcacacctatcttagtggttccccaccgaagtggactggcccctgggtcagtctggtgggaggacggtgcaacccaaggactgagggactctgaagcctctgggaaatgagaaggcagccaccagcgaatgctaggtctcggactaagcctacctgctctccaagtctcagtggcttcatctgtcaagtgggatctgtcacaccagccatacttatctctctgtgctgtggaagcaacaggaatcaagagctgccctccttgtccacccacctatgtgccaactgttgtaactaggctcagagatgtgcacccatgggctctgacagaaagcagatacctcaccctgctacacatacaggatttgaactcagatctgtctgataggaatgtgaaagcacggactcttactgctaacttttgtgtatcgtaaccagccagatcctcttggttatttgtttaccacttgtattattaatgccattatccctgaatcccccttgccaccccaccctccctggagtgtggctgaggaggcctccatctcatgtatcatctggataggagcctgctggtcacagcctcctctgtctgcccttcaccccagtggccactcagcttcctacccacacctctgccagaagatcccctcaggactgcaacaggcttgtgcaacaataaatgttggcttggattggaaa

SEQ ID NO: 68675 - DNA, 487 bp, Homo Sapiens
ttgcatttgcacagtatacacaaaagaatatggggttgtaatgatcctgaatagctcaaaaaaggttttagcatggtcaaacaggcttatggtttaaaatgtgttattctcttctttgggaattagctaaatgatgcaataaacctgttttgttttagaatgtctaggaattaaacactttatgtttacagaattgagctgcagaaagtgcaagacatgccaatttgagacacacggtcttctaagactgaaggataaatttaatgcatttcagaaactaaacatcacagcaagctctatctctgagctataatttgtttttaatgcaaagacactagtttgataatatatactgtaatcctgaaacatttgtgttacttacctttggaggtagaaattataccaataaattattgcaccgttagtattagattctgtgtaccttggaagttatgtcattaatataggctggttcatcaaataaagc

SEQ ID NO: 68676 - DNA, 867 bp, Homo Sapiens
  misc_feature (143)..(163): n is a, c, g, or t
gggacttggaaaatgtggtatattctaagtcaagatgctatgaagttgttatagtttaagggacattcttaagaaggaattacttaagtacattactcttctcatttcaaggacatgaaaaagtaaaggatggtctggcactnnnnnnnnnnnnnnnnnnnnngacttgtactgaatatatgtactttgaagatttacatctataactagaaagtatgctaatccgaggtctggttattaggccagattcttgttcagttattttttaaactaatgttgcctcctttttagtaagattctacgaaagttttttaactattaaagttatttcttaaggggtagctcttatacttcctctgctctctttttcagtttccataaaaagctgttttcttagctattactccaaataaagttctttggtttgcttaaaaagtagtgtaatgcagttgttttctctccgctaacctgagtgtccacagtagatatcgagacagctttaggaaggtgacggtcatgggtaagtgacggctgtgcctgtcatcttcagattcttcaaatactgcaaactatgaaacatgttaagaccaatataaacccaaagatgtgagttgattatactttaataattacattcataaaaagtttactatcttcaatgccaaaaaagtcttaacctataaatgattatatacaatcttagaaaatgtgcttaacagttatggcttctttatttctatgaggaaagattagtaagaaacttaaaattaacatccttttaagattttctgttccattttaatgtattttaggcatttagaactagcctggcataatgaagaaagaaataaaagaattaaagataaa

SEQ ID NO: 68677 - DNA, 1474 bp, Homo Sapiens
  misc_feature (953)..(1096): n is a, c, g, or t
  misc_feature (1146)..(1160): n is a, c, g, or t
  misc_feature (1186)..(1194): n is a, c, g, or t
  misc_feature (1360)..(1368): n is a, c, g, or t
atttcggcacgaaggctcgacacctggactagccgggttgtatttggaaacgcggagtgacgtttttccgtgctgtgtaggggctaacaatggacacccagaaggacgttcaacctccaaagcagcaaccaatgatatatatctgtggagagtgtcacacagaaaatgaaataaaatctagggatccaatcagatgcagagaatgtggatacagaataatgtacaagaaaaggactaaaagattggtcgtttttgatgctcgatgaatgctgggaattcagaggaatgtcttcacttatacttggatttgctctcttcccatttctgattgttgtatagctttcgattttgcttacagtagttcccccttatcttcgggagatacattccaaggcccccagtgaactcctgaaacctcaaacagtaccaaacctttatacactgttttttccatatatatatacctatgataaagtataatgtataaattaagcatagcaagagattaataataatgtaatagaacaatgataacatactataataaaagttatgtgaatgtggttggtctctcttgctttcaaaatatcttcttgtacagtactcacctattttagaatgtggttgactacaggtaaccaaaaccacagaaagggaaactttggatgaggggggcactactgtacttaggaatacaactatatacatatgattttatttttaagaccatattatatttgggtatctactaatattttgtataaagcaattttttgttccattacgtgactttttgttttattgtatatgtaatttaacacacaataaagggtaaagttgcttccccaaaccacacttttaatcaaaacctagaatcatctgcagtccttgttaaaaatgcaggtttctagaaccctctgaagttctgattaaataaatttattgcaaaccannnnnnnnnnnnnnnnnnnnnnnnnnnnnnnnnnnnnnnnnnnnnnnnnnnnnnnnnnnnnnnnnnnnnnnnnnnnnnnnnnnnnnnnnnnnnnnnnnnnnnnnnnnnnnnnnnnnnnnnnnnnnnnnnnnnnnnnnnnnnnnngaagagggagccacgcggcgtcggaaccaccaccccacaataaaacaggnnnnnnnnnnnnnnngtgcgctgcggcgccgcgcgggcgcnnnnnnnnnttaataaaaagccgtcggaggcgggggggccccccaagaaagaagaagagaccagcgcgacagtagtgaccccaacggaaacgacgaagaagaaaaaacgctaggtagatccccaaaaaaaagcgccgcgcgggcgaacccgcgggctttttaacaaaacacaacnnnnnnnnnctggcggcgcactaagaagaaactctaaccagagaggaaagaccgagggcgcaacgaaaaaaagaatataagcccccgccgcccggggcacctgaaataagtagga

SEQ ID NO: 68678 - DNA, 931 bp, Homo Sapiens
  misc_feature (123)..(449): n is a, c, g, or t
  misc_feature (816)..(850): n is a, c, g, or t
  misc_feature (894)..(894): n is a, c, g, or t
ataccataacaaaagtcacttaatggaacaaaaaattgctttatacaaaaatattagtagatacccaatataatatggtcttaaaaataaaatcatatgtatatagttgtattcctaagtacnnnnnnnnnnnnnnnnnnnnnnnnnnnnnnnnnnnnnnnnnnnnnnnnnnnnnnnnnnnnnnnnnnnnnnnnnnnnnnnnnnnnnnnnnnnnnnnnnnnnnnnnnnnnnnnnnnnnnnnnnnnnnnnnnnnnnnnnnnnnnnnnnnnnnnnnnnnnnnnnnnnnnnnnnnnnnnnnnnnnnnnnnnnnnnnnnnnnnnnnnnnnnnnnnnnnnnnnnnnnnnnnnnnnnnnnnnnnnnnnnnnnnnnnnnnnnnnnnnnnnnnnnnnnnnnnnnnnnnnnnnnnnnnnnnnnnnnnnnnnnnnnnnnnnnnnnnnnnnnnnnnnnnntaagcaaaatcgaaagctatacaacaatcagaaatgggaagagagcaaatccaagtataagtgaagacattcctctgaattcccagcattcatcgagcatcaaaaacgaccaatcttttagtccttttcttgtacattattctgtatccacattctctgcatctgattggatccctagattttatttcattttctgtgtgacactctccacagatatatatcattggttgctgctttggaggttgaacgtccttctgggtgtccattgttagcccctacacagcacggaaaaactcactccgcgtttccaaatacccccggccgtaatggccgaattcccgggcatatgtccggtaccgtcgactgnnnnnnnnnnnnnnnnnnnnnnnnnnnnnnnnnnncggccgcttcctcgctcactacttcgctgcgctcggtcgttcgnctgtgacgagtagcgccctatagtgactatacagtct

SEQ ID NO: 68679 - DNA, 1057 bp, Homo Sapiens
  misc_feature (84)..(118): n is a, c, g, or t
  misc_feature (525)..(825): n is a, c, g, or t
ggaatctataactcactatagggcgctcccgcgtcattttctgaacgaccgagcgcagcgagtattgagcgaggaagcggccgnnnnnnnnnnnnnnnnnnnnnnnnnnnnnnnnnnncagtcgacggtaccggacatatgcccgggaattcggccattacggccggggagcgccggaagttggtctcgacacctggactagccgggttgtatttggaaacgcggagtgagtttttccgtgctgtgtaggggctaacaatggacacccagaaggacgttcaacctccaaagcagcaaccaatgatatatatctgtggagagtgtcacacagaaaatgaaataaaatctagggatccaatcagatgcagagaatgtggatacagaataatgtacaagaaaaggactaaaagattggtcgtttttgatgctcgatgaatgctgggaattcagaggaatgtcttcacttatacttggatttgctctcttcccatttctgattgttgtatagctttcgattttgcttannnnnnnnnnnnnnnnnnnnnnnnnnnnnnnnnnnnnnnnnnnnnnnnnnnnnnnnnnnnnnnnnnnnnnnnnnnnnnnnnnnnnnnnnnnnnnnnnnnnnnnnnnnnnnnnnnnnnnnnnnnnnnnnnnnnnnnnnnnnnnnnnnnnnnnnnnnnnnnnnnnnnnnnnnnnnnnnnnnnnnnnnnnnnnnnnnnnnnnnnnnnnnnnnnnnnnnnnnnnnnnnnnnnnnnnnnnnnnnnnnnnnnnnnnnnnnnnnnnnnnnnnnnnnnnnnnnnnnnnnnnnnnnnnnnnnnnnnnnnnggaaactttggattgaggggcgcactactggtacttaggaatacaactatatacgtattgattctatttttaagaccatattatcattgggtatcctaactaatatttgggcgttaacagcacatttttgggtgcccataacggtgactttgggttacatggtactggtcctttacccgcgacataaggggagcagttggttcccaaaacccagggtttatccaaacctaaa

SEQ ID NO: 68680 - DNA, 922 bp, Homo Sapiens
  misc_feature (111)..(432): n is a, c, g, or t
  misc_feature (813)..(847): n is a, c, g, or t
gggaacaaaaaaattggctttatacaaaatatttagtagatacccaaatataatatggtcttaaaaattaaaatcatatgtatatagttgtattcctaagtacagtagtgnnnnnnnnnnnnnnnnnnnnnnnnnnnnnnnnnnnnnnnnnnnnnnnnnnnnnnnnnnnnnnnnnnnnnnnnnnnnnnnnnnnnnnnnnnnnnnnnnnnnnnnnnnnnnnnnnnnnnnnnnnnnnnnnnnnnnnnnnnnnnnnnnnnnnnnnnnnnnnnnnnnnnnnnnnnnnnnnnnnnnnnnnnnnnnnnnnnnnnnnnnnnnnnnnnnnnnnnnnnnnnnnnnnnnnnnnnnnnnnnnnnnnnnnnnnnnnnnnnnnnnnnnnnnnnnnnnnnnnnnnnnnnnnnnnnnnnnnnnnnnnnnnnnnnnnnnnnnnnnnnntaagcaaaatcgaaagctatacaacaatcagaaatgggaagagagcaaatccaagtataagtgaagacattcctctgaattcccagcattcatcgagcatcaaaaacgaccaatcttttagtccttttcttgtacattattctgtatccacattctctgcatctgattggatccctagattttatttcattttctgtgtgacactctccacagatatatatcattggttgctgctttggaggttgaacgtccttctgggtgtccattgttagcccctacacagcacggaaaaactcactccgcgtttccaaatacaacccggctagtccccccggccgtaatggccgaattcccgggcatatgtccggtaccgtcgactgnnnnnnnnnnnnnnnnnnnnnnnnnnnnnnnnnnncggccgcttcctcgctcaactactcgctgcgctcgtcgttcggcttcaagagctagcgccctataggtgattata

SEQ ID NO: 68681 - DNA, 706 bp, Homo Sapiens
  misc_feature (54)..(375): n is a, c, g, or t
ggtcttaaaaataaaaatcatatgtatatagttgtattcctaagtacagtagtnnnnnnnnnnnnnnnnnnnnnnnnnnnnnnnnnnnnnnnnnnnnnnnnnnnnnnnnnnnnnnnnnnnnnnnnnnnnnnnnnnnnnnnnnnnnnnnnnnnnnnnnnnnnnnnnnnnnnnnnnnnnnnnnnnnnnnnnnnnnnnnnnnnnnnnnnnnnnnnnnnnnnnnnnnnnnnnnnnnnnnnnnnnnnnnnnnnnnnnnnnnnnnnnnnnnnnnnnnnnnnnnnnnnnnnnnnnnnnnnnnnnnnnnnnnnnnnnnnnnnnnnnnnnnnnnnnnnnnnnnnnnnnnnnnnnnnnnnnnnnnnnnnnnnnnnnnnnnnnnnntaagcaaaatcgaaagctatacaacaatcagaaatgggaagagagcaaatccaagtataagtgaagacattcctctgaattcccagcattcatcgagcatcaaaaacgaccaatcttttagtccttttcttgtacattattctgtatccacattctctgcatctgattggatccctagattttatttcattttctgtgtgacactctccacagatatatatcattggttgctgctttggaggttgaacgtccttctgggtgtccattgttagcccctacacagcacggaaaaactcactccgcgtttccaaatacaacccggctagtccag

SEQ ID NO: 68682 - DNA, 489 bp, Homo Sapiens
gcacgagggccctgttaaacttggtgcccattaacagtggttacactgatcatagtgcctgttaatgtagttttagatattggagcttttttaagactagatttggttttgagttacatttttaagaatgtgggaagatatttaagtttaatgtagtcctagtgctcttgaaatggtgcccctttcatttggtacatgaattttttcaaatcatatcttcaagtactatagtattctcttacagaagaggagttttatagtctgatggtaaatgtcttcattttacctttttaattgaaatgtcaagtttcctgttacactatggaaaccaagaaacatcagacatcattgcgtgtacagaccttttgcatgggtgagtggatgaaatggagaacagagtgagtgctgtgaacggtgtgaaatagaagccaacttctagtatgctgtcttcatctctgcaataaactaaacgtaaataatgaaaaaaaa

SEQ ID NO: 68683 - DNA, 901 bp, Homo Sapiens
  misc_feature (611)..(611): n is a, c, g, or t
  misc_feature (637)..(681): n is a, c, g, or t
  misc_feature (705)..(717): n is a, c, g, or t
ggtaataagattcaaattaatgcaaagttgcaagaatgtagtaactctgatcagctacaaggaaaggaggaaagagtaaatgaagaaagtcatctaactgaaaaggaatatatagaacattgtaacacccctacaactgattctgattcatctatagcagttaaagcactacaaatagatagctttggtttagttacatgctttcaacaagagtctcttgatgttcctcaaatgatacttggaaaatctcagcaacctgagtcaaaaatgcaatctgaattaataaaagaaaaaagtgctacttgttcaaatgaggaaaaagataacttaaacgagtcagtaataactgaagagaaagaaacagatggagatcacctatcttcattactgaacaaaactacggttcacaatatacctggattcgacagcataaaagaaaccaatatgcaggatggtagtgtgcaggtcattaaagatcatgtgaccaattgtgcattcagttttcagaattctttgctatatgatttggattaattctatataattttggacttttaaatattaaggttaaaaaatacctgtatctaaaattgattctggtaactgttgtnctaaaaactaaaggtattaaagtatnnnnnnnnnnnnnnnnnnnnnnnnnnnnnnnnnnnnnnnnnnnnnctcatgggggaaattggagataannnnnnnnnnnnngcctctggagtttaaagtttccttatggagataagttttgtgattcctgtaatagatgtgtatgttttctatttgagagttaaaacatttgagagttaaaacatttagttttaatacaacctatgtatatatacttctgtgttaatttttgctttgtcattaataaaatttaaaaatattcact

SEQ ID NO: 68684 - DNA, 1699 bp, Homo Sapiens
cagtcgacggtaccggacatatgcccgggaattcggccattacggccgggggcggcattggagtcaagatggaggagtacgcgcgagagccttgcccatggcgaattgtggatgactgtggtggggcctttacgatgggtaccattggtggtggtatctttcaagcaatcaaaggttttcgcaattctccagtgggagtaaaccacagactacgagggagtttgacagctattaaaaccagggctccacagttaggaggtagctttgcagtttggggagggctgttttccatgattgactgtagtatggttcaagtcagaggaaaggaagatccctggaactccatcacaagtggtgccttaacgggagccatactggcagcaagaaatggaccagtggccatggttgggtcagccgcaatgggtggcattctcctagctttaattgaaggagctggtatcttgttgacaagatttgcctctgcacagtttcccaatggtcctcagtttgcagaagacccctcccagttgccttcaactcagttaccttcctcaccttttggagactatcgacaatatcagtaggacttctttcctaggatttctttaacagaacgagttgtggttcgagaaggatttcagaagatcaagttacagtctgtttttaaaaccataggtgggacagctatggccaataggctataaagagacatttagcacttttttctatttaaaggaacaagcggggaagggtgctaaaagataatacgtttatttattcacacttgaattgcatttgtgatcaaaataaatgtttaaatcgctaaaggaaaatacagtaagtgcttgaaagatgaaggaccaaaaggccaaaaaacagtgaaatatgatcatcatctccttgcggacttctctgcctggttttgtgtgttctgttattcaaacaataaaaagctggtggaacttactctttcttttaagataagttgtagacttcgatgtttcatgctcatgtacttcaaataatgcatgttttatagttagtccctcatcacttgaagtgacttctgagaattatgcagagtcaacatggatcatttcacagtgagatgctttatggattgaaggatatggtaaaatgtttatagtttactttgaaagtaaaatatactatgtcttggttttgaggatattggatacaaaactctcttcctttagggctactgagtcttgattcctgatcatcagaaatttcaccagaaacaacttgcttccaatatacccaattctatatgaagaattcatggagagtgtactggcactggaagagtttagtgtttcttgtatgcttgaaaataaagtatgtactgttttgaatgtgttccaagtcctctgcataaacgatgtattttggggtctggttgggcctggaaaatggatgagcacttcagaacaggtcattttcctgatattggaagtgacatgtggccctataggaggcatgatgttagttaattacacatttgcctacatctgtgggaaatggagaacaaagccatgtgggtactgtaaacacacgtttatcttttggcccaatgccatacatatggtaggcatttaattactgattgtgtttgaataatttgggaattttcgccctgtggtagaaatatacataaaataacacggattctaaaaaa

SEQ ID NO: 68685 - DNA, 588 bp, Homo Sapiens
aacaatgactctttataaacttgtatggggtctaaattatcccttgtaatatatatgtgtgtattcattccacagagaattagatgatccgcctccaggtaacctgctgggaatttcttgagattttggctccccttgaatggccgcatccaacttgttttgttagaacacccagcatcacagcgatggcagctctcttagattccccatacatccacgacctatatcatgtccaataaatcgtccacatcaccaccttcttcaaatacagctgctgtgtctccacttggtttgtctttgggggccagaaactgtaaatagaaagtcagttatcataccaaaatgatatttttgcccctttgaaagagggaacaatctgctagcattgccacagcaaaacctaaggcagcctgcttagcagtctcactgccaacggcccaaaagaaacatcatcctggcatacgctacttcatttggctttgggtgagaggcccagttttgaggttcaagtagtccatactaactcatcaccagagaaagtgctcacgaagagggaggaaagaacatggcttgtcgagacagtgtgta

SEQ ID NO: 68686 - DNA, 3431 bp, Homo Sapiens
ggcagtactctaacggttctcaggtagcgaggcctgggtggcgaattcggcacgagggtccaccggaagcgagttgcgacacggcaggttcccgcccggaagaagcgaccaaagcgcctgaggaccggcaacatggtgcggtcggggaataaggcagctgttgtgctgtgtatggacgtgggctttaccatgagtaactccattcctggtatagaatccccatttgaacaagcaaagaaggtgataaccatgtttgtacagcgacaggtgtttgctgagaacaaggatgagattgctttagtcctgtttggtacagatggcactgacaatcccctttctggtggggatcagtatcagaacatcacagtgcacagacatctgatgctaccagattttgatttgctggaggacattgaaagcaaaatccaaccaggttctcaacaggctgacttcctggatgcactaatcgtgagcatggatgtgattcaacatgaaacaataggaaagaagtttgagaagaggcatattgaaatattcactgacctcagcagccgattcagcaaaagtcagctggatattataattcatagcttgaagaaatgtgacatctccctgcaattcttcttgcctttctcacttggcaaggaagatggaagtggggacagaggagatggcccctttcgcttaggtggccatgggccttcctttccactaaaaggaattaccgaacagcaaaaagaaggtcttgagatagtgaaaatggtgatgatatctttagaaaggtgaagatgggttggatgaaatttattcattcagtgagagtctgagaaaactgtgcgtcttcaagaaaattgagaggcattccattcactggccctgccgactgaccattggctccaatttgtctataaggattgcagcctataaatcgattctacaggagagagttaaaaagacttggacagttgtggatgcaaaaaccctaaaaaaagaagatatacaaaaagaaacagtttattgcttaaatgatgatgatgaaactgaagttttaaaagaggatattattcaagggttccgctatggaagtgatatagttcctttctctaaagtggatgaggaacaaatgaaatataaatcggaggggaagtgcttctctgttttgggattttgtaaatcttctcaggttcagagaagattcttcatgggaaatcaagttctaaaggtctttgcagcaagagatgatgaggcagctgcagttgcactttcctccctgattcatgctttggatgacttagacatggtggccatagttcgatatgcttatgacaaaagagctaatcctcaagtcggcgtggcttttcctcatatcaagcataactatgagtgtttagtgtatgtgcagctgcctttcatggaagacttgcggcaatacatgttttcatccttgaaaaacagtaagaaatatgctcccaccgaggcacagttgaatgctgttgatgctttgattgactccatgagcttggcaaagaaagatgagaagacagacacccttgaagacttgtttccaaccaccaaaatcccaaatcctcgatttcagagattatttcagtgtctgctgcacagagctttacatccccgggagcctctacccccaattcagcagcatatttggaatatgctgaatcctcccgctgaggtgacaacgaaaagtcagattcctctctctaaaataaagaccctttttcctctgattgaagccaagaaaaaggatcaagtgactgctcaggaaattttccaagacaaccatgaagatggacctacagctaaaaaattaaagactgagcaagggggagcccacttcagcgtctccagtctggctgaaggcagtgtcacctctgttggaagtgtgaatcctgctgaaaacttccgtgttctagtgaaacagaagaaggccagctttgaggaagcgagtaaccagctcataaatcacatcgaacagtttttggatactaatgaaacaccgtattttatgaagagcatagactgcatccgagccttccgggaagaagccattaagttttcagaagagcagcgctttaacaacttcctgaaagcccttcaagagaaagtggaaattaaacaattaaatcatttctgggaaattgttgtccaggatggaattactctgatcaccaaagaggaagcctctggaagttctgtcacagctgaggaagccaaaaagtttctggcccccaaagacaaaccaagtggagacacagcagctgtatttgaagaaggtggtgatgtggacgatttattggacatgatataggtcgtggatgtatggggaatctaagagagctgccatcgctgtgatgctgggagttctaacaaaacaagttggatgcggccattcaaggggagccaaaatctcaagaaattcccagcaggttacctggaggcggatcatctaattctctgtggaatgaatacacacatatatattacaagggataatttagaccccatacaagtttataaagagtcattgttattttctggttggtgtattattttttctgtggtcttactgatctttgtatattacatacatgctttgaagtttctggaaagtagatcttttcttgacctagtatatcagtgacagttgcagcccttgtgatgtgattagtgtctcatgtggaaccatggcatggttattgatgagtttcttaaccctttccagagtcctcctttgcctgatcctccaacagctgtcacaacttgtgttgagcaagcagtagcatttgcttcctcccaacaagcagctgggttaggaaaaccatgggtaaggacggactcacttctctttttagttgaggccttctagttaccacattactctgcctctgtatataggtggttttctttaagtggggtgggaaggggagcacaatttcccttcatactccttttaagcagtgagttatggtggtggtctcatgaagaaaagaccttttggcccaatctctgccatatcagtgaacctttagaaactcaaaaactgagaaatttactacagtagttagaattatatcacttcactgttctctacttgcaagcctcaaagagagaaagtttcgttatattaaaacacttaggtaacttttcggtctttcccatttctacctaagtcagctttcatctttgtggatggtgtctcctttactaaataagaaaataacaaagcccttattctctttttttcttgtcctcattcttgccttgagttccagttcctctttggtgtacagacttcttggtacccagtcacctctgtcttcagcaccctcataagtcgtcactaatacacagttttgtacatgtaacattaaaggcataaatgactcatctctctgtgaattgctgct

SEQ ID NO: 68687 - DNA, 783 bp, Homo Sapiens
  misc_feature (601)..(601): n is a, c, g, or t
  misc_feature (700)..(700): n is a, c, g, or t
aggttcccgcccggaagaagcgaccaaagcgcctgaggaccggcaacatggtgcggtcggggaataaggcagctgttgtgctgtgtatggacgtgggctttaccatgagtaactccattcctggtatagaatccccatttgaacaagcaaagaaggtgataaccatgtttgtacagcgacaggtgtttgctgagaacaaggatgagattgctttagtcctgtttggtacagatggcactgacaatcccctttctggtggggatcagtatcagaacatcacagtgcacagacatctgatgctaccagattttgatttgctggaggacattgaaagcaaaatccaaccaggttctcaacaggctgacttcctggatgcactaatcgtgagcatggatgtgattcaacatgaaacaataggaaagaagtttgagaagaggcatattgaaatattcactgacctcagcagccgattcagcaaaagtcagctggatattataattcatagcttgaagaaatgtgacatctccctgcaattcttcttgcctttctcacttggcaaggaagatggaagtggggacagaagagatggcccctttcgctntaggtggccatgggccttcctttccactaaaagggaattaccgaacagcaaaaagaaaggccttgagatagtgaaaaatgggggatggatatctttaanaaaggtggaaaaatggggttgggatgaaaatttttattcatttcaagtgaagagtcctgaagaaaaactgtggccgtcctttc

SEQ ID NO: 68688 - DNA, 993 bp, Homo Sapiens
cgtttcctcactgccccatggcacccacagccagtgcccgagcctgctgcagccccgaaccggcagagcaagcggctctgctacctcagccacgtagctgatggcatccttcaggttcagctcgtggaagacattcaggatccggtctcgagacttctgggccgaccgtctcatgaggaccctgctgaggaacttcctgtcgaagtgggaccacctgtagggacagaccttgggtgtgagcctcaggtgacaggcgccctagagcccgccggacgcgtggcccggccccttctctcctgaattttgtttgctatagtgaccctgtaggcgcgtttaaaatgagggaagcagcccctgccacacgcccaggccgtccgccgttctcccgcctgtcctgttggatggaggccgttagacgcatatgaaactgcatgccgcctcctccagagggtggctcaggacacgcctaacggaattagagtattcgctggttatccggatcagaagggacggtggcctggccggacttagaggaaactctggggcacaaggaggtgatgcctgtcacttggacatgggtgcagccgccagagccgccctccagggcacagggtgggcccgggtgagcttgtgtgctcacacctgggcaggccccgcggcagcaatggcagctctcctgtacaggctgagtttcagccacaccaagaagtcaaagctaaccgaggctgtgccttccgagacccccgggatggcccctgggaggccaaggagtcggggactgggtacccggagcagagtcactgtggccacggagaaccgcagctgagctttatgaagccacgtggccacacctcccggtgcctccaccccaagcaaacacagatcgctcagaaaatgggaacccagggcaaattgtatgtgctccttactgggtttattataagtgtcacatgttttttataataaaacataggtgatttcaccttaaaaaaa

SEQ ID NO: 68689 - DNA, 689 bp, Homo Sapiens
cagtaactataacggtcctaaggtagcgaggcctgggtggcgaattcggcacgaggagccagtgcccgagcctgctgcagccccgaccggcagagcaagcggctctgctacctcagccacgtagctgatggcatccttcaggttcagctcgtggaagacattcaggatccggtctcgagacttctgggccgaccgtctcatgaggaccctgctgaggaacttcctgtcgaagtgggaccacctgtagggacagaccttgggtgtgagcctcaggtgacaggcgccctagagcccgccggacgcgtggcccggccccttctctcctgaatttgtttgctatagtgaccctgtaggcgcgtttaaaatgagggaagcagcccctgccacacgcccaggccgtccgccgttctcccgcctgtcctgttggatggaggccgttagacgcatatgaaactgcatgccgcctcctccagagggtggctcaggacacggtgggtgtcaggcctggtcaggcaagggggctttggccacatgggggggcaccttcaggctgcacaggcaggaagggcaggggcggacagacaccctgagcccttagacttgtgggagccaagctgaccagagtgaggttttttttagcctaaccggaattagagtattcgctggttatccggatcagaagggacggt

SEQ ID NO: 68690 - DNA, 513 bp, Homo Sapiens
  misc_feature (354)..(398): n is a, c, g, or t
cagtggatgcttctgcacttggcctgcatgactaccatgacatcattaagcaccccatggacctcagcactgtcaagcggaagatggagaaccgtgattaccgggatgcacaggagtttgctgctgatgtacggcttatgttctccaactgctataagtacaatcccccagatcacgatgttgtggcaatggcacgaaagctacaggatgtatttgagttccgttatgccaagatgccagatgaaccactagaaccagggcctttaccagtctctactgccatgccccctggcttggccaaatcgtcttcagagtcctccagtgaggaaagtagcagtgaggagctcctctgannnnnnnnnnnnnnnnnnnnnnnnnnnnnnnnnnnnnnnnnnnnntgaaagctcagactcagaggaagaaagggctcatcgcttagcagaactacaggaacagcttcgggcagtatatgaacaactggctgctctgtcccagggtccaatatccaagccc

SEQ ID NO: 68691 - DNA, 2957 bp, Homo Sapiens
  misc_feature (2454)..(2469): n is a, c, g, or t
  misc_feature (2793)..(2817): n is a, c, g, or t
aaacttaggtaggtacgaggcctgggtggcgaatcggcacgaggcctcgtgccgcttgtatgagggctttgagagccccacaatggcttcggtgcctgctttgcaacttacccctgccaacccaccacccccggaggtgtccaatcccaaaaagccaggacgagttaccaaccagctgcaatacctacacaaggtagtgatgaaggctctgtggaaacatcagttcgcatggccattccggcagcctgtggatgctgtcaaactgggtctaccggattatcacaaaattataaaacagcctatggacatgggtactattaagaggagacttgaaaacaattattattgggctgcttcagagtgtatgcaagattttaataccatgttcaccaactgttacatttacaacaagcccactgatgatattgtcctaatggcacaaacgctggaaaagatattcctacagaaggttgcatcaatgccacaagaagaacaagagctggtagtgaccatccctaagaacagccacaagaagggggccaagttggcagcgctccagggcagtgttaccagtgcccatcaggtgcctgccgtctcttctgtgtcacacacagccctgtatactcctccacctgagatacctaccactgtcctcaacattccccacccatcagtcatttcctctccacttctcaagtccttgcactctgctggacccccgctccttgctgttactgcagctcctccagcccagccccttgccaagaaaaaaggcgtaaagcggaaagcagatactaccacccctacacctacagccatcttggctcctggttctccagctagccctcctgggagtcttgagcctaaggcagcacggcttccccctatgcgtagagagagtggtcgccccatcaagcccccacgcaaagacttgcctgactctcagcaacaacaccagagctctaagaaaggaaagctttcagaacagttaaaacattgcaatggcattttgaaggagttactctctaagaagcatgctgcctatgcttggcctttctataaaccagtggatgcttctgcacttggcctgcatgactaccatgacatcattaagcaccccatggacctcagcactgtcaagcggaagatggagaaccgtgattaccgggatgcacaggagtttgctgctgatgtacggcttatgttctccaactgctataagtacaatcccccagatcacgatgttgtggcaatggcacgaaagctacaggatgtatttgagttccgttatgccaagatgccagatgaaccactagaaccagggcctttaccagtctctactgccatgccccctggcttggccaaatcgtcttcagagtcctccagtgaggaaagtagcagtgagagctccctctgaggaagaggaggaggaagatgaggaggacgaggaggaagaagagagtgaaagctcagactcagaggaagaaagggctcatcgcttagcagaactacaggaacagcttcgggcagtacatgaacaactggctgctctgtcccagggtccaatatccaagcccaagaggaaacagagagaaaaaagagaaacaagaagaaacggaaggcagagaagcatcgaggccgagctggggccgatgaagatgacaaggggcctagggcaccccgcccacctcaacctaagaagtccaagaaagcaagtggcagtgggggtggcagtgctgctttaggcccttccggctttggaccttctggaggaagtggcaccaagctccccaaaaaggccacaaagacagccccacctgccctgcctacaggttatgattcagaggaggaggaagagagcaggcccatgagttacgatgagaagcggcagctgagcctggacatcaacaaattacctggggagaagctgggccgagttgtgcatataatccaagccagggagccctctttacgtgattcaaacccagaagagattgagattgattttgaaacactcaagccatccacacttagagagcttgagcgctatgtcctttcctgcctacgtaagaaaccccggaagccctacaccattaagaagcctgtgggaaagacaaaggaggaactggctttggagaaaaagcgggaattagaaaagcggttacaagatgtcagcggacagctcaattctactaaaaagccccccaagaaagcgaatgagaaaacagagtcatcctctgcacagcaagtagcagtgtcacgccttagcgcttccagctccagctcagattccagctcctcctcttcctcgtcgtcgtcttcagacaccagtgattcagactcaggctaaggggtcaggccagatggggcaggaaggctccgcaggaccggacccctagaccaccctgccccacctgccccttccccctttgctgtgacacttcttcatctcannnnnnnnnnnnnnnntctaggagagctggctctgcagtgggggagggatgcagggacatttactgaaggagggacatggacaaaacaacattgaattcccagccccattggggagtgatctcttggacacagagcccccattcaaaatggggcagggcaagggtgggagtgtgcaaagccctgatctggagttacctgaggccatagctgccctattcacttctaagggccctgttttgagattgtttgttctaatttattttaagctaggtaaggctggggggagggtggggccgtggtcccctcagcctccatggggagggaagaagggggagctcnnnnnnnnnnnnnnnnnnnnnnnnnctactctgttttccctttttccttccgctccatttggggccctgggggtttcagtcatctccccatttggtcccctggactgtctttgttgattctaacttgtaaataaagaaaatattattcaagttttgagttacctt

SEQ ID NO: 68692 - DNA, 1488 bp, Homo Sapiens
ataggaaaaattgatgggacacttgggtgttgtattgtatgagtatttgggtgaagagtaccctgaagtattgggcagcattcttggagcactgaaggccattgtaaatgtcataggtatgcataagatgactccaccaattaaagatctgctgcctagactcacccccatcttaaagaacagacatgaaaaagtacaagagaattgtattgatcttgttggtcgtattgctgacaggggagctgaatatgtatctgcaagagagtggatgaggatttgctttgagcttttagagctcttaaaagcccacaaaaaggctattcgtagagccacagtcaacacatttggttatattgcaaaggccattggccctcatgatgtattggctacacttctgaacaacctcaaagttcaagaaaggcagaacagagtttgtaccactgtagcaatagctattgttgcagaaacatgttcaccctttacagtactccctgccttaatgaatgaatacagagttcctgaactgaatgttcaaaatggagtgttaaaatcgctttccttcttgtttgaatatattggtgaaatgggaaaagactacatttatgccgtaacaccgttacttgaagatgctttaatggatagagaccttgtacacagacagacggctagtgcagtggtacagcacatgtcacttggggtttatggatttggttgtgaagattcgctgaatcacttgttgaactatgtatggcccaatgtgtttgagacatctcctcatgtaattcaggcagttatgggagccctagagggcctgagagttgctattggaccatgtagaatgttgcaatattgtttacagggtctgtttcacccagcccggaaagtcagagatgtatattggaaaatttacaactccatctacattggttcccaggacgctctcatagcacattacccaagaatctacaacgatgataagaacacctatattcgttatgaacttgactatatcttataattttattgtttattttgtgtttaatgcacagctacttcacaccttaaacttgctttgatttggtgatgtaaacttttaaacattgcagatcagtgtagaactggtcatagaggaagagctagaaatccagtagcatgatttttaaataacctgtctttgtttttgatgttaaacagtaaatgccagtagtgaccaagaacacagtgattatatacactatactggagggatttcatttttaattcatctttatgaagatttagaactcattccttgtgtttaaagggaatgtttaattgagaaataaacatttgtgtacaaaatgctaatttgtgtgtgttttttgaacatgacttgtaaaatgcggaactttgataaagtattggtttatgtggaataagtggcttaatttcattttctgtcacatggtttatagaaagtagttagctgaataaaaactatataaagtg

SEQ ID NO: 68693 - DNA, 1502 bp, Homo Sapiens
  misc_feature (41)..(75): n is a, c, g, or t
  misc_feature (136)..(392): n is a, c, g, or t
  misc_feature (1148)..(1148): n is a, c, g, or t
  misc_feature (1164)..(1164): n is a, c, g, or t
  misc_feature (1257)..(1333): n is a, c, g, or t
tgaaccgagcgcacgacagttatgagcgaggaagcggccgnnnnnnnnnnnnnnnnnnnnnnnnnnnnnnnnnnncagtcgacggtaccggacatatgcccgggaattcggccattacggccgggagatggagttnnnnnnnnnnnnnnnnnnnnnnnnnnnnnnnnnnnnnnnnnnnnnnnnnnnnnnnnnnnnnnnnnnnnnnnnnnnnnnnnnnnnnnnnnnnnnnnnnnnnnnnnnnnnnnnnnnnnnnnnnnnnnnnnnnnnnnnnnnnnnnnnnnnnnnnnnnnnnnnnnnnnnnnnnnnnnnnnnnnnnnnnnnnnnnnnnnnnnnnnnnnnnnnnnnnnnnnnnnnnnnnnnnnnnnnnnnnnnnnnnnnnnnnnnnnnnnnnntgagccactgtgcccggcctataattttggatagatgatttggaattattttccagagataaaattttaaatgttcccattatatcactgatttatttctgcaaattgaataaattcttaattttctgcatgcacataatacaaaaggtattttcatagttttggatttataccaaatgaaaaggattctcttgatgagcacctttaactgatttttctgttaaagttttaacaatttgttcttgggaagtcagttcgtgaaggcaagtttgtcagtattttcacaaaactattcagctgaatccagaaagtgaaacagcaagaatttgcattgtaaaattgtgttataaaattggactttgaaatttcaaaaataagaaaaattttcatgtgtatttatactaaataccgttttaggaaactaggatcagggtgtttctgttggcgttggcattaactagctggatgtaaatttgaaaagccactcaagcagcttcctagtctagaaagtcagaggtttagattagatttccgacatcccttccatttctgacctgtagttcttgtctggaattctgctttgttataaactattgttctaaggagtttgttgtgatagcacatagttcattttgtaaagattccctgcgtataaagtgatgccctacatatgtgattttgtattaaaagtatataggatcattattttattttgaaaaatttaaatacagaaaagtataaaatataagtaccatnccgcccagaaataacnatgtgttaatgttttgtcatatgtgctttatattttttgaaataaagtaaagtcaactagtatttatagtaaataagttacatacacataagnnnnnnnnnnnnnnnnnnnnnnnnnnnnnnnnnnnnnnnnnnnnnnnnnnnnnnnnnnnnnnnnnnnnnnnnnnnnnctaatgatatgatagattaactggctgttgtcacactagcaagtggcaaaacaagggattaggatcttagtctcttcaactgttagattctatacttccatcctgtgttgactttgttaatggattggataatgtgagatcactctgatgtaaataaagtatcctatat

SEQ ID NO: 68694 - DNA, 585 bp, Homo Sapiens
gttaatttcacagaaggagtgtcctgacaaggaaggattgctctgcagtggatggcctggcactgactaaagagatatgggtgttccttcccagaagtctgttcaggagtgagccactggagagcagaagattttggagaggtctcaaaagaaatttctataacaatttcttgatttttgctcaaagcgataggtagagagatttccattggcgatcccttgtaactttgtctttctccaagagcatatttgacttcttgtccattgatcactactttttctattgtaaggtcctttgtatccaaaaaccaagctgcgcagatttgtcctcctgagactggaccgtgagagcaagcaagtcccggtcagcgtccggcgagtaaagtcgacgctgcagcgcaggtgcaggtgcttggtccggcagacggaagccggagaggccaacgaacaggtatccactatctcgggcatggctctgggggatcacacagcacagcgacctacagcccaacgctcagctaccagactcgtcgatagagaacctgaggagaagcgagagaggtaaagaagaggaggagggattcg

SEQ ID NO: 68695 - DNA, 2180 bp, Homo Sapiens
cagtcgacggtaccggacatatgcccgggaattcggccattacggccgggggagtctggtagctgagcgttgggctgtaggtcgctgtgctgtgtgatcccccagagccatgcccgagatagtggatacctgttcgttggcctctccggcttccgtctgccggaccaagcacctgcacctgcgctgcagcgtcgactttactcgccggacgctgaccgggactgctgctctcacggtccagtctcaggaggacaatctgcgcagcctggttttggatacaaaggaccttacaatagaaaaagtagtgatcaatggacaagaagtcaaatatgctcttggagaaagacaaagttacaagggatcgccaatggaaatctctcttcctatcgctttgagcaaaaatcaagaaattgttatagaaatttcttttgagacctctccaaaatcttctgctctccagtggctcactcctgaacagacttctgggaaggaacacccatatctctttagtcagtgccaggccatccactgcagagcaatccttccttgtcaggacactccttctgtgaaattaacctatactgcagaggtgtctgtccctaaagaactggtggcacttatgagtgctattcgtgatggagaaacacctgacccagaagacccaagcaggaaaatatacaaattcatccaaaaagttccaataccctgctacctgattgctttagttgttggagctttagaaagcaggcaaattggcccaagaactttggtgtggtctgagaaagagcaggtggaaaagtctgcttatgagttttctgagactgaatctatgcttaaaatagcagaagatctgggaggaccgtatgtatggggacagtatgacctattggtcctgccaccatccttcccttatgggggcatgggagaatccttgccttacttttgtaactcctactctactggcaggcgacaagtcactctccaatgtcattgcacatgaaatatctcatagctggacagggaatctagtgaccaacaaaacttgggatcacttttggttaaatgagggacatactgtgtacttggaacgccacatttgcggacgattgtttggtgaaaagttcagacattttaatgctctgggaggatggggagaactacagaattcggtaaagacatttggggagacacatcctttcaccaaacttgtggttgatctgacagatatagaccctgatgtagcttattcttcagttccctatgagaagggctttgctttacttttttaccttgaacaactgcttggaggaccagagattttcctaggattcttaaaagcttatgttgagaagttttcctataagagcataactactgatgactggaaggatttcctgtattcctattttaaagataaggttgatgttctcaatcaagttgattggaatgcctggctctactctcctggactgcctcccataaagcccaattatgatatgactctgacaaatgcttgtattgccttaagtcaaagatggattactgccaaagaagatgatttaaattcattcaatgccacagacctgaaggatctctcttctcatcaattgaatgagtttttagcacagacgctccagagggcacctcttccattggggcacataaagcgaatgcaagaggtgtacaacttcaatgccattaacaattctgaaatacgattcagatggctgcggctctgcattcaatccaagtgggaggacgcaattcctttggcgctaaagatggcaactgaacaaggaagaatgaagtttacccggcccttattcaaggatcttgctgcctttgacaaatcccatgatcaagctgtccgaacctaccaagagcacaaagcaagcatgcatcccgtgactgcaatgctggtggggaaagacttaaaagtggattaaagacctgcgtattgatgattttagagatttctcttttttaaatggaattcgtaaagaaatataaaacttcagctcacaattaaaactgtctttttagttttggctttttattgttttgttggtgattttactgaaataaagttgagctacttcttcttatagtggcatattctttgtaaattttaacaaggtttaatcttctgatttacaaattaacgcattttgaattagctt

SEQ ID NO: 68696 - DNA, 546 bp, Homo Sapiens
tttaaggcaagagaggtttagagcaaagtctaacaaaaagattaatactaccagattacatattgcaactattccttaaataccactataagtatttatatagaagcagtcagtttgacaaggaattctcaagactcaagtatgtctcatactctgcattccctttctccatctttcaaaggagtttagttttctgctttcttccacagagacaagttaaaatgatgtacctgaatcgtatttcagaattgttaatggcattgaagttgtacacctcttgcattcgctttatgtgccccaatggaagaggtgcctaagagcaaaataaagaagtataccgtatcatttcaacaggattccttggaagaaaggagctggagagaaatgcatagccagattaaaatcctaaatattttataatatagaaataagtcagataaaaataaaagaaacaaattgcacactaagtaaattctgtgcaaacttattccagatgaggatattctactgggagcacagggataatttactttgtgaagtattcag

SEQ ID NO: 68697 - DNA, 1439 bp, Homo Sapiens
  misc_feature (552)..(564): n is a, c, g, or t
gacagaaaagagaattatttaattttattaaaaatctccaatttataaccaaaatatacaaccactacatttaaaatcagtttgtacactcacagttaaagtgctaagaaaaaacatttacaaaaactgacatcagtctactgtaaacaaaataaatctacaagagcagagtgcaaagcacatcagagaatgtgaaattcccagttcatgctctaaccaagtgcacttgccctgtacatcccaacaacagcaacttttccactcatttggaagtgaacaattttaataaacatataaaaaagaaacatgaagaactaatgccacaaaatacaagtctttagcataaacactttctaattagatgtttatatgataaatcaacattagacatttagaatcacctcagcaatttgattcagaataaagtttggaaaactaaactgctaagtgccagctatttaaaaatgacatattttttagaataatgaaaaggaatactttttctacctttatagctcttgaaaaattgtaacagtaaaatggggaaagacnnnnnnnnnnnnnaacaagcatggatagtattcttatgtaaaggtagtatcaatgagaaagagctggaagacagacctagctgtctgtcaggtagaatgagggtgaaggagatctaggatgcttcaggcattgcgcttgaacttaaaaaacaggatcagcaggccctgacttcataaggcccataaatacaaatgactagctccctttctcaaggtcattgaaaatatacagtagtttcagacatcacatgggtttgggcaaagggggcagatttccaagctaggtcacttaatggtatctcttgcctcaaaatagtcccatcaacactaatttaaattatttccacttttgttttaaagcttaagattctactcactgacattaatttgagctaacagcaatgtgtttgcttttaatgcagatttctctttaagagagataaaagggctatagtcactaacactttaatataaattagttaaagcaaatttctaacacttgagataggttatattttggaagtattgataagaatgactaggggatagaaggcaggtaaggaagttttggagaatgcagcatttgaggaataggtcacatgaagagggtatcatgagcatattgcctaggaagaagtgtaccaagcaattattgagagatcaaagtaacctttctccactataaaaatttatccaaaaccaagacacctggagtacctctatggggtgtactagattagcttttgttggctaatcttttacccttattattcataatattatttatatgatgagatgtagtctgaatttggaacaactctttttacaacctattaaatccggacgcgtgggtcgacgatatcccgggaattccggaccggtaccagc

SEQ ID NO: 68698 - DNA, 1312 bp, Homo Sapiens
  misc_feature (104)..(104): n is a, c, g, or t
  misc_feature (1171)..(1171): n is a, c, g, or t
cgatttgaatgatatgtgtgcgcatgccgatgcgatctctcttgattgacacacaccttaccatgctgagcacgacacgagaattatggctgctgatcgcatanttggcattgctctctgctgtctgtctaggcatatagcatcatgagtccagcagaaaatcttctagcatattcattctgatgttatagaatatgccttgaagtgcatctgtatcacagcagcaacacaacgagaattttcacacccaacctcttcctgaagcagatgctagagagtaccaaaacaacagccctccaaacaatgatgaccagtggaaaaacaatggagtcaccaaaacctgggacaggctcatgctccaggacaattgctgtggcgtaaatggtccatcagactggcaaaaatacacatctgccttccggactgagaataatgatgctgactatccctggcctcgtcaatgctgtgttatgaacaatcttaaagaacctctcaacctggaggcttgtaaactaggcgtgcctggtttttatcacaatcagggctgctatgaactgatctctggtccaatgaaccgacacgcctggggggttgcctggtttggatttgccattctctgctggactttttgggttctcctgggtaccatgttctactggagcagaattgaatattaagcataaagtgttgccaccatacctccttccccgagtgactctggatttggtgctggaaccagctctctcctaatattccacgtttgtgccccacactaacgtgtgtgtcttacattgccaagtcagatggtacggacttcctttaggatctcaggcttctgcagttctcatgactcctacttttcatcctagtctagcattctgcaacatttatatagactgttgaaaggagaatttgaaaaatgcataataactacttccatccctgcttatttttaatttgggaaaataaatacattcgaaggaacctgtgttatcacagtaacccagagctgtatttggctagcaatctgcctgtatctctcactattatctaaaagaaaccttccaatgcttctgttgatctcagtattgtcaggggaacagagaagttgggaaaagattactgaaatataccttttgcatttctttctagagtagctcccatatatggnagatgggtgattctcttgatgccaccttcagatccttttattctccagaataattcttaacagtggttcaaatttcctttcataccttgaaagtatgtgtttagtagcctcaattctcccattaattaaagtgtgggcctg

SEQ ID NO: 68699 - DNA, 1927 bp, Homo Sapiens
  misc_feature (27)..(27): n is a, c, g, or t
  misc_feature (106)..(106): n is a, c, g, or t
cccccggagaacagaagcctacagatnagaaaacccagtgatcagagaaacgggtgatatagcccaagggagctcctcactggaggaacagaggtgtctgcacctncccatgtacaacaaacgctccgggaaatggaaagccagttggcagcccacatgtggttacctcacaccagtcaaaagtgacagtggagagcactcccgatttggaaaaacaaccaaatgaaaatggtgtatctgttcagaatgaaaattttgaagaaattataaacttacccattggatctaaaccatccagattagatgtcaccaacagtgagagcccagaaattcctttgaatccaattttggcctttgatgatgaagggacacttgggcccctgcctcaggtagatggtgttcagacacagcagactgcagaagttatatgagtgtttcttctgaagaaccaaagctgaaatttaatgagaatttctacaattaatggaattcctttcctgctataaaggagcatcccctccacccgttttctagagttcttgaccatcattttgaaaagatttattaaaactagctaaagacaacagactggatagcttttctaataattttcatcaataggaaaaaagaaatacgtctcattcttcaatactttaaaatggctttttccagtgtgctccttcttagcaatcaatatttttctgcattctttaaaagacaagagaatttggttataaaagaaatgggctgactaggcatgatttttttggtcttaaaagcttaacatgtaaaattggcaaaaaaaattttttaccttttataatacttgaaaaataagtacctctttgttctacaagtagaatgaataggagaagagtttaagcctgtttttttaaaatattattgcaaagagctctatttgtagaagcaaattataggcagattaccaggttcttataaatacagcttgtacatggacattctgcaaacccagctgtcacatttttcttgcaactccttttgcaaaagcagactaaaatgttttaaaatgtgaaaaaacattattttttcaaagcaagaaaataatttactgccctcttacataatgtatttataaagtttttccagataaactaatcaaataaattagaataatgtgacaacattacaaatttaatttgttagctgcattccttctgatgttaccacgatagaatgttactgatgattcagggctatttctgaagtctgtatgttgctgctgtccccagtgatggtggacttatctttgccttacctgatcacaaattatgttggggaaaataaagatttaatatttctttaaatagaaaaagaatttggttttgctcgtttaagagcaatgagaaaatgatggaatgttgactgtgtttggcacacaggacacggaccttcatggaagtccttgctctgcgtggcatctgtcagcttttcacctttcattcttattcttcacttttgctgctgagcctagctgtacaaacttgcactttcatttgctaatataaattcagttttattttaccattttagagactactaatgattaaatgtagaaggagagggtgcacatgtttttatgtggagtgtttaaaagataaatttataccactgtaatgtgcagcttttattaaaagagaaattggttgaactgctaggttgaatgagagacttcatctattggactattttttttaatccaggcatatggtctttagtaatggcttgtaatttgtgaaaacattaatttgggggttttccctgttttcagttgtccatgtacacatagtcattatattagaaaagaaagctgttcaacaaacttgtttaatttgtttaaatcaacatagcatgaaacaccaaataaaatgtttgacatagttttaaa

SEQ ID NO: 68700 - DNA, 587 bp, Homo Sapiens
  misc_feature (187)..(187): n is a, c, g, or t
  misc_feature (467)..(467): n is a, c, g, or t
  misc_feature (533)..(533): n is a, c, g, or t
ggggccgcaccccaccctggccccggcccatgtcccgcaggatcgccccagcccagcagaggagggtgcggactggactgctggtgctcccgctttccacaccttctccatccgccacctcgcccccacctctgggcaccccctgggagacccgggcagcccgcctgtttgtcagaggcagacgcgnccttctgttttcagaaagaagaagaagctcgcgttcgtgaagaagcagagagggtccggcagaacgcagagaagcatttccagagagaagagcaagagcgcctggagagaaagaagcgaccttgaggagattatgaaaagaaccaggagaacagaagctacagataagaaaaccagtgatcagagaaacggtgatatagccaagggagctctcactggaggaacagaggtgtctgcacttccatgtacaacaaacgctccgggaaatggaaagccagttngcagcccacatgtggttacctcacaccagtcaaaagtgacagtgggagagcactcccgttttgggnaaacaacccaattgaaatggtgtatctgttcagaatgaaattttttagggattt

SEQ ID NO: 68701 - DNA, 875 bp, Homo Sapiens
  misc_feature (66)..(119): n is a, c, g, or t
  misc_feature (217)..(296): n is a, c, g, or t
  misc_feature (555)..(615): n is a, c, g, or t
cagtcgacggtaccggacatatgcccgggaattcggccattacggccgggagccttgctctgtctnnnnnnnnnnnnnnnnnnnnnnnnnnnnnnnnnnnnnnnnnnnnnnnnnnnnnnagttcaagagattctcctgcctcagcttccaagtagctgggattacaggcatgtggtaccacgcctggctaattttcttgtatttttagtagggacannnnnnnnnnnnnnnnnnnnnnnnnnnnnnnnnnnnnnnnnnnnnnnnnnnnnnnnnnnnnnnnnnnnnnnnnnnnnnnntaatatgtgatcttttgtgtctggttcctttcacgttgaacgctatttttgaggttcgtgcctgttgtagaccacagtcacacactgctgtagtcttcccccatcctcattcccagctgcctcctcctactgtttccctctatcaaaaagcctccttggcgcaggttccctgagctgtgggattctgcactggtgctttggattccctgatatgttccttcaaatccactgagaattaaataaacatcgctaaagcatnnnnnnnnnnnnnnnnnnnnnnnnnnnnnnnnnnnnnnnnnnnnnnnnnnnnnnnnnnnnnagacgcaaaagacaaaaaaacaggtgctgcgccccgtgtccccgcaggagatttataacacatcttctgtggcgggcgggccacacatgaaggagaccacacgggagcaacaccagtggcatcaacaaaaaacgtcgcctgctccacaacacgccgcgcgaacacaccccacacaaaaaaaccgcgccgcgcggacaccacacgctgtccgacaccacacccacagcgggatctgcagcacccacggggcgcccccaaag

SEQ ID NO: 68702 - DNA, 1413 bp, Homo Sapiens
actgactattgtgtccggagcaggacccccccaaaaaagatgcctgccctagtcattccagaggtgggctcccgatggaatgtcaagcgccatcaggacatcaccatcaaacctgtcttgtccttgggcccagctgcccctccgcccccatgcatagctgcctcccgggagccgcttgatcacaggactagcagtgagcaggcagatccctcagcaccctgccttgccccatccagcttgctgtcccctgaggcctcaccctgccggaatgacatgaacactaggactccccctgaaccctcaggcaagcagcggtcaatgcgctgttaccgaaaagcctgcaggtcagccagcccctcaagccagggctggcagggccgccgaggccgcaacacccgttctgtcagctctgggtccaaccggactagcgaagcatcgtcctcatcctcatcatcgtcgtcctcatcccgatctcggtccaggtccctctcccccccacacaagaggtggcgaaggtccagctggagttcctctggacgttctcgaagatgctcgtcctcttcttcgtcatcatcttcctcttcgtcggcctcatcctcagcatccagttctcgaagccgctcacgatccccatccccccgccggagaagtgacaggaggcggcggtacagctcttatcgttcacatgaccatttaccaaagccaaagagtgctacaaaaggagcgtgcaatagaagaaagaagggtggtcttcattggaaagatacctggccgcatgactcgatcagagctgaaacagaggttctccgtttttggagagattgaggagtgcaccatccacttccgtgtccaaggggacaactacggcttcgtcacttatcgctatgctgaggaggcatttgcagccattgagagtggccacaagctgcggcaggcagatgagcagccctttgatctctgctttgggggccgaaggcagttctgcaagaggagctattctgatcttgactccaaccgggaagactttgacccagcacctgtaaagagcaaatttgattctcttgactttgacacattgttgaaacaggcccagaagaacctcaggaggtaaccttgggcccttccctgctatcctttttctcctttggaggtgcccaacctcctccacccccttcccctactctaggggagagagctgctagtgagatgactgttttataaagaaatggaaaaaagtgaaataaaaaatatgttgaatcagattttttaaaaggggtatttgtttttttataacaggtattgaaacaagttaacttgcattcctatgtaagataggaggggctgaggggatccccagtgtttggaacataagtcactatgcagactaataaacatcaactagagagaactccc

SEQ ID NO: 68703 - DNA, 1795 bp, Homo Sapiens
  misc_feature (78)..(112): n is a, c, g, or t
  misc_feature (173)..(181): n is a, c, g, or t
  misc_feature (1389)..(1397): n is a, c, g, or t
  misc_feature (1601)..(1625): n is a, c, g, or t
  misc_feature (1695)..(1695): n is a, c, g, or t
tgtatagatcactatagggcgctagctcttacagcgaacgacgagcgcagcgaggtcagtgagcgaggaagcggccgnnnnnnnnnnnnnnnnnnnnnnnnnnnnnnnnnnncagtcgacggtaccggacatatgcccgggaattcggccattacggccggggggggttccgnnnnnnnnngcgcatggggaggtaggctcggaccggcccgcggagctgctgcagtccttcgcgccctcctcgccctccccaccgacatcatgctccagttcctgcttggatttacactgggcaacgtggttggaatgtatctggctcagaactatgatataccaaacctggctaaaaaacttgaagaaattaaaaaggacttggatgccaagaagaaaccccctagtgcatgagactgcctccagcactgccttcaggatatactgattctactgctcttgagggcctcgtttactatctgaaccaaaagcttttgttttcgtctccagcctcagcacttctcttctttgctagaccctgtgttttttgctttaaagcaagcaaaatggggccccaatttgagaactacccgacatttccaacatactcacctcttcccataatccctttccaactgcatgggaggttctaagactggaattatggtgctagattagtaaacatgacttttaatgagtagtgtcttctttatcgtttgcgatttttactaccttttttcaaaagaaaaattgatgagttttgtatagctggtcagatacaaataatagtgacttcacagtttagtaattataatgggtacttgttaaacatttggtactaaattatgttgctgcaaagtaattaaaattagtatctagagctagtttctggtgaattattcatttattttgtactgttgttaggcagctctgtagttgctaatttaaccaataagtcaatttgctattcatgaagaaacgattctgagaatcctgtcaggaattggggaatgaaaaaatacacaaaataatggtctttgtcccagtagagttcatagtctatttagtgtgcatgtttttccttaatgatgtatttgatctgacttttttccttctcaaaagaatcatacttgggattacaggtacatttgatgttatatgatggataagtgaaaagtttttaaaggagattttataccttttcacattaaaaaaggtatttatattattactttgtagtgattgtcttaagaaaaaatatagcccaaatgtatagtaaaatcagcagctcaagaagaatttctgcttctctttgtagttgatgctttgttttttcctgcagtcagaaattccttgtatttgtcaaatgtataatcagcttgtattgtttttaaattnnnnnnnnntttgaataattaacttttgccatgggacaagatacaaaagtaatttcatataaagggcctctcccacccctgttctctggctcctggctcctgtttgacaagttactgttaccacttcgccttgtacttttgagaaagagtctgtgcctaaacaaacacgtgtaacacaaatagtaactatacatggaggtctagccctcgccnnnnnnnnnnnnnnnnnnnnnnnnnaatggagatcattctataccagcatgtaagtagcaaggaacctcattctttttttggctgcctaaaattntttttgaatagatataacctaattggatttaatctgctactggtggaatggcttaaggttgttctttggctattaccagtgataacttcaatccctaatt

SEQ ID NO: 68704 - DNA, 773 bp, Homo Sapiens
agcaggccctcgcagaggattaacacagtggctgaacaccaggaaggaactggcacttggagtccagacatctaaaatttggtactgcgaaggtcatgagacgcctgagaaggcctgaactacagctgtctgggcacctagtgaaggttataaggcaaaccagtgcaaggctcttttgagcaaaacctagataacagacatctaggttgcaaagcaacagtcatgtgtaatcccgagttatgaactgtcacaatttgattaattgttctccctctgtatctctgctttcatgccactgtaagcctacatcaagttagcccaccccttttggaaagtgtgtatgaaagtcaagtgctgtctttgttggggcccaatctctggatgttaagtcagctgagtctgagtgcactcaataaagatatcctcctgtatacaccccaaggtctctctctggtactcctgattcctgcaaaaagatgtcaatttataaacaatatacaggacagatgataaaacagcacaaagagtgttgctgattggtaatattttgccgttaacgttgtgattagaaaaaaatacataattaggaggtgcaatatggcattttggtattattatgatagtggtggcaggtaacagatatcaccaaattctgccctgccattcaattctattatttacaggattcctaagtgcactgtacacactacaaatgttatcagaaaggagttatactttatgagttacttcactagcacaataagtaggtatcg

SEQ ID NO: 68705 - DNA, 1628 bp, Homo Sapiens
  misc_feature (41)..(81): n is a, c, g, or t
  misc_feature (85)..(119): n is a, c, g, or t
aaagtctatacgatcactatagggcgctgcgtcgttatgtnnnnnnnnnnnnnnnnnnnnnnnnnnnnnnnnnnnnnnnnnccgnnnnnnnnnnnnnnnnnnnnnnnnnnnnnnnnnnncagtcgacggtaccggacatatgcccgggaattcggccattacggccgggggaccgggatggcgcattttcttgcaccaactaatgcggtgtcgctggcggctgaggagggcggagagttctgtggtgaaatagtgggaaggattcatgtaggcatcgggaagagcctaagtccacattataaaataggaagttgatgcggggtacagttactcccggaccggcggcgtgaaagtcgtgatatcatcgttgaactattagctttgaagtttaaatccaatggagaagactcaagaaacagtccaaagaattcttctagaaccctataaatacttacttcagttaccaggtaaacaagtgagaaccaaactttcacaggcatttaatcattggctgaaagttccagaggacaagctacagattattattgaagtgacagaaatgttgcataatgccagtttactcatcgatgatattgaagacaactcaaaactccgacgtggctttccagtggcccacagcatctatggaatcccatctgtcatcaattctgccaattacgtgtatttccttggcttggagaaagtcttaacccttgatcacccagatgcagtgaagctttttacccgccagcttttggaactccatcagggacaaggcctagatatttactggagggataattacacttgtcccactgaagaagaatataaagctatggtgctgcagaaaacaggtggactgtttggattagcagtaggtctcatgcagttgttctctgattacaaagaagatttaaaaccgctacttaatacacttgggctctttttccaaattagggatgattatgctaatctacactccaaagaatatagtgaaaacaaaagtttttgtgaagatctgacagagggaaagttctcatttcctactattcatgctatttggtcaaggcctgaaagcacccaggtgcagaatatcttgcgccagagaacagaaaacatagatataaaaaaatactgtgtacattatcttgaggatgtaggttcttttgaatacactcgtaatacccttaaagagcttgaagctaaagcctataaacagattgatgcacgtggtgggaaccctgagctagtagccttagtaaaacacttaagtaagatgttcaaagaagaaaatgaataatgttaagccattcttgattggacctcatagcttattttagttaatcttttttttgtcttttagccttaccaccttttaaaaaatttgttattctccagaaacagtaaataggtgagtaggggtggtgcaagtgaattcgttttcatttagaagcccctctgtacagataatcaaaattcaaagttgaaagaatcaaaagcagccacagttatgtaggtctgatttgaatgtcataattgcagtgacaggacattgccaccaactctatcctactaccatcaatgttgtgtttattccgtcaataaaaaagacttgcttccaggaaaaa

SEQ ID NO: 68706 - DNA, 655 bp, Homo Sapiens
  misc_feature (63)..(63): n is a, c, g, or t
ggaacagctaaaactccaaccaagagagttagaattgggaaaactctgccatcagaaaaagcntgttgtgacagaaccagcaaaaggtgaagaggccttccagatgagtgaagttgatgaggaatctggattaaaggattcagaaccagagcgaaaacgcaagaagactgaagactcttcttcaggcaaatcagtggcgtctgatgtccctgaggaattagactttcttgtacctaaggctggattcttctgtccaatttgttccctcttctactcaggtgaaaaagcaatgacaaatcactgcaagagtacacgtcataagcaaaatactgagaaattcatggccaagcaaagaaaggaaaaggagcagaatgaggctgaagaaagaagctctaggtgattgggggaaaggaaagaattcactagaaatttgtttagggtccagttgatttgtgtatttttgttatcatttaatttgtaattttcgtttcagaagcaaatattcgtgttgtacaaatttctgattgccctaaatgtagagagactgatggggaaagtatgatgggtttgatttttatatcaaatcatcaggcatggagaaatatcttttagaagtgttaaaataaatgttcctactgtatatttaaaataaaaa

SEQ ID NO: 68707 - DNA, 699 bp, Homo Sapiens
  misc_feature (487)..(487): n is a, c, g, or t
gatctgactctgggtatgaaatttgacactaccctggattcataactctcctgtcagtaggacgccatagtaaaatttccctggggactgtatcaggttacagagaggtgttggactcccccgccatgtgccgcacatgtgaatgctgtaaaggcagaatgctggttgcagatcacaatatcaggtacactttccagtagcccctacatggctgagggagagagtgcttcagggaaatacttcgtaggtgactgtagagactctggaaggagaaagcatcatggatagatctgaaagctaaggtcttctcagaagctagagttactgaagagtgagtttctaccgtgggagaagacggcctctcccttcgagtgccttccactttgtgtcctggtggcagcaactttttgttttctgccttagagctcatggtgacacccagcactgccggaaggctctgcaccgggccgtccagtgcaccagtgantacccagagcacgtctgcgaagtgttactcaccatggagaggacagaaggttctttagaagattgggatatagctgttcagaaaactgaaacccgattagctcgtgtcaatgagcagagaatgaaggctgcagagaaggaagcagcccttgtgcagcaagaagaagaaaaggctgaacaacggaaaagagctcgggctgagaagaaagcgtt

SEQ ID NO: 68708 - DNA, 1464 bp, Homo Sapiens
gtggtaccggtccggattcccgggatatcgtcgaccccgcgtccggtgaaatctttcccttgactgaagagctctggctggagtggctgcatgacgagatcagcatggcccaggatggcctggacagagagcacgtgtatgacctctttgagaaagccgtgaaggattacatttgtcctaacatttggctagagtatggccagtactcagttggtgggattggtcagaaaggtggccttgagaaagttcgctccgtgtttgaaagggctctctcgtctgttggtttacatatgaccaaaggactcgccctctgggaggcttaccgagagtttgaaagtgcgattgtggaagctgctcggcttgagaaagtccacagtcttttccggcgacagttggcgatcccactctatgatatggaggccacatttgcagagtatgaagaatggtcagaagacccaataccagagtcagtaattcagaactataacaaagcactacagcagctggagaaatataaaccctatgaagaagcactgttgcaggcagaggcaccaaggctggcagaatatcaagcatatatcgattttgagatgaaaattggcgatcctgctcgcattcagttgatctttgagcgcgccctggtcgagaactgccttgtcccagacttatggatccgttacagtcagtacctagatcgacaactgaaagtaaaggatttggttttatctgtacataaccgcgctattagaaactgcccctggacagttgccttatggagtcggtacctcttggccatggagagacatggagttgatcatcaagtaatttctgtaaccttcgagaaagctttgaatgccggcttcatccaggccactgattatgtggagatttggcaggcataccttgattacctgaggagaagggttgatttcaaacaagactccagtaaagagctggaggagttgagggccgcctttactcgtgccttggagtatctgaagcaggaggtggaagagcgtttcaatgagagtggtgatccaagctgcgtgattatgcagaactgggctaggattgaggctcgactgtgcaataacatgcagaaagctcgggaactctgggatagcatcatgaccagaggaaatgccaagtacgccaacatgtggctagagtattacaacctggaaagagctcatggtgacacccagcactgccggaaggccttgcaccgggccgtccagttgcaccagttgactacccagagcacgtctgcgaagtgttactcaccatggagaggacagaaggttctttagaagattgggacatagctgttcagaaaactgaaacccgattagctcgtgtcaatgagcagagaatgaaggctgcagagaaggaagcagcccttgtgcagcaagaagaagaaaaggctgaacaacggaaaagagctcgggctgagaagaaagcgtt

SEQ ID NO: 68709 - DNA, 1000 bp, Homo Sapiens
ggcacgagggaaactgcccctggacagttgccttatggagtcggtacctcttggccatggagagacatggagttgatcatcaagtaatttctgactccagtaaagagctggaggagttgagggccgcctttactcgtgccttggagtatctgaagcaggaggtggaagagcgtttcaatgagagtggtgatccaagctgcgtgattatgcagaactgggctaggattgaggctcgactgtgcaataacatgcagaaagctcgggaactctgggatagcatcatgaccagaggaaatgccaagtacgccaacatgtggctagagtattacaacctggaaagagctcatggtgacacccagcactgccggaaggctctgcaccgggccgtccagtgcaccagtgactacccagagcacgtctgcgaagtgttactcaccatggagaggacagaaggttctttagaagattgggatatagctgttcagaaaactgaaacccgattagctcgtgtcaatgagcagagaatgaaggctgcagagaaggaagcagcccttgtgcagcaagaagaagaaaaggctgaacaacggaaaagagctcgggctgagaagaaagcgttaaaaaagaagaaaaagatcagaggcccagagaagcgcggagcagatgaggatgatgagaaagagtggggcgatgatgaagaagagcagccttccaaacgcagaagggtcgagaacagcatccctgcagctggagaaacacaaaatgtagaagtagcagcagggcccgctgggaaatgtgctgccgtagatgtggagcccccttcgaagcagaaggagaaggcagcctccctgaagagggacatgcccaaggtgctgcacgacagcagcaaggacagcatcaccgtctttgtcagcaacctgccctacagcatgcaggagccggacacgaagctcaggccactcttcgaggcctgtggggaggtggtccagatccgaccatcttc

SEQ ID NO: 68710 - DNA, 924 bp, Homo Sapiens
gggtaccggtccggaattcccgggatatcgtcgacccacgcgtccggatggcgactgcggccgaaacctcggcttcagaacccgaggctgagtccaaggctgggcccaaggctgacggagaggaggatgaggttaaggcggctaggacaaggaggaaggtgttatcgcgggctgtggccgctgcgacatacaagaccatggggccagcgtgggatcagcaggaggaaggcgtgagcgagagcgatggggatgagtacgccatggcttcctccgcggagagctcccccggggagtacgagtgggaatatgacgaagaggaggagaaaaaccagctggagattgagagactggaggagcagttgtctatcaacgtctatgactacaactgccatgtggacttgatcagactgctcaggctggaaggggagcttaccaaggtgaggatggcccgccagaagatgagtgaaatctttcccttgactgaagagctctggctggagtggctgcatgacgagatcagcatggcccaggatggcctggacagagagcacgtgtatgacctctttgagaaagccgtgaaggattacatttgtcctaacatttggctagagtatggccagtactcagttggtgggattggtcagaaaggtggccttgagaaagttcgctccgtgtttgaaagggctctctcgtctgttggtttacatatgacaaaggactcgcctctgggaggcttaccgagagtttgaaagtgcgattgttggaagcctgctccggacttgagacaagtccacaggctgttccggggacagttggggatcccactcctatgatatggcaggccactttgcgaggttgaagatggtccaagacccattaccgagtccgaattcgaacttacaaagctacccagctggcaatttc

SEQ ID NO: 68711 - DNA, 995 bp, Homo Sapiens
  misc_feature (54)..(54): n is a, c, g, or t
  misc_feature (175)..(175): n is a, c, g, or t
  misc_feature (192)..(192): n is a, c, g, or t
  misc_feature (218)..(218): n is a, c, g, or t
  misc_feature (285)..(285): n is a, c, g, or t
  misc_feature (330)..(330): n is a, c, g, or t
  misc_feature (346)..(346): n is a, c, g, or t
caccctctgcattgactgcttaacaatggagactgccagcagttatgctcctgntgtgtcctcacaccgctacagcccacctaccatcagcgtgaccaatgcggtgtgctgccctgagtcttgagtagctcctgccaggccagagctgtaacagcgggcagcaggtggtagcctnaccagccaggcagtccntgagggccagcagggggctgactgcntagtgctcaacctcctgaacccacccactcccagcgatgctacccagaaccccaacggcatgaatcntgcacagtgccgggcagtgccagactccaaagggctcgctgtggngacagccccgccatgnccacagactctgtcctcacctgtgattgtcaggatgacagcccccaccaccatgatgagcgtctgcagggcgtccgtgtagattacagcagccaggccccctgccagtggaagcaaggttgctggagggggccctggccccagggaggagggacacggggaggaacttctggggctcctgctggggccacttcctgggctgctccctcgggcctgtagggggaggtggccttctgacccctttacacgtcccctgggtggacctccctgctgcaggcaccatacctgcgatggtgtacagggctgtgatgccgagcgtgaggatggtggagaggtagaagttccagcccaggcagatgtgcacaaacagagcccccgcgtacaggtccagctgcggagggagagagccttgtgtggggctgttattcccagggctccagcaagccactccctgggtgacctcgggcaaggccctctctgggcctcggtggcctgtggataaggaggggagacccccactcgcctgcctgcctgcatcacggggccattgtgaggttgggggaagacctggccgtggagctacaagcttgtgcggatgtcaggggacattactgttgctaataaagtccaaagtggccaatgcctttccc

SEQ ID NO: 68712 - DNA, 1318 bp, Homo Sapiens
  misc_feature (55)..(79): n is a, c, g, or t
  misc_feature (913)..(939): n is a, c, g, or t
actctttcaggtcactctggggctgcctcttgcatgtattactaaataaaatgannnnnnnnnnnnnnnnnnnnnnnnntttctaagaaacaattatgtgcactttgatacacaaccttctctaaccaactatatatcaagacccaaaaattgaagaaaaatattgttttctcatacagtgagcagatttttcaatctactaattctgtgacttgtcttggtgtgctagcctacaccttctctttggtttagttttccttttctataacactctgaattgctaatcttactaacacctatgatgttacctgaaatcaatctcccatatgtatgctgtatgctatgctaagactcctgaaatatacttactctgtgcttgtgtatgtgaatgttaatgcaactattacctagagtgaactttaagctttattgttgaatgtaattccattatatttccttttgtacacctgtgaaaaagtggagtagtgtttttttaaccattgttaatcagcttttgtgtatgaaagacacagtaaaatttctttcttaaatcaagatactggtgattcaaggaattttatttatggtccagccaagagccatctcgtgccaagacttctgctggcaagggaatggataaagctgttttgttctagtaacaattttggaatgaatactgacaatattccatgagggtgtgcaagcacaaattttaccaatctgacctctttgaagttgcagaatgctttgaaattctaatggtatctgaaatatcagctcatagaaagtaacaaaatttgctgtcaccttaaataagacattttaattttgttataatgtacaatttagaagtttgattaattatattatctatttaggcattaatataaaagaggtaggagtctgttatttnnnnnnnnnnnnnnnnnnnnnnnnnnnctgtcttgtctacttttagcttcattctcccatattttgaagggtgtgtaacttcagctctgcaggattgcatggggtaaaacttgttaccaacacatgtgaaccattgctacattgtaggttgtgatcattttgccccactgaagcccatgtatctgaccttacgtgccttttgaactaggagaatcgggctaatttattaatgatgataattataatgtatctgtacagcactttttacatttgcgaagtgctttccaatccatgttagttactagttattacagctgtaaggataaaacacgtcatgtggattcattttgaattggtgctattggtatttcctctgttattgctaataaatgaaaatggtggtatg

SEQ ID NO: 68713 - DNA, 513 bp, Homo Sapiens
ttttttggaaagcactgtctccttggctctagtctaaaggaacgtaagcaatatgaaggaccctagaggccaaggaaattgaagagaagtcagaggaagggatataaaatggaatgtattaatggattttagcccctttaagcttgtacttttgtgagagggttcaatggagagctttaatgcagatgagacttgaagcttctgaagaagatctaagtcttgatgaggttattcaaactcaaatcttgaatgcataatgatgataggccatggtcttcaaaaacgtggtacttgatgctctcccagagtgctaggatttgaatgccacaatacatattgactcatgtttttgtccattaatggtccgtgggtttctttaaatgaagtccattttagagtccatagatttcagtgttctgcaaaactgtcggggatcctaggctcccagcgcatcccagacgcccccggccgtaatggccgaattcccgggcatatgtccggtaccgtcgactg

SEQ ID NO: 68714 - DNA, 777 bp, Homo Sapiens
gggagtagtgtgacatccccagtttaggctaagtcactctttgaaattgccaagggctagatccttttttatccagtcagcattgcctatctttcccgtacttatgatccccccctttctgtctttggaaaatgtgggaatcccccctccctttgcctatgttgcactctctctcttcccaaccataactctgccctcaggtattaactgtgctgtgtatttatcaagttggtatgttgtatgaacagtgttattcatgtaatcatgagaatgttgaacgcttgttaaataccttttgctagcctcttcatatgctggtgcatatgactctcatcacaactcagtgagatggaaagacaaatcctatttgtacaaatgagaaaactgaactctttagagtaactagctcagtattggccagctggtaaatggcagtgttgggattaaaatccagttcttatctactctccctttattcagaagcatttattggatgttgatctttgtttcaggttttgattttgttacttttttatactgtgtatattttcctcagtctacccttctgctctagattgtctggactcaggagattgtggcagttactggatagttatttttaagataatgattgcttttctctgtttatataagtcatgtgtacttattgtagaaagtttgtaagatgcaaaaagtataaaaattaaagttatgcactactaacatttcaatatattttctcccagattttcaataaagactttcaggcagtgaaaa

SEQ ID NO: 68715 - DNA, 710 bp, Homo Sapiens
gaattccattgctcaccagaaacttgctttaatgtctaaatgttctaaagatgagaggggggagggaaatgcataaaaagcagtgcctcatggaaaacacacacatgtgcatgcacacacacccaaagtcctttgtgctttaaacattcctggtaacttcactgaccatcctggccggaatcttctgaaatggttaagccaagaatttcagtcgcgaatatttctgcagtgatttcgtctggaagttcttcttcaaggcaaatttctgaacctttgacggagcaggttgcaggctcggatttccatccctcgggattcaggccaaacagtgaagcaaagcaatccaacatctcctcctccgtcatatgctcacctttagtaacgagcagtctcaggaagtcctctcttcgaatggcctttttccctttggagttggtataaccgagcacctcaaagctcttgtggatgccactcatggtgttaccaaaaggtggcttgtggttaaggtacacttttaggaaatctggtaagttgatcttgtcgattagctttccagtgtccacatattcaccaaatttgatttcgttaaatatatcatcaatcttctcttcagatgggtaaaagccaattgctctcatgacaaaaggaagctctgacaggcaaatgtgttctgacacctttctggtctcattgtgtcgatgcttgactgc

SEQ ID NO: 68716 - DNA, 1054 bp, Homo Sapiens
  misc_feature (606)..(979): n is a, c, g, or t
  misc_feature (984)..(984): n is a, c, g, or t
  misc_feature (1000)..(1000): n is a, c, g, or t
gtgaattccattgctcaccagaaacttgctttaatgtctaaatgttctaaagatgagaggggggagggaaatgcataaaaagcagtgcctcatggaaaacacacacatgtgcatgcacacacacccaaagtcctttgtgctttaaacattcctggtaacttcactgaccatcctggccggaatcttctgaaatggttaagccaagaatttcagtcgcgaatatttctgcagtgatttcgtctggaagttcttcttcaaggcaaatttctgaacctttgacggagcaggttgcaggctcggatttccatccctcgggattcaggccaaacagtgaagcaaagcaatccaacatctcctcctccgtcatatgctcacctttagtaacgagcagtctcaggaagtcctctcttcgaatggcctttttccctttggagttggtataaccgagcacctcaaagctcttgtggatgccactcatggtgttaccaaaaggtggcttgtggttaaggtacacttttaggaaatctggtaagttgatcttgtcgattagctttccagtgtccacatattcaccaaatttgatttcgtcctcgtgccgaattcttnnnnnnnnnnnnnnnnnnnnnnnnnnnnnnnnnnnnnnnnnnnnnnnnnnnnnnnnnnnnnnnnnnnnnnnnnnnnnnnnnnnnnnnnnnnnnnnnnnnnnnnnnnnnnnnnnnnnnnnnnnnnnnnnnnnnnnnnnnnnnnnnnnnnnnnnnnnnnnnnnnnnnnnnnnnnnnnnnnnnnnnnnnnnnnnnnnnnnnnnnnnnnnnnnnnnnnnnnnnnnnnnnnnnnnnnnnnnnnnnnnnnnnnnnnnnnnnnnnnnnnnnnnnnnnnnnnnnnnnnnnnnnnnnnnnnnnnnnnnnnnnnnnnnnnnnnnnnnnnnnnnnnnnnnnnnnnnnnnnnnnnnnnnnnnnnnnnnnnnnnnnnnnnnnnnnnncgcanggaagacagtgagcanaagcagcaaaagcacgacgttaaaggcgcgtgctgggttttccaagcccgcccc

SEQ ID NO: 68717 - DNA, 1924 bp, Homo Sapiens
ttaggtctaggtagcgaggctgggttgagaattcggcacgaggtcagcctcttgccccattgctcttggcagcgtgtagaagaaggaagtgtaggcggggtaagggaatgcaccgtcaggggtctctcacaacccttatcccagactctcctccccaacaatacagtacctggagatggagccctagggtaatcgcaaatcacggggatggcgtccgaaggctgaccaggcatatcagtgggacacacacgtatctgagccattaatgccgcgactcattccgactaacgttaagcggaatagaggctcaccaagccgtaacagggcgttaaagcccaggggaagactaggctccttatgacttcctgccttccagccctcagattcatcgctaccccgaggctaagcgccatgcctcatattgacaacgatgtgaaactggacttcaaggatgtccttttgaggcccaaacgcagtacccttaagtctcgaagtgaggtggatctcacaagatccttttcatttcggaactcaaagcagacatactctggggttcccatcattgctgccaatatggatactgtgggcacctttgagatggccaaggttctctgtaagttctctctcttcactgctgtccataagcactatagcctcgttcagtggcaagagtttgctggccagaatcctgactgtcttgagcatctggctgccagctcaggcacaggctcttctgactttgagcagctggaacagatcctggaagctattccccaggtgaagtatatatgcctggatgtggcaaatggctactctgaacactttgttgaatttgtaaaagatgtacggaagcgcttcccccagcacaccatcatggcagggaatgtggtaacaggagagatggtagaagagctcatcctttctggggctgacatcatcaaagtgggaattgggccaggctctgtgtgtactactcggaagaaaactggagtggggtatccacagctcagcgcagtgatggagtgtgcagatgctgctcatggcctcaaaggccacatcatttcagatggaggttgcagctgtcctggggatgtggccaaggcttttggggcaggagctgacttcgtgatgctgggtggcatgctggctggggcacagtgagtcaggtggtgagctcatcgagagggatggcaagaagtacaagctcttctatggaaatgagttctgaaatggccatgaagaaatatgctgggggcgtggctgagtacagagcctcagagggaaagacagtggaagttccttttaaaggagatgtggaacataccatccgagacatcctaggagggatccgctctacgtgtacctatgtgggagcagctaagctcaaagagttgagcaggagaactaccttcatccgagtcacccagcaggtgaatccaatcttcagtgaggcgtgctagacctgagcagttctaccctcccaaggcaccagtactctaccatggggcatcccaagtggggtcctcacccatcccagctactgcagctctgtattactttgtcatttcctgttgtctcactcctgagggctcctgcagtaactctgtacttctctatctgcacacacaaaatgcccaaggcactcactggggaggaagcaaggaagcaaacagtctgagaaaatgatgcaagaaaatcaaatgggaatctggggacccaacacaacatcctgaagattattaaaaggaaaagatgctgattggtacataaatcttttacatggccttggtctagaggaggcaggcttttagaatcatgttttgttaatccgcttcactaaattggaccttcacatatctaaaaagctctgaagtgtttgtatatttgaaatacctcaataaagagagagctcattgccaaaaaa

SEQ ID NO: 68718 - DNA, 845 bp, Homo Sapiens
ccggggtggtccacaccagaggcctgggccaaattccccctttgatgaagtcagcccccagaaagggatgagctcttctaccatctctcctgttaccacattccctgccatgataggtgtgctgggggaagcgcttccgtacatcttttacaaattcaacaaagtgttcagagtagccatttgccacatccaggcatatatacttcacctggggaatagcttccaggatctgttccagctgctcaaagtcagaagagcctgtgcctgagctggcagccagatgctcaagacagtcaggattctggccagcaaactcttgccactgaacgaggctatagtgcttatggacagcagtgaagagagagaacttacagagaaccttggccatctcaaaggtgcccacagtatccatattggcagcaatgatgggaaccccagagtatgtctgctttgagttccgaaatgaaaaggatcttgtgagatccacctcacttcgagacttaagggtactgcgtttgggcctcaaaaggacatccttgaagtccagtttcacatcgttgtcaatatgaggcatggcgcttagcctcggggtagcgatgaatctgagggttcctgttgccttggtccaggcggcagttgaccaaagaccaccttgcttagcaactaacctcgtgcaatcccgctaagccttctgggccacgccaacaggttcctctagttgccggcgagaactactagccgacgaattccagcttcggcggcggcagggcgaggccttctggataacagagttcacgcactggagcctcgtgccgattcaacacccagcctcgtacctagcctaa

SEQ ID NO: 68719 - DNA, 608 bp, Homo Sapiens
  misc_feature (38)..(38): n is a, c, g, or t
ggcacgaggaacagcaacctcagtgcgggaactctggntatccaaaaggcctcgccctgccgccgccgaagctggaattcgtcggctagtagttctcgccggcaactagaggaacctgttggcgtggccaaaaaggcttagcgggattgcacgagccctcagattcatcgctaccccgaggctaagcgccatgcctcatattgacaacgatgtgaaactggacttcaaggatgtccttttgaggcccaaacgcagtacccttaagtctcgaagtgaggtggatctcacaagatccttttcatttcggaactcaaagcagacatactctggggttcccatcattgctgccaatatggatactgtgggcacctttgagatggccaaggttctctgtaagttctctctcttcactgctgtccataagcactatagcctcgttcagtggcaagagtttgctggccagaatcctgactgtcttgagcatctggctgccagctcaggcacaggctcttctgactttgagcagctggaacagatcctggaagctattccccaggtgaagtatatatgcctggatgtggcaaatggctactctgaacactttgttg

SEQ ID NO: 68720 - DNA, 561 bp, Homo Sapiens
gggaaaaactttattatcttctccttctggattccttaagcccagggacttttccacagaccctagcattgagccccggttcaccatgcttctctgagaactgtaccatccccctctcagcagccatgagttctgcctccatactattactaagctcctgggcctccacacatacctgtactcagccacgcccccagcatacttcttcatggccatttcagaactcattccatagaagagcttgtacttcttgccatccctctcgatgagctcaccacctgactcactgtgcccagccagcatgccacccagcatcacgaagtcagctcctgcccctgccaccatcatggaggggggaaagagattaatctggccaaggtgctcacatggccaccctcaaaagcaactcacaccatattctcagtcctgacaatgattccagcgtcttcctccttctgcttccctagctgacccacaatccacgcaggcctgatctgccctggcctctattcctcagtgggtatgatttccccaagatttaaaaaagagcctctggagagc

SEQ ID NO: 68721 - DNA, 1908 bp, Homo Sapiens
agaagagaaactttctaaagtagatgaaaagatcagccatgccactgaagagctggagacctatagaaagcgagccaaagatcttgaagaagaattggagagaactattcattcttatcaagggcagattatttcccatgagaaaaaagcacatgataattggttggcagctcggaatgctgaaagaaacctcaatgatttaaggaaagaaaatgctcacaacagacaaaaattaactgaaacagagcttaaatttgaacttttagaaaaagatccttatgcactcgatgttccaaatacagcatttggcagagagcattccccatatggtccctcaccattgggttggccttcatctgaaacaagagcttttctctctcctccaactttgttggagggtccactcagactctcacctttgcttccagggggaggaggaagaggctcacgaggcccagggaatcctctggaccatcagattaccaatgaaagaggagaatcaagctgtgataggttaaccgatcctcatagggctccctctgacactgggtctctgtcacctccatgggaccaggaccgtaggatgatgtttcctccgccaggacaatcatatcctgattcagcccttcctccacaaaggcaagacagattttgttctaattctggtagactgtctggaccagcagaactcagaagttttaatatgccttctttggataaaatggatgggtcaatgccttcagaaatggaatccagtagaaatgataccaaagatgatcttggtaatttaaatgtgcctgattcatctctccctgctgaaaatgaagccactggccctggctttgttcctccacctcttgctccagtcagaggtccattgtttccagtggatgcaagaggcccattcttgagaagaggacctcctttccccccacctcctccaggagccatgtttggagcttctcgagattattttccaccaggggatttcccaggtccaccacctgctccatttgcaatgagaaatgtctatccaccgaggggttttcctccttaccttcccccaagacctggatttttccccccacccccacattctgaaggtagaagtgagttcccctcaggtttgattccaccttcaaatgagcctgctactgaacatccagaaccacagcaagaaacctgacaatatttttgctctcttcaaaagtaattttgactgatctcattttcagtttaagtaactgctgttacttaagtgattacacttttgctcaaattgaagcttaatggaattataattctcaggatagtattttgtaaataaagatgatttaaatatgaatcttatgagtaaattatttcaattttattttagacggtataactatttcaatttgattaatccactattatataaacaatagtgggagttttatatatgtaatcttgcaggtggggaggctttaaattctgaagtctgtgtctttatgccaagaactgtatttactgtgggttgtggacaaatgtgaaagtaactttatgcttaaataaattatagttgattaaagaaattcagataatccacatgataaccattcaatcactagcagtatttgccacgtctccactaaacgtctcaaagtcgcagaaaacacagcatggcctaacaggagctcttcattgcctccacaccactcttctctcaaggagcagcagtactgccctcgcagggctcaagtcaacccctacaacaccctggactccactcttcacattaccctgccactgccactccatcagtgagactgtctgctctccctctacacagtcacgtctctctagtgtcaccaccccactgccctctcttgtgcaacctctgccacttctcctctgacacactactgt

SEQ ID NO: 68722 - DNA, 450 bp, Homo Sapiens
gccagaagagaggtcttcaggagacttcatttaaattctgattattaaactgaggctttaattgatgttaatgccttatgtcaaatgtaaagttagaatttgctagggctgggatagggagtgatatttctaggacttagacattgaaaactaattcagcctgtagtaacctggatggttttcaatggcatggttagtcaaattcatggttttaaacttagaagcagctttcgggggagagggtaggttggagcatttattacatattttactgtttaatgtcttaaccgtgggccttttaatttgtaaacactgaaatgattgttgggctgtggaaaacatttacctatttaccttggaagttttaaaagacagtccactttttagcatgtgtgttgtgtccagcctgtggtcgtcttaactaataaatgtgatttttctccccaaaaa

SEQ ID NO: 68723 - DNA, 921 bp, Homo Sapiens
  misc_feature (43)..(77): n is a, c, g, or t
aacgaccgagcgcagcgtagtctgtgagcgaggaagcggccgnnnnnnnnnnnnnnnnnnnnnnnnnnnnnnnnnnncagtcgacggtaccggacatatgcccgggaattcggccattacggccgggtgagaacatggggtatactgcatcatttccattttcatcaataacatatgttttatgcaccttctttacctgaaacttactaagaatctaccagtaaacaaacatcctgtctttttgcaagtatgaatcacttaacctgctgatagttgaagaacactttaggagttttgtattcttgtatatagtttattttttccatgtgctagccaggtaaagattacacagttcttctggactgttaaattgtgcatggttttggaccccttctgctctactacagagagtgaagaagaaagtattaaagctcactttaccattccatatacttactaaaagcctgtgtaaacatgtcttaatgaatgttgttgaaagcaatgtaaatagttgaaaatataaatttatattacagtttaagaaaaccttatgaggcatcactagccactgttaatatctatttgtattcttataccttttcaatatatttgaacaaatatagtttctggcactatttttatactaggaaaaggagttactatgtatattatgcttagcttttaaggcattttaaataaccatgaatgttgatttcattactttcctttcctccatcacgagagtcatttcagatgactctttcatgacaaaatcactttaaaggaacacttacctccgattcctgtataaagtcatgagatggtcaaggtggttttccattgtgcaaattcttcacctgtcagtggtttcctcattttgccatgctttgtaaaaataaaaagaatgatcaagtaggtatg

SEQ ID NO: 68724 - DNA, 1013 bp, Homo Sapiens
  misc_feature (15)..(15): n is a, c, g, or t
  misc_feature (25)..(25): n is a, c, g, or t
  misc_feature (35)..(35): n is a, c, g, or t
  misc_feature (56)..(56): n is a, c, g, or t
  misc_feature (87)..(87): n is a, c, g, or t
  misc_feature (139)..(139): n is a, c, g, or t
atggaatggggggtnagggcccggngttgggcatncacatccggggattctcgggnatctcaggtggactggtcctatacatcaaantatggcaattttcaattcacaatactgctaaatgttattcaggcataaagtntcttacccactgttccctcaaattcatttttgaccctaggtattggcaatagccctttgctatttatataattaaaactttttctttaaatttcaattgacaggaaaaagagtcattttgtactctcttatctataaccatgtctcacttcaagtcaatgctacaattgtcacttttattttgaaaaggaagctcagaaggaaaaaaactcttagagagatcttctaacagaacatttttcttcactgatagacatccaaggccattccatttctaaatcacacttatccctcaatcaagtcagtgactggatcatctcctaaggtttcacctgctttgcatcagtgagttggactatggatcaggtactgtgctcagcatcagaaaatgggatgacaatgaacagagtaacaggactatatttctgaaaaaggatgaacttactggaaacaggattgcgtgcctgaaatatacccaaatggatataaatgtcaactcagttctgggctggagatatagatttggaatgcaccaacaatgcagatggtaatcctggcatgcgagtaggtgagatcatccagggagatggcctataatgagagcctacaacatgtcagggctcaagcacctcttactgcctcctcactctggaaccaaatgccttacttgacaggatcacagaatgtgaattttgaacagatctgaaaagttattaagttcaactccacagaggttcctaggagaatgttaacagtccagacctttttcactacatcaaccacggatgattggcatataaaatcctacttaacctttacataactgcaataccaggaaacaaatatgtcaataaaaggaaacatcattcaaaaaa

SEQ ID NO: 68725 - DNA, 1000 bp, Homo Sapiens
agcagggggttggcacgctggcttctaagcggctttaatgcacaattcaccaggggcaggagctgaccctgaaccttttagcttaggcactagattagcatactgaagactgctggggtggagacacagtaactaagttgacaagactgatttataaaaccaaaatagtatcaatgttcaaaaagaaacagatctgtcccagaaacagaagtataagcacctgcagctccagcccattgcctcaagtccagatcatacaataagaaacaactgtcagggcaaccagtatatttgagaggacatgaataatgcattctcttcccatgagctaacctacactggaaaagagagtaatcaggacaagttggattggggggactggaatcagaacaagggaaatcagagtcagagaatgttgaattgtgctaagctgatgtattcctttcacaataaggatgcattctaggcagagggactgcgaattggaaagatattactggctataatctgatgcatccattgcacctagtgaaggctcaccatatggtcagaatactcgatgcacactgatacaactctctacatccatctctgtgttagggacaaatgttactttactcttgcacagaacttggacagtcacttttaatatctgtcttttctttttctattttcattactgataccctctgccccttctttctgactaaaactctcattcaataaaattatagtcaaatcttgcaattggaaaagtattcagacttttaaagttatatttatatatctaaatgttgctccattagggttttaattctaaatttaacctttaaaaagttatcatattttctttatttccaggttcctaggagaatgttaacagtccagacctttttcactacatcaaccacggatgattggcatataaaatcctacttaacctttacataactgcaataccaggaaacaaatatgtcaataaaaggaaacatcattcaaa

SEQ ID NO: 68726 - DNA, 946 bp, Homo Sapiens
  misc_feature (443)..(454): n is a, c, g, or t
  misc_feature (472)..(760): n is a, c, g, or t
gtatctgcacttgcagcctcagctttcacacttcagcccttaagttcactaagaaggtctgagtttctgctgcagatagtggtgttaactgctccaactcttgtcttgcttagtttctacaaatatttttgcttcttgtcatttgaaggattaagaaacaaaaacaatccagaaattgatcggtttttttaggccaatcccatcccttctggataaccagatgttaaatcatgagatcagagatgctgttcatcagtcccaacaagatggcctagaaatcgcattctcacctcgccttgctgctgctttaattccaagttctatttcttcccttatagttttctatgggaatgaggcggatacaggaaacaccctatctcctctgtatttttgtagtggaatttctatttaaggggctcattaaagcatagtatttatacacnnnnnnnnnnnncctcgtgccgaattcttnnnnnnnnnnnnnnnnnnnnnnnnnnnnnnnnnnnnnnnnnnnnnnnnnnnnnnnnnnnnnnnnnnnnnnnnnnnnnnnnnnnnnnnnnnnnnnnnnnnnnnnnnnnnnnnnnnnnnnnnnnnnnnnnnnnnnnnnnnnnnnnnnnnnnnnnnnnnnnnnnnnnnnnnnnnnnnnnnnnnnnnnnnnnnnnnnnnnnnnnnnnnnnnnnnnnnnnnnnnnnnnnnnnnnnnnnnnnnnnnnnnnnnnnnnnnnnnnnnnnnnnnnnnnnnnnnnnnnnnnnnnnnnnnncgcttcgccggtcgtcggtgcgggagggtacagccaccaaggcggatacggtatcacaaatcagggtacgcagaaacatgtgacaaagcacaaaggcagacgtaaagcgcgtggtgggtttcaaaggcggccctaggacatcaaaacgcctaattaggggggaccgaggacataaaccaggtcccc

SEQ ID NO: 68727 - DNA, 942 bp, Homo Sapiens
cagtcgacggtaccggacatatgcccgggaattcggccattacggccggggtcccatctggcggccgcggctcctgtccagaccctgaccctccctcccaaggctcaaccgtcccccaacaaccgccagccttgtactgatgtcggctgcgagagcctgtgcttaagtaagaatcaggccttattggagacattcaagcaaaggttggacaactacttttccagaacagaaaggaaactcatgcatcagaaaaggtgactaataaaggtaccagaagaatatggctgcacaaataccagaatctgatcagataaaacagtttaaggaatttctggggacctacaataaacttacagagacctgctttttggactgtgttaaagacttcacaacaagagaagtaaaacctgaagagaccacctgttcagaacattgcttacagaaatatttaaaaatgacacaaagaatatccatgagatttcaggaatatcatattcagcagaatgaagccctggcagccaaagcaggactccttggccaaccacgatagagaagtcctgatggatgaacttttgatgaaagattgccaacagctgctttattggaaatgaggactcatctgatagaatcccctgaaagcagtagccaccatgttcaaccatctgtcatgactgtttggcaaatggaaaccgctggagaaacaaaattgctatttaccaggaataatcacaatagaaggtcttattgttcagtgaaataataagatgcaacatttgttgaggccttatgattcagcagcttggtcacttgattagaaaaataaaccattgtttcttcaattgtgactgttaattttaaagcaacttatgtgttcgatcatgtatgagatagaaaaatttttattactcaaagtaaaataaatggaaatatcactgaaaaaaa

SEQ ID NO: 68728 - DNA, 386 bp, Homo Sapiens
  misc_feature (72)..(138): n is a, c, g, or t
cttagagtttactacccccaaaagaaatccagccccccttagtcaccaccccaacctccccatccctaggcnnnnnnnnnnnnnnnnnnnnnnnnnnnnnnnnnnnnnnnnnnnnnnnnnnnnnnnnnnnnnnnnnnnaattctccaaggtgtctgtttcttctttaatgtcattccctgtttctcctcacattccctccccatttcctgggcccagtctcacactggtccttgcttaccctaaatgctattaattccatcactctgagtatggtgtttgctgtccgctgaatgccaagagcttcaagagtgtgtgtaaataaagccacacctttatttttgtattattctgaaccatggctaataaattgtttcaccaagaaaaa

SEQ ID NO: 68729 - DNA, 1828 bp, Homo Sapiens
  misc_feature (1786)..(1786): n is a, c, g, or t
  misc_feature (1788)..(1788): n is a, c, g, or t
  misc_feature (1801)..(1801): n is a, c, g, or t
cgtgcggccgcagtaccagcgcttcatgcgcgacaactacccgcccggcttcagctacgccgacttcggaccgcagttcactgcgcgcttcttccacccggaggagtgggccgacctcttccaggccgcgggcgccaagtatgtagttttgacgacaaagcatcacgaaggcttcacaaactggccgagtcctgtgtcttggaactggaactccaaagacgtggggcctcatcgggatttggttggtgaattgggaacagctctccggaagaggaacatccgctatggactataccactcactcttagagtggttccatccactctatctacttgataagaaaaatggcttcaaaacacagcattttgtcagtgcaaaaacaatgccagagctgtacgaccttgttaacagctataaacctgatctgatctggtctgatggggagtgggaatgtcctgatacttactggaactccaaaaattatcctttcatggctctacaatgacagccctgtcaaggatgaggtggtagtaaatgaccgatggggtcagaactgttcctgtcaccatggaggatactataactgtgaagataaattcaagccacagagcttgccagatcacaagtgggagatgtgcaccagcattgacaagttttcctggggctatcgtcgtgacatggcattgtctgatgttacagaagaatctgaaatcatttcggaactggttcagacagtaagtttgggaggcaactatcttctgaacattggaccaactaaagatggactgattgttcccatcttccaagaaaggcttcttgctgttgggaaatggctgagcatcaatggggaggctatctatgcctccaaaccatggcgggtgcaatggggaaaagaacacaacatctgtatggtatacctcaaagggatcggctgtttatgccatttttctgcactggccagaaaatggagtcttaaaccttgaatcccccataactacctcaactacaaagataacaatgctgggaattcaaggagatctgaagtggtccacagatccagataaaggtctcttcatctctctaccccagttgccaccctctgctgtccccgcagagtttgcttggactataaagctgacaggagtgaagtaatcatttgagtgcaagaagaaagaggcgctgctcactgttttcctgcttcagtttttctcttatagtaccatcactataatcaacgaacttctcttctccacccagagatggcttttccaacacattttaattaaaggaactgagtacattaccctgatgtctaaatggaccaaagatctgagatccattgtgattatatctgtatcaggtcagcagaagaaggaactgagcagttgaactctgagttcatcaattgtaatatttggaaattatctacaatggaatcttccctctgttctctgataacctacttgcttactcaatgcctttaagccaagtcaccctgttgcctatgggaggaggtggaaggatttggcaagctcaaccacatgctatttagttagcatcagttgtcaccaacagtctttctgcaaagggcaggagagctttgggggaaaggaaaaggcttaccaggctgctatggtcaactcttcagaaattttcagagcaatctaaaagcgccaaaattcgctatgtttacagtgatactattaagaaaatgaatgtgattctgctctgtctttttaagtatgatcaaataaaaaatttgtacatcacaatcattttctacccntntcaactctgcagnctttccctgccctccggaattccggtc

SEQ ID NO: 68730 - DNA, 792 bp, Homo Sapiens
gggcgggggtcgcgctgcacagcctgcggcgcagcggaggcggaccgcagtcgagtctgcagagtgttggaatcgtccgcactaaagtcccctgcagcgtgaccatgtcgagaccccggaagaggctggctgggacttctggttcagacaagggactatcaggaaaacgcaccaaaactgagaactcaggtgaggcattagctaaagtggaggactccaaccctcagaagacttcagccactaaaaactgtttgaagaatctaagcagccactggctgatgaagtcagagccagagagccgcctagagaaaggtgtagatgtgaagttcagcattgaggatctcaaagcacagcccaaacagacaacatgctgggatggtgttcgtaactaccaggctcggaacttccttagagccatgaagctgggagaagaagccttcttctaccatagcaactgcaaagagccaggcatcgcaggactcatgaagatcgtgaaagaggcttacccagaccacacacagtttgagaaaaacaatccccattatgacccatctagcaaagaggacaaccctaagtggtccatgaagagtttgattttgttttgagcctggaggaaaaggaaccaagttaactgagatactgctgctggaatgggcgagacattgctgcaaagaagtcaagcttttttcagacaaaaggtgtgagggggcttgcttggtatgcttacctgggcttgtgtacctcagtggtttttgtgtacttttttcaataaaatatcaaagttgaagaaaa

SEQ ID NO: 68731 - DNA, 1201 bp, Homo Sapiens
  misc_feature (90)..(124): n is a, c, g, or t
gaaggaagctgatcatcactatagggcgctaactcgtcgagcgaacgaccgaggcgccagcagaggttcagtgagccgaggaagcggcgnnnnnnnnnnnnnnnnnnnnnnnnnnnnnnnnnnncagtcgacggtaccggacatatgcccgggaattcggccattacggccgggggctgcacagcctgcggcgcagcggaggcggaccgcagtcgagtctgcagagtgttgggtctgtagccagcaaattacttcatcatctagattatccattcagttgatcctaattagcaaggataacaagaatcgtccgcactaaagtcccctgcagcgtgaccatgtcgagaccccggaagaggctggctgggacttctggttcagacaagggactatcaggaaaacgcaccaaaactgagaactcaggtgaggcattagctaaagtggaggactccaaccctcagaagacttcagccactaaaaactgtttgaagaatctaagcagccactggctgatgaagtcagagccagagagccgcctagagaaaggtgtagatgtgaagttcagcattgaggatctcaaagcacagcccaaacagacaacatgctgggatggtgttcgtaactaccaggctcggaacttccttagagccatgaagctgggagaagaagccttcttctaccatagcaactgcaaagagccaggcatcgcaggactcatgaagatcgtgaaagaggcttacccagaccacacacagtttgagaaaaacaatccccattatgacccatctagcaaagaggacaaccctaagtggtccatggtggatgtacagtttgttcggatgatgaaacgtttcattcccctggctgagctcaaatcctatcatcaagctcacaaagctactggtggccccttaaaaaatatggttctcttcactcgccagagattatcaatccagcccctgacccaggaagagtttgattttgttttgagcctggaggaaaaggaaccaagttaactgagatactgctgctggaatgggcgagacattgctgcaaagaagtcaagcttttttcagacaaaaggtgtgagggggcttgcttggtatgcttacctgggcttgtgtacctcagtggtttttgtgtacttttttcaataaaatatcaaagttgaaacacccccgaaaaccccaaaaaacaaagg

SEQ ID NO: 68732 - DNA, 868 bp, Homo Sapiens
ggggcagcggaggcggaccgcagtcgagtctgcagagtgttgggtctgtagccagcaaattacttcatcatctagattatccattcagttgatcctaattagcaaggataacaagaatcgtccgcactaaagtcccctgcagcgtgaccatgtcgagaccccggaagaggctggctgggacttctggttcagacaagggactatcaggaaaacgcaccaaaactgagaactcaggtgaggcattagctaaagtggaggactccaaccctcagaagacttcagccactaaaaactgtttgaagaatctaagcagccactggctgatgaagtcagagccagagagccgcctagagaaaggtgtagatgtgaagttcagcattgaggatctcaaagcacagcccaaacagacaacatgctgggatggtgttcgtaactaccaggctcggaacttccttagagccatgaagctgggagaagaagccttcttctaccatagcaactgcaaagagccaggcatcgcaggactcatgaagatcgtgaaagaggcttacccagaccacacacagttttgagaaaaacaatccccattatgacccatctagcaaagaagacaacccctaagtgggtccatggtgggaggtacagttttggttccggatgaaggaaacggttttcatttccccctgggctggaagctcaaaatccttatcattcaaaggctcaccaaagcctacctggtggggccccctttaaaaaaataattgggtcctcctttcaaattcgcccaagaagaatttattcatttcccagcccccctgggaccccacgggaaagaagagtttggagaattttgggtttttttgaggcc

SEQ ID NO: 68733 - DNA, 503 bp, Homo Sapiens
cttcgctgtattgaaactggttcagtgttaaccaggcaagcatagttattcacaggttatttactttatgtttactaattctgcttagttattgttgaatatgttctgttccagattatttttattgttttgatgtttaaaacattttgcatactgtttatcataaaacttcatgaagtaaataattttgcatataattgcaataagcactgacttttgaactgaaaagaaggaaagtgtttttttgtgcagtgcttctgaggttcatataatagtcttgtactataatgtgctttactacacgataaatgacaaaaacaagccctgtttcatgtttcatttagtgcaaaaagtcagatttccccagtgttttgttgtctgttgtacctgctgaaactacagtagttgaatattgcggtagcatttcagttctctttttttattaaagtgctcaaaaattgttttttaaatgttttcaaaaacaattaaaaacattttatatt

SEQ ID NO: 68734 - DNA, 1167 bp, Homo Sapiens
  misc_feature (861)..(869): n is a, c, g, or t
  misc_feature (1076)..(1113): n is a, c, g, or t
gagcatgtgacctgcgtacagagcatcttggacgaattccttcaaacgtatggcagcctcatacccctcagcactgatgaggtagtagagaagctggaggacattttccagcaggagttttccaccccttccaggaagggcctggtgttgcagctgatccagtcttaccagcggatgccaggcaatgccatggtgaggggcttccgagtggcttataagcggcacgtgctgaccatggatgacttggggaccttgtatggacagaactggctcaatgaccaggtgatgaacatgtatggagacctggtcatggacacagtccctgaaaaggtggacatcttcaataaggagctactgctaatccccatccacctggaggtgcattggtccctcatctctgttgatgtgaggcgacgcaccatcacctattttgactcgcagcgtaccctaaaccgccgctgccctaagcatattgccaagtatctacaggcagaggcggtaaagaaagaccgactggatttccaccagggctggaaaggttacttcaaaatgaatgtggccaggcagaataatgacagtgactgtggtgcttttgtgttgcagtactgcaagcatctggccctgtctcagccattcagcttcacccagcaggacatgcccaaacttcgtcggcagatctacaaggagctgtgtcactgcaaactcactgtgtgagcctcgtaccccagaccccaagcccataaatgggaagggagacatgggagtcccttcccaagaaactccagttcctttcctctcttgccctcttcccactcacttcccctttgggttttcatattttaaatgtttcaatttctgtannnnnnnnnctttgagagaatacttgttgatttctgatgtgcaggggatggctacagaaaagcccctttcttcctctgtttgcaggggagtgtggccctgtggcctgggtggagcagtcatcctcccccttccccgtgcagggagcaggaaatcagtgctgggggtggtgggcggacaataggatcactgcctgccagatcttcaaacttttattnnnnnnnnnnnnnnnnnnnnnnnnnnnnnnnnnnnnnnaataaaaatgccacggtcctgctctggtcaataaaggatcctttgttgatacgt

SEQ ID NO: 68735 - DNA, 1167 bp, Homo Sapiens
  misc_feature (129)..(129): n is a, c, g, or t
  misc_feature (677)..(688): n is a, c, g, or t
gcacgaggggagaaacttgtattggagaacttaaaacatcacgaatatttttaataggatccgcagacacccaaaggagaagcttggtcttttccaggtatttccaacttgagttcaacccaaagcctntgaaaggaatgcattaccacatgaccacatgctgagaccccatggggtctaacacgggacctaagaaagtctctgcagccagatagtacatggtgtctccacaaaactaggcattctggagattgcccagaaagggatgtgaggggaccgttaagatctgtcttgcttatctcatgcactcacattccttcagcctcctggagttcctgataaaaggaagccagggtgtggacattttttagctattgatttcccaatagcttgtggatcagttgtacacccacacttccttctctgcctaattccgtttttctggaaaaagtagtatgcccatgtatgtgtgtttttcttaacacaggtccatgaaagtttggcttcctggtttgatgtctgttgcgtggcctggaaaccagggagcagcaactattgagatggtttctgtgttcagtgaaaaattctatttcattgagacaattttttctttatccacagtaattttttgacactgtcatcatgaaactacccttaggaaaataagattacctgcnnnnnnnnnnnngaaatgagttatggaataggaacagttatgtgatgattctgaaactttaacttagagcttcattactttaagaatggaaaacaacctctgagtttgatttcccaaagtttcataaagcccctaagctcatgattttcatcaactctttgcccacatagtcatttacctccacagccgtttgttgtcatagaaggggtggtggtgtttggatttgatttttttcaacttgcagtgagaaataggataggtgacaaaaccttacttgttttcttaagacaattcagtgcttgagcatctctgtcagaaatggaatgaaatactgttagccaattagaattattttatgtattgttattgtgttttgctgatttttatatgaaaatataattattcattcttgatctctggaagcaatcattattatgaggatcattttactttggaaacactttcataataaagataagtattaagaaaaa

SEQ ID NO: 68736 - DNA, 2365 bp, Homo Sapiens
  misc_feature (44)..(78): n is a, c, g, or t
  misc_feature (2111)..(2148): n is a, c, g, or t
  misc_feature (2266)..(2314): n is a, c, g, or t
caacgatcgagcgcagcgagttcagtgagcgaggaagcggccgnnnnnnnnnnnnnnnnnnnnnnnnnnnnnnnnnnncagtcgacggtaccggacatatgcccgggaattcggccattacggccggggagaaggtgagtgtctcctccagtcgcaacggccagacctgacctgccagctccgggcgtggggtgaaatctcttgattcctagtctctcgatatggcacctccgtcagtctttgccgaggttccgcaggcccagcctgtcctggtcttcaagctcactgccgacttcagggaggatccggacccccgcaaggtcaacctgggagtgggagcatatcgcacggatgactgccatccctgggttttgccagtagtgaagaaagtggagcagaagattgctaatgacaatagcctaaatcacgagtatctgccaatcctgggcctggctgagttccggagctgtgcttctcgtcttgcccttggggatgacagcccagcactcaaggagaagcgggtaggaggtgtgcaatctttggggggaacaggtgcacttcgaattggagctgatttcttagcgcgttggtacaatggaacaaacaacaagaacacacctgtctatgtgtcctcaccaacctgggagaatcacaatgctgtgttttccgctgctggttttaaagacattcggtcctatcgctactgggatgcagagaagagaggattggacctccagggcttcctgaatgatctggagaatgctcctgagttctccattgttgtcctccacgcctgtgcacacaacccaactgggattgacccaactccggagcagtggaagcagattgcttctgtcatgaagcaccggtttctgttccccttctttgactcagcctatcagggcttcgcatctggaaacctggagagagatgcctgggccattcgctattttgtgtctgaaggcttcgagttcttctgtgcccagtccttctccaagaacttcgggctctacaatgagagagtcgggaatctgactgtggttggaaaagaacctgagagcatcctgcaagtcctttcccagatggagaagatcgtgcggattacttggtccaatccccccgcccagggagcacgaattgtggccagcaccctctctaaccctgagctctttgaggaatggacaggtaatgtgaagacaatggctgaccggattctgaccatgagatctgaactcagggcacgactagaagccctcaaaacccctgggacctggaaccacatcactgatcaaattggcatgttcagcttcactgggttgaaccccaagcaggttgagtatctggtcaatgaaaagcacatctacctgctgccaagtggtcgaatcaacgtgagtggcttaaccaccaaaaatctagattacgtggccacctccatccatgaagcagtcaccaaaatccagtgaagaaacaccacccgtccagtaccaccaaagtagttctctgtcatgtgtgttccctgcctgcacaaacctacatgtacataccatggattagagacacttgcaggactgaaaggctgctctggtgaggcagcctctgtttaaaccggccccacatgaagagaacatcccttgagacgaatttggagactgggattagagcctttggaggtcaaagcaaattaagatttttatttaagaataaaagagtactttgatcatgagacataggtatcttgtccctctcactaaaaaggagtgttgtgtgtggcggccacgtgcttctatgtggtgtttgactctgtacaaattctagtcccaaagatcaagttgtctgaaggagccaaagtgtgaatgtgggtgtcggctgcggcattaaattcatcatctcaacccagagtgtctggtctccctgctctttctgcatggttgtgtccctagtcctaagctttggttctttagggtgactgtggtaagaaggatatttaatcatgacatgcacggacacgtacatatttaactgaaacaagttttaccaaacagtatttactcgtgatgtgcgtagtgcattctgatatttttgagccattctattgtgttctacttcacctnnnnnnnnnnnnnnnnnnnnnnnnnnnnnnnnnnnnnntgaatttgtattaacgcgggtaaagaaggaaccctacaaccaacgtcacaagcgcatacttaaatttgggggcccccctccgccccctaaaaaaacttttctaaaaaacttccgtttnnnnnnnnnnnnnnnnnnnnnnnnnnnnnnnnnnnnnnnnnnnnnnnnnccccccaaagaaagaaccctgggtataagaaattatagggctttggaaatt

SEQ ID NO: 68737 - DNA, 993 bp, Homo Sapiens
  misc_feature (200)..(200): n is a, c, g, or t
  misc_feature (892)..(892): n is a, c, g, or t
cacacccaagttagcctgagttgactctcattgttcccctatctacccacagtccccatccaacacgaagaaatatttgctttcacattacagcataaagaccacctaagctttgacagctgacttgtagtgggtcagcgtgcgggcagaagggtcagtggcattgatccacttgggcatccagtaatggctcaacccantcagcccggcctgggtaatggcgttcaaagacttgacggtagtaatatccttctttggttttaggagtattgaagggaaatttctgggctgcatttgccatcattgcatcatcaacctgtaagaataagcatataagagcaaaatggtttaaaatggcaggaaatacttgtgtttagtctcatttcacgaaacagaaaatgttaagacgtgactgtaacttgtatgagaccctttgaatcacccatcacttagaaaatgctaaagtattcataatatggatagctgcagtgccttttaaagaacactcatatgcatatttttaatacttggtggctctgttttagtcatttgtgcctaacaagatctggcacccagcaggtgcccaaaaatctgataaatgaaaatcagtgatgattagtagtaagtctcctctctctctcgattctagatgctactttataatccttcatgctacttaattcttacgtaattcttacaaaagagataattgtttacagagactctgaatctctctgatagggacatcctatcagagagatatctgatgtatgtatcattcaaactaaatacatgtatcattcaaactaaatacatgtatcattcaaactaaatacaaaatgaacagcaatgacagctctgcatccaaactgtcttattcctgaaaatgttnttaaagacattatacctgatgttcaacgtattcctgtaaaatcttaaaccaagaattcctaactgaagttattccatcactgaaaggcttcttttggtcgc

SEQ ID NO: 68738 - DNA, 2574 bp, Homo Sapiens
  misc_feature (2018)..(2139): n is a, c, g, or t
  misc_feature (2147)..(2161): n is a, c, g, or t
  misc_feature (2236)..(2299): n is a, c, g, or t
  misc_feature (2402)..(2413): n is a, c, g, or t
ggcacgaggcgcaggcatgatgaaacttcccgcacgcgttacaggagccaggtcggtataagcgccagcggcctcgccgcccgtcaagctgtccacatccctggcctcagcccgccacatcaccctgacctgcttacgcccagattttcttcaatcacatctgaataaatcacttgaagaaagcttatagcttcattgcaccatgtgtggcatttgggcgctgtttggcagtgatgattgcctttctgttcagtgtctgagtgctatgaagattgcacacagaggtccagatgcattccgttttgagaatgtcaatggatacaccaactgctgctttggatttcaccggttggcggtagttgacccgctgtttggaatgcagccaattcgagtgaagaaatatccgtatttgtggctctgttacaatggtgaaatctacaaccataagaagatgcaacagcattttgaatttgaataccagaccaaagtggatggtgagataatccttcatctttatgacaaaggaggaattgagcaaacaatttgtatgttggatggtgtgtttgcatttgttttactggatactgccaataagaaagtgttcctgggtagagatacatatggagtcagacctttgtttaaagcaatgacagaagatggatttttggctgtatgttcagaagctaaaggtcttgttacattgaagcactccgcgactccctttttaaaagtggagccttttcttcctggacactatgaagttttggatttaaagccaaatggcaaagttgcatccgtggaaatggttaaatatcatcactgtcgggatgaacccctgcacgccctctatgacaatgtggagaaactctttccaggttttgagatagaaactgtgaagaacaacctcaggatcctttttaataatgctgtaaagaaacgtttgatgacagacagaaggattggctgccttttatcagggggcttggactccagcttggttgctgccactctgttgaagcagctgaaagaagcccaagtacagtatcctctccagacatttgcaattggcatggaagacagccccgatttactggctgctagaaaggtggcagatcatattggaagtgaacattatgaagtcctttttaactctgaggaaggcattcaggctctggatgaagtcatattttccttggaaacttatgacattacaacagttcgtgcttcagtaggtatgtatttaatttccaagtatattcggaagaacacagatagcgtggtgatcttctctggagaaggatcagatgaacttacgcagggttacatatattttcacaaggctccttctcctgaaaaagccgaggaggagagtgagaggcttctgagggaactctatttgtttgatgttctccgcgcagatcgaactactgctgcccatggtcttgaactgagagtcccatttctagatcatcgattttcttcctattacttgtctctgccaccagaaatgagaattccaaagaatgggatagaaaaacatctcctgagagagacgtttgaggattccaatctgatacccaaagagattctctggcgaccaaaagaagccttcagtgatggaataacttcagttaagaattcctggtttaagattttacaggaatacgttgaacatcaggttgatgatgcaatgatggcaaatgcagcccagaaatttcccttcaatactcctaaaaccaaagaaggatattactaccgtcaagtctttgaacgccattacccaggccgggctgactggctgagccattactggatgcccaagtggatcaatgccactgacccttctgcccgcacgctgacccactacaagtcagctgtcaaagcttaggtggtctttatgctgtaatgtgaaagcaaatatttcttcgtgttggatggggactgtgggtagataggggaacaatgagagtcaactcaggctaacttgggtgtgaaaaaaataaaagtcctaaatctannnnnnnnnnnnnnnnnnnnnnnnnnnnnnnnnnnnnnnnnnnnnnnnnnnnnnnnnnnnnnnnnnnnnnnnnnnnnnnnnnnnnnnnnnnnnnnnnnnnnnnnnnnnnnnnnnnnnnnnnnttgggggnnnnnnnnnnnnnnnaaaaaatttttaaaaccttttcttttgggggcggggccccctttgggaaagggaacggggccaaacctgttcccnnnnnnnnnnnnnnnnnnnnnnnnnnnnnnnnnnnnnnnnnnnnnnnnnnnnnnnnnnnnnnnncccggggttttctaacaaaacccaaaagggggcccccggaggcccttcgggggctctattaaaagggggatcccaagggaaacccctcaaaaacaaaatttannnnnnnnnnnntttggccattttttgtgaaaaagaagggcggggaatattaaataaaaaaatttttcgcgccaacattgggaaacaccctctcacaaacggcggtttgattgaaaccctgaaattccccccacgggggaatctcccaccctcttggccgcccttgtgcgatt

SEQ ID NO: 68739 - DNA, 564 bp, Homo Sapiens
gtcgatctacggatcttgctcccactggtgctgcactcggttgaagcagctgaaagaagcccaagtacagtatcctctccagacattggcaatgggcatggaagacagccccgatttactggctgctagaaaggtggcagatcatatgggaagtgaacattatgaagtcctttttaactctgaggaaggcattcaggctcgggatgaagtcatatttgcctgggaaaacttatgacattacaacagttcgtgcttcagtaggtatgtatttaatttccaagtatattcggaagaacacagatagcgtggtgatcttctctggagaaggatcagatgaacttacgcagggttacatatattttcacaaggattggagagggagaaagaaaaactgctttgtgtgccaaaagcaaaactcttggtgtttcggtttgtgaaataggctccttctcctgaaaaagccgaggaggagagtgagaggcttctgagggaactctattcgtctgatgttctccgcgcagatcgaactactgctgcccatggtcttgaactgagactcccatc

SEQ ID NO: 68740 - DNA, 381 bp, Homo Sapiens
tgtgagccactgcgcctggcctctatgtttaacttttgagaagtctcttgattcttgccactacgaggtgattttatccaactattacaggaaagaaaatgggagctcagaaggttggactgcttgttcaaagtcacctagctagagagctgcgcagctggaactagtatacaagtctagctgttgaaagcaccctgagcacgttacctcatgctgtaccttgcatgtcttgttgtttccaattttcagatgaagaaacagttccacacactaagagacttaacgagggtacagttagtttcaggagagctggtagttttcattccgtttagaactggacctggtaactgttgattatcctaataaatgcacttcattttt

SEQ ID NO: 68741 - DNA, 970 bp, Homo Sapiens
  misc_feature (317)..(345): n is a, c, g, or t
  misc_feature (865)..(895): n is a, c, g, or t
attttagttgttgtgctaaactcaataatgctgttctaactacagtgctcaataaaatgattaatgacaggatggggttcccctgtgcttttaccagtagcatgaccccttctgaagccatccgtagaaagtactttgtcctccaaaaagctaacatacggttttgaagcagcattgaaacttttgtagcaatctggtctatagacttttaactcaagaagctaaggctagacttgttaccttcgttgaatgatgttagttgactgtactgtaatgttgtatcaactgaattgaatgtttgcctttaaacaatgaannnnnnnnnnnnnnnnnnnnnnnnnnnnngttgtaatagttaaagaggcttagaacaagctaacaggcaatagaaatatgtatatcagattttttaatgtaacaaactacatgttaattgttatcttattctttttatctttagtagacacttttaaaagaaaagacaattttgttgtgtttaactcaccaacacgtggtgtataatgaagacagaactataataaattagttttgttctgattttttagaacacttgcaataatgtatcatttatagttcttgctagttgcagtggtaatatttttcacatccataaaaacaactaccaaaataaatcagctgtagcatgttgctttttaaagctaggccctaaaaggttttaattctttttctaagggaagaaatgtctattttaattaagatattttaatgaacaggatttctgtattttaaatagtactgactagcacctaatgggcagtgggagggtggttcatatgaagaaaaaaaggtgtattgttgtatcccatgcataaataaaggtaannnnnnnnnnnnnnnnnnnnnnnnnnnnnnnctcacacacatcccaacctgtcacacacaatgcgtgtgtatatatatatgaatatattggatatgtcatttctgt

SEQ ID NO: 68742 - DNA, 706 bp, Homo Sapiens
  misc_feature (93)..(93): n is a, c, g, or t
  misc_feature (437)..(497): n is a, c, g, or t
cgaggttgatctcagcactgaacgatttcaagccctacgcaccagaacagaaggagggtggaggaagtgatcagagggaacgagctgtaggtntgcagaaatgtgtgaaaccaaaatgatcactgcctacttgtgattcaaatcttcagagttttcctagttcttctagaaatacatgtcaggtttgtttgttcatcctttctgtcagcatggatcaagcccctaaaatgtggtaagtgttgtcagagcagggcaatatctctactctcaagtatgaggggaatagaaacaaagcagcagttttagccagggttcaatgatagagtggaggtaaattaagagcctccaggctgtgattcaccatttgagacattatacataatttgtttttgttataagccatttgaatttttaaaaaatttcatacatgcaatggnnnnnnnnnnnnnnnnnnnnnnnnnnnnnnnnnnnnnnnnnnnnnnnnnnnnnnnnnnnnnacaataaacaaacccctgtgtgcctaccacccaccttattgcctttcctttgaggtaccgtgtgcggtttcctgaacctatctctatccctgtctgatagagggaacccctgtactgaactttgtgttgaccatagccttcttgtctttcatcactttatctccatgtatgtatccttaaagaataataaatggaattaaactgaatgt

SEQ ID NO: 68743 - DNA, 1014 bp, Homo Sapiens
  misc_feature (751)..(807): n is a, c, g, or t
cagtcgacggtaccggacatatgcccgggaattcggccattacggccggggcacgagggtgttgggaggacaccacagattcatctcagacagtgatcaggactgaggatggagttaaatcactcagcccctgggtggggtggggtggttcaaatggatgactgatctcctgagtacactgaagccacaggctggtggccatgttctctgaattgggtgcagaagacaagggcagagtggctgcggcccctattacctttgtagcagccacatcagaaagcagaagaaaacagtatttctgaacggcattgtttgaggttgatctcagcactgaacgatttcaagccctacgcaccagaacagaaggagggtggaggaagtgatcagagggaacgagctgtaggtttgcagaaatgtgtgaaaccaaaatgatcactgcctacttgtgattcaaatcttcagagttttcctagttcttctagaaatacatgtcaggtttgtttgttcatcctttctgtcagcatggatcaagcccctaaaatgtggtaagtgttgtcagagcagggcaatatctctactctcaagtatgaggggaatagaaacaaagcagcagttttagccagggttcaatgatagagtggaggtaaattaagagcctccaggctgtgattcaccatttgagacattatacataatttgtttttgttataagccatttgaatttttaaaaaatttcatacatgcaatggannnnnnnnnnnnnnnnnnnnnnnnnnnnnnnnnnnnnnnnnnnnnnnnnnnnnnnnnatgacaataaacaaacccctgtgtgcctaccacccaccttattgcctttcctttgaggtaccgtgtgcggtttcctgaacctatctctatccctgtctgatagagggaacccctgtactgaactttgtgttgaccatagccttcttgtctttcatcactttatctccatgtatgtatccttaaagaataataaatggaattaaactg

SEQ ID NO: 68744 - DNA, 410 bp, Homo Sapiens
  misc_feature (146)..(178): n is a, c, g, or t
gcagcagttttagccagggttcaatgatagagtggaggtaaattaagagcctccaggctgtgattcacccatttgagacattatacataatttgtttttgttataagccatttgaatttttaaaaaatttcatacatgcaatggannnnnnnnnnnnnnnnnnnnnnnnnnnnnnnnngctaaagtataaagagtaataataatgacaataaacaaacccctgtgtgcctaccacccaccttattgcctttcctttgaggtaccgtgtgcggtttcctgaacctatctctatccctgtctgatagagggaacccctgtactgaactttgtgttgaccatagccttcttgtctttcatcactttatctccatgtatgtatccttaaagaataataaatggaattaaactga

SEQ ID NO: 68745 - DNA, 1831 bp, Homo Sapiens
gggtccgtcttgtttgcaggaaagaggttggtaccggggggggtgatgacctgtgcacatggcttgagcttcccttgctgccaggcactcgtggcatctcttgctcaccaggtagatgagctccacgaggttgagcaggatgcagatggcagctgtggccaccatgaagagggtgaaaatgttcttctctgagggcttggagatgaagcagtccactatatttgggacatggatctgcgtggcacttgaccacaggagggaggatatatttggggtagaatgagtggaacacatagagaaaggcgatgtccacgctcgctttgaacactaggctgcagacatatgtccaccagagcccaccccgcttcttgccggggttcaggtagaggcgcccactgttctccccatgggcttctcggtgcctcttctcctgaacctcccggtaggccacgtgcatgaccacgagcagtgaggggcatgtcaccaggataagctgcagggcccagaggcgcacatgggacacagggaagaactcatcaaagcagacgttggagcagccgggctggcgagtattgcagtcgaagtccttgtggtcatcactccacacacgctcggccgtcaccaggtacaccagcacgcggaagatgaagaccagagacagccagatgcgcccaaaggctgtggagtacttgttgaccccactcaggagtccctcaaagatactccagttcatggtggacccacgcgtcagctgctactgagtgactactcctcagggctctcctggctcccagcagccggcaataggactcagcaagcagcttgaatttcatatccagaagcggggaaggttttcggggaagcccgttgaagcctgtgggccctgcagcttatcctggtgacatgcccctcactgctcgtggtcatgcacgtggcctaccgggaggttcaggagaagaggcaccgagaagcccatggggagaacagtgggcgcctttacctgaaccccggcaagaagcggggtgggctctggtggacatatgtctgcagcctagtgttcaaggcgagcgtggacatcgcctttctctatgtgttccactcattctaccccaaatatatcctccctcctgtggtcaagtgccacgcagatccatgtcccaatatagtggactgcttcatctccaagccctcagagaagaacattttcaccctcttcatggtggccacagctgccatctgcatcctgctcaacctcgtggagctcatctacctggtgagcaagagatgccacgagtgcctggcagcaaggaaagctcaagccatgtgcacaggtcatcacccccacggtaccacctcttcctgcaaacaagacgacctcctttcgggtgacctcatctttctgggctcagacagtcatcctcctctcttaccagaccgcccccgagaccatgtgaagaaaaccatcttgtgaggggctgcctggactggtctggcaggttgggcctggatggggaggctctagcatctctcataggtgcaacctgagagtgggggagctaagccatgaggtaggggcaggcaagagagaggattcagacgctctgggagccagttcctagtcctcaactccagccacctgccccagctcgacggcactgggccagttccccctctgctctgcagctcggtttccttttctagaatggaaatagtgagggccaatgcccagggttggagggaggagggcgttcatagaagaacacacatgcgggcaccttcatcgtgtgtggcccactgtcagaacttaataaaagtcaactcatttgctggt

SEQ ID NO: 68746 - DNA, 1507 bp, Homo Sapiens
  misc_feature (49)..(90): n is a, c, g, or t
  misc_feature (93)..(127): n is a, c, g, or t
cttgaattcaattgaacccttaacataaatggggccgccgctttgtatnnnnnnnnnnnnnnnnnnnnnnnnnnnnnnnnnnnnnnnnnncgnnnnnnnnnnnnnnnnnnnnnnnnnnnnnnnnnnncagtcgacggtaccggacatatgcccgggaattcggccattacggccggggactcatctctgcgcgtctcttcgccacattcgcttcctgctttcggtgtgtctgttgtgtcttgttgcgggcaccgcagtcgccgtgaagatggcgtctaccagccgtttggatgctcttccaagagtcacatgtccaaaccatccagatgcgattttagtggaggactacagagccggtgatatgatctgtcctgaatgtggcttggttgtaggtgaccgggttattgatgtgggatctgaatggcgaactttcagcaatgacaaagcaacaaaagatccatctcgagttggagattctcagaatcctcttctgagtgatggagatttgtctaccatgattggcaagggcacaggagctgcaagttttgacgaatttggcaattctaagtaccagaatcggagaacaatgagcagttctgatcgggcaatgatgaatgcattcaaagaaatcactaccatggcagacagaatcaatctacctcgaaatatagttgatcgaacaaataatttattcaagcaagtatatgaacagaagagcctgaagggaagagctaatgatgctatagcttctgcttgtctctatattgcctgtagacaagaaggggttcctaggacatttaaagaaatatgtgccgtatcacgaatttctaagaaaagaaattggtcggtgttttaaacttattttgaaagcgctagaaaccagtgtggatttgattacaactggggacttcatgtccaggttctgttccaacctttgtcttcctaaacaagtacagatggcagctacacatatagcccgtaaagctgtggaattggacttggttcctgggaggagccccatctctgtggcagcggcagctatttacatggcctcacaggcatcagctgaaaagaggacccaaaaagaaattggagatattgctggtgttgctgatgttacaatcagacagtcctatagactgatctatcctcgagccccagatctgtttcctacagacttcaaatttgacaccccagtggacaaactaccacagctataaattgaggcagctaacgtcaaattcttgaatacaaaactttgcctgttgtacatagcctatacaaaatgctgggttgagcctttcatgaggaaaaacaaaagacatggtacgcattccagggctgaatactattgcttggcattctgtatgtatatactagtgaaacatatttaatgatttaaatttcttatcaaatttcttttgtagcaatctaggaaactgtattttggaagatatttgaaattatgtaattcttgaataaaacatttttcaaaactcaaaaaaaa

SEQ ID NO: 68747 - DNA, 1047 bp, Homo Sapiens
cagtcgacggtaccggacatatgcccgggaattcggccattacggccgggggtttatgtgcaaagtgaaaacaaattttgaaaaataagacaaatccattctcttcttcaattcagtctaatatgcattgtagtgtcttttaatcagtcttatcctctaagtcaacttcattttcctcttttgtgaatacccatagcaatatgtaagattttattgaagtttcctgtgataactgaggaacactttgctatgcctcactgcccaatagggtgggtcatcaattaggagaaatcccaaattataaaagccaacatatgccgtgacctacgtaggaaaagatgtatttgtgcatcttctttctgggtagttaaaaattactccctcttttctctagcattttgacatttcagactcaatgctctgatctctagggagtgtgattattcaaactaatgagaggacaagaagacacagttttagaatctactgctgctaaagcacattaaaaacaaatcctggtttttaatgtatgcatagtttcatatttaatgaatatgctttcattaaatagggaggtagatttgaaaaaactgttataaagaaatgtgccttttggggaatgaatacttttgttcatgtctagcccactgggaattttgttttcaccttatactgagtcctttttctaatgtaaaaatatttcttccaagtttgatttctgtatcagggtaacattgagaacacacatatttctgtttgaggatttgtgacttcctatggaaacagtcttgcatctatgtatttacaaatgaaatttaaagtattcttaaagctttgccttaaatactgcttgcatactgatttacttaatgctaagcatggcaggggttataaatttaaatactataagacctggctgaatcccagatgtatcaataaattgttatagtagcttatggaaaatgctattaaagataaattttcatacattgtatttttagtcaagtaaaacatggactcaaaattaataaagtactgtaaagggaa

SEQ ID NO: 68748 - DNA, 871 bp, Homo Sapiens
  misc_feature (42)..(102): n is a, c, g, or t
agtaaggagagagaaatggacaagaaagatttggacaagtcnnnnnnnnnnnnnnnnnnnnnnnnnnnnnnnnnnnnnnnnnnnnnnnnnnnnnnnnnnnnngtgagatcggactggaactgttcggctgcgaccagaaattattttcctgagtaaattgccgagaattaagaatgaagagggccatttgcatctccttaaattattcagttacctgctttattgctccatgtggaaaacttaaaattgttaagttgtgcattactgtattttaacttgttgcttagtttctacatgtttattttcagtaatggctgaaagtgttaactgttccatacttttagcacaatgtgctgcataaggttacctgtgtacagagttttactttagattaactaaatattgcctgggttcagtttttatttccattctgaaatgcttcctttttattgtttgaaactgaaaataaacaattgttgaacccttttgattttacctcattttaaaactgttttaatttattatttggcttgttcttaatattagtcactaaaagcagtgggagcattgtcttatgaaatgcttaggaatcattttatatagtacatgtacaacattaaacgtgtttaaaaaagaaaaaggtaccagcgatcacttgtcccttgccattttttcttgtaattatgttagacaaatcttggcggcggggggatcaaaacataattgttttaattctacagctgtaggagctttgtattgctgaactttcatctggaaaagtttcacagtgacatttttaaaagagaatttttttatctgccgaattctaccagtgtaaccttttttctaaataaacaatagttttctcaaa

SEQ ID NO: 68749 - DNA, 1600 bp, Homo Sapiens
  misc_feature (225)..(288): n is a, c, g, or t
cgaaggcggaggtggagcccgagagggaaccagcggggaaactgaggctcggggtggaccgcaggattgtgggacgcgccaaggctgctgtctttcccagcagcagcggaagatgtcggacagcgaggacagcaacttttccgaggaggaggacagcgagcgcagcagtgacggcgaggaggccgaggtagacgaagagcggcggagtgcagcgggcagtgagannnnnnnnnnnnnnnnnnnnnnnnnnnnnnnnnnnnnnnnnnnnnnnnnnnnnnnnnnnnnnnnggaagaagatgatgaccgaccccccaagaaaccccgccatgggaggcttcattctggacgaggctgatgttgacgatgagtatgaggacgaggaccagtgggaggatggagcagaggacattctagagaaagaagagattgaagcctccaatatcgataatgttgtcctggatgaagatcgttctggggctcgccgcctgcaaaacctctggagggaccagcgagaagaagaactgggcgagtattacatgaagaaatacgccaagtcatctgtgggagagacggtgtatggaggatctgatgagctctcagacgacatcacccagcagcagctgctcccaggagtcaaggatcccaatctgtggactgtcaaatgtaagattggggaggaacgggccacggccatttccttgatgcgcaagttcattgcctaccagttcacagacacgcccctgcagatcaagtcagtagtggcaccagagcatgtgaagggctacatctacgtggaggcctacaagcagacccacgtgaagcaggccattgagggggtgggcaacctgcggcttggctactggaaccagcagatggtgcccatcaaggagatgacagacgtgctcaaagtggtgaaggaggtggccaacctgaaaccaaagtcctgggtccgcctcaagcggggcatctacaaggatgacattgctcaggtggactacgtggagcccagccagaacaccatctccctgaagatgatcccacgcatcgactacgatcgcatcaaggcccgcatgagcttgaaagactggtttgccaaaaggaagaagtttaagcggcctccacagaggctgtttgatgctgagaagatcaggtccctggggggtgatgttgcctctgatggtgacttcctcatctttgaggggaaccgttacagccggaagggctttctgttcaagagcttcgccatgtctgctgtgatcacggagggtgtgaagccaacactctctgagctggaaaagtttgaggaccagccagagggcattgacctggaggtggtgactgagagcacagggaaggagcgggagcacaacttccaacctggggacaacgtggaggtctgtgagggtgagctcataacctgcagggcagatcctcagcgtgaatggcaacagatcacatcatgcccagcatgagacctcaggacatgttgagttccagcccagaactagaatactcagatgggacactgaaggatgctgcgattcagcgacagctctggcgtgagaattctactgtctacccagctgactaggtccgacga

SEQ ID NO: 68750 - DNA, 992 bp, Homo Sapiens
tctaaggtagcgaggcctgggtggcgaattcggcacgaggcttcgccatgtctgctgtgatcacggagggtgtgaagccaacactctctgagctggaaaagtttgaggaccagccagagggcattgacctggaggtggtgactgagagcacagggaaggagcgggagcacaacttccaacctggggacaacgtggaggtctgtgagggtgagctcatcaacctgcagggcaagatcctcagcgtggatggcaacaagatcaccatcatgcccaagcatgaggacctcaaggacatgttggagttcccagcccaggaacttagaaaatacttcaagatgggggaccacgtgaaggtgattgctggccgattcgagggcgacacaggcctcattgtgcgggtggaggagaatttcgttatcctgttctctgacctcaccatgcatgagctgaaggtgctcccccgggacctgcagctctgctcagagacagcatcaggtgtggatgttgggggccagcatgaatggggcgagctggtgcagctggatccccagactgtgggtgtcatcgtgcgactagaacgggagaccttccaggtgctgaacatgtacgggaaggtggtgactgtcagacatcaggctgtgacccggaagaaggacaaccgctttgctgtggccttggactcagagcagaacaacatccatgtgaaagacatcgttaaggtcattgatggcccccactcaggccgaggaaggggagattcgccatctcttccgaagcttcgccttctacattgcaagaaactggtgggagaccgggggcatgtttgtctgcaagacccgccacctggtggctggctgggggctcaaaggccccgtgatgtgaccaactttcccggggggtgggctttgcccctatgagtccccggaatcagcaagccccatggcacccccagtgctgggagggcaaccggggcgggcttttgggaaaccccc

SEQ ID NO: 68751 - DNA, 794 bp, Homo Sapiens
gtggagcccagccagaacaccatctccctgaagatgatcccacgcatcgactacgatcgcagtcaaggcccgcatgagcttgaaagactggtttgccaaaaggaagaagtttaagcggcctccacagaggctgtttgatgctgagaagatcaggtccctggggggtgatgttgcctctgatggtgacttcctcatctttgaggggaaccgttacagccggaagggctttcggttcaagagcttcgccatgtctgctgtgatcacggagggtgtgaagccaacactctctgagctggaaaagtttgaggaccagccagagggcattgacctggaggtggtgactgagagcacagggaaggagcgggagcacaacttccaacctggggacaacgtggaggtctgtgagggtgagctcatcaacctgcagggcaagatcctcagcgtggatggcaacaagatcaccatcatgcccaagcatgaggacctcaaggacatgttggagttcccagcccaggaacttagaaaatacttcaagatgggggagccacgtgaaggtgattgctggccgattcgagggcgacacaggcctcatttgtgcgggtggaggagaatttccgttatcctgttctctgacctcaccatgcatgagctgaaggtgctcccccgggacctgcagctctgctcagagacagcatcaggtgtggatgtagggggccagcctgattggggcgaacctggtgcagttggaatcccagactgggggttgtatcgttgcgaactagaacgggagacct

SEQ ID NO: 68752 - DNA, 1642 bp, Homo Sapiens
aacggcggcatgtttgtctgcaagacccgccacctggtgctggctgggggctcaaagccccgtgatgtgaccaacttcaccgtgggtggctttgcgcctatgagtccccggatcagcagccccatgcaccccagtgctggaggtcagcgtggcggctttggtagcccaggtggcggcagtggtggcatgagcaggggccggggccggagggacaacgaactcatcggccagaccgtgcgcatctcccaggggccctacaaaggctacatcggtgtggtgaaagatgccacagagtccacggcccgtgtggagctgcactccacctgccagaccatctctgtggaccgtcagcggctcaccacggtgggctcacggcgcccgggcggcatgacctcgacctatgggaggacgcccatgtatggctcccagacgcccatgtatggctctggctcccgaacacccatgtacggctcacagacacccctccaggatggtagccgcaccccacactacggctcacagacgcccctgcatgatggcagccgcactcctgcccagagtggggcctgggaccccaacaaccccaacacgccgtcacgggctgaggaagaatatgagtatgctttcgatgatgagcccaccccgtccccgcaggcctatgggggaacccccaatccccaaacacctggctacccagacccctcgtccccacaggtcaacccacaatacaacccgcagacgccagggacgccggacatgtacaacacagaccagttctctccctatgctgccccctccccacaaggttcctaccagcccagccccagcccccagagctaccaccaggtggcgccaagcccagcaggctaccagaatacccactccccagccagctaccaccctacaccgtcgcccatggcctatcaggctagccccagcccgagccccgttggctacagtcctatgacacctggagctccctcccctggtggctacaacccacacacgccaggctcaggcatcgagcagaactccagcgactgggtaaccactgacattcaggtgaaggtgcgggacacctacctggatacacaggtggtgggacagacaggtgtcatccgcagtgtcacggggggcatgtgctctgtgtacctgaaggacagtgagaaggttgtcagcatttccagtgagcacctggagcctatcacccccaccaagaacaacaaggtgaaagtgatcctgggcgaggatcgggaagccacgggcgtcctactgagcattgatggtgaggatggcattgtccgtatggaccttgatgagcagctcaagatcctcaacctccgcttcctggggaagctcctggaagcctgaagcaggcagggccggtggacttcgtcggatgaagagtgatcctccttccttccctggcccttggctgtgacacaagatcctcctgcagggctaggcggattgttctggatttccttttgtttttccttttagttttccatcttttccctccctggtgctcattggaatctgagtagagtctgggggagggtccccaccttcctgtacctcctccccacagcttgcttttgtcgtaccgtctttcaataaaaagaagctgtttggtgctaaa

SEQ ID NO: 68753 - DNA, 2130 bp, Homo Sapiens
tgagggcgagagagtatgaagtcgacggcgcgccgaattcggcacgaggagaaaagcctgccattgctccgcccgtctttgtgtttcagaaggataaaggacaaaagaggtcagctggcggctccagtcctgaaggcggagaagattctgacagagaagatggaaattactgccctcctgtcaagcgagaaagaacatcctctttaacccagttcccaccctcacagtcagaggaaaggagcagtggcttccggttgaagccaccaacgctgatccacggccaagcccccagcgcaggtctgccaagccagaagcccaaggagcagcagcggagcgtgcttcgcccggcagtgttacaagctccgcagccaaaggcgctgtcccagactgtccccagcagtggcaccaacggggtcagcctcccagcagactgcacgggggcagtgcccgcagcatcccctgacactgctgcatggagaagtccttccgaagctgccgatgaggtgtgtgcacttgaggagaaagagccccagaaaaatgagtccagcaatgcctctgaagaggaagcctgtgagaaaaaagaccccgccacacagcaagcctttgtatttgggcagaacttgagggacagagttaagctgataaatgagagcgtggacgaagccgacatgaagaatgctggacaccccagcgcagacacgccaaccgcaacgaactatttcctccagtatatcagttccagtttagagaactcaaccaatagtgccgacgcctccagcaacaaatttgtatttggccagaacatgagcgagcgagttttgagccccccaaaattaaacgaggtcagttcagatgccaacagggaaaatgcagctgccgagtcagggtctgagtcctcgtcccaggaggccacccctgagaaagagtccctggctgagtcggcagccgcctacaccaaggcaacagcgcggaagtgtttgttggaaaaagtggaagtcatcaccggggaggaggcggagagcaatgtgttacagatgcagtgcaagctgtttgtctttgacaagacctcacagtcctgggtggagagaggccgggggctgctcagactcaatgacatggcgtccaccgatgacggcacactacagtcccgactagtgatgcggacccaggggagcctgcgactgatcctcaacaccaagctgtgggcccagatgcagatcgacaaggccagcgagaagagcattcgcatcacagccatggacaccgaggaccagggcgtgaaggtcttcctgatctcggccagctccaaggacacaggtcagttgtatgcagccctgcaccaccgcatcctggccctgcgcagccgcgtggagcaggagcaggaggccaagatgcccgcgcctgagcctggggcagccccatccaacgaggaggacgacagcgacgatgacgatgtcctggctccttcaggggccaccgcagctggtgctggtgacgaaggggacgggcagacgaccgggagcacatagcggccgggagcccggctgcacaccaggctgctgctttgtccgtctatccacccgcccacccgcccccaccccaccggcagcgtccaggtgcggggccgggaaccacacaccccactgggccggccacagtctggacccgcacgtcctgttcaaaagcagactcgggaactgcctgaatgtggtttgggacacgagacctcatcatattgatgagcgaacaaacaagaacatttcctccctcccctcctttgaattgaaatggcacattaagacttgtcacggcttctcactgggactggagacctcgttccttcaccccgcgtgtcgccagcctctgggtccagccagagcccctggcttctccgccacccacacccttcccaccctgctgtggggccctgcctttgtggggagcagccagccagcaagcctgagcccgggaagaaccagaggccctcccgagagacccagtcacacgtctctgctttaagccttagccagctagtgacgagtacaacgagataacgcccattgtgttttggaacatttatgtaagattgtcatatgaaatgtatttgggaactacattaaacttttaact

SEQ ID NO: 68754 - DNA, 1080 bp, Homo Sapiens
  misc_feature (869)..(896): n is a, c, g, or t
tttagttaaaagtttaatgtagttcccaaatacatttcatatgacaatcttacataaatgttccaaaacacatgggcgttatctcgttgtactcgtcactagctggctaaggcttaaagcagagacgtgtgactgggtctctcgggagggcctctggttcttcccgggctcaggcttgctgggggctgggggccagggctctggcgacctaaaggtgtggacggcacagctgcaggaggccttctcttaaccctccgagagtgggactgggagatttcctctgaagtcccaaagaggccctgtgcccaggggacctcctcctcggcctcccaggtgggtggtgcaagctggctcttggccatgctccaggctcgggtgggcacaggcgtccactccagtgtgctgcgtgcttgtgagactgcctgttctgggaccagcccctgggctcttccaccaagatttggtgagggtccccctctgcctctcacagaagcccctggccctggactgtcctgggggcagggacacctgtggctggggaagggatggccaacagcgggaagcagtttgcgcctggtgcctgatgatggtgaaccacgtgacagatggagacgggagtcaggggaccctggggacccttccaggtccagtgaccttttcccagacaggcactctccaggcctaggacagacagggccccaactcctcatcaccccatgacttggcctggaggaacctggggtgggaaacaagtagtcccccaacctcagaggccagaaccacaggtgggggacagggacctcgacagagctgtgcctgctcaacgctcgagagcatcttaacctaagaaaccaaaacaaagccttcgnnnnnnnnnnnnnnnnnnnnnnnnnnnntatacacccccaatcagagaggggaagtgggaaatgaagatagtagttaacagcacgtccaatgggcccagtgtctacactcgtacgagcagccccccaagctgggcgggggtcccaggcctatagttggggagccctgggcagggcctcgtgcggaattcgccacccaggcctcgctaccttg

SEQ ID NO: 68755 - DNA, 912 bp, Homo Sapiens
gtagcgaggcctgggtggcgaattcggcacgagggtaaaatggcggacctggcgaacgaagaaaagcctgccattgctccgcccgtctttgtgtttcagaaggataaaggacaaaagaggtcagctggcggctccagtcctgaaggcggagaagattctgacagagaagatggaaattactgccctcctgtcaagcgagaaagaacatcctctttaacccagttcccaccctcacagtcagaggaaaggagcagtggcttccggttgaagccaccaacgctgatccacggccaagcccccagcgcaggtctgccaagccagaagcccaaggagcagcagcggagcgtgcttcgcccggcagtgttacaagctccgcagccaaaggcgctgtcccagactgtccccagcagtggcaccaacggggtcagcctcccagcagactgcacgggggcagtgcccgcagcatcccctgacactgctgcatggagaagtccttccgaagctgccgatgaggtgtgtgcacttgaggagaaagagccccagaaaaatgagtccagcaatgcctctgaagaggaagcctgtgagaaaaaagaccccgccacacagcaagcctttgtatttgggcagaacttgagggacagagttaagctgataaatgagagcgtggacgaagccgacatggagaatgctggacaccccagcgcagacacgccaaccgcaacgaactatttcctccagtatatcagttccagtttagagaactcaacaatagtggccgacgcctccagcaacaaattttgtatttggccagaactggaaccgaagcgaagttttgagccccccaaaaattaaaaacaaaggttccagttcaaatgcccaaacagggaaaaaatggcaccttggcccgaaaat

SEQ ID NO: 68756 - DNA, 1043 bp, Homo Sapiens
  misc_feature (630)..(630): n is a, c, g, or t
  misc_feature (700)..(700): n is a, c, g, or t
aggtagcgaggcctgggtggcgaattcggcacgaggggccacccctgagaaagagtccctggctgagtcggcagccgcctacaccaaggcaacagcgcggaagtgtttgttggaaaaagtggaagtcatcaccggggaggaggcggagagcaatgtgttacagatgcagtgcaagctgtttgtctttgacaagacctcacagtcctgggtggagagaggccgggggctgctcagactcaatgacatggcgtccaccgatgacggcacactacagtcccgactagtgatgcggacccaggggagcctgcgactgatcctcaacaccaagctgtgggcccagatgcagatcgacaaggccagcgagaagagcattcgcatcacagccatggacaccgaggaccagggcgtgaaggtcttcctgatctcggccagctccaaggacacaggtcagttgtatgcagccctgcaccaccgcatcctggccctgcgcagccgcgtggagcaggagcaggaggccaagatgcccgcgcctgagcctggggcagccccatccaacgaggaggacgacagcgacgatgacgatgtcctggctccttcaggggccaccgcagctggtgctgggtgacgaanggggacgggcagacgaccgggagcacatagcggccgggagcccggctgcacaccaagctgctgctttgtnccgtctatccacccgcccacccgcccccaccccaacggcagcgtccaaggggcgggggccggggaaccacacacccccactggggccgggccacaagtctgggaccccccaccgtccctggttcaaaagcagaactcgggaaactggcctggaaatggggttttggggacaccaaaaaccttcctccttattgatggagccgaacaaaaccagaaacattttccctcccctcccccttccttttgaattggaaaagggggccattttagaaatttggccccgggtttcctcccttgggggcttgggagaacctcggttcccttttcccccccggggtgggccc

SEQ ID NO: 68757 - DNA, 1055 bp, Homo Sapiens
ttttccgggatgggcaggctgctctgcaggtcacgcgatccggggctcgcctccgcgcggcattcagcgcgcaggcgcgagctggccgcctcacacggagtcggcttgttaagtgcgcacgcgcgggagtttctggcagaaagcaggcgagcctgggccggcgcggggccttgtgggagggcttaaggaagtaaaatggcggacctggcgaacgaagaaaagcctgccattgctccgcccgtctttgtgtttcagaaggataaaggacaaaagaggtcagctggcggctccagtcctgaaggcggagaagattctgacagagaagatggaaattactgccctcctgtcaagcgagaaagaacatcctctttaacccagttcccaccctcacagtcagaggaaaggagcagtggcttccggttgaagccaccaacgctgatccacggccaagcccccagcgcaggtctgccaagccagaagcccaaggagcagcagcggagcgtgcttcgcccggcagtgttacaagctccgcagccaaaggcgctgtcccagactgtccccagcagtggcaccaacggggtcagcctcccagcagactgcacgggggcagtgcccgcagcatcccctgacactgctgcatggagaagtccttccgaagctgccgatgaggtgtgtgcaccttgaggagaaagagccccagaaaaatgagtccagcaatgccctctgaagaggaaaccctgtgaagaaaaaagaccccggccacacagcaagcccttggattttgggcagaacttgaggggacagaggtaagctgataaatgagagcgtgggacgaagccgacatggagaatgctggacaccccagcgcagacacgccaaccgcaacgaactatttccctccgtatatcagtttccgtttagaaaaactcacccataatgccgacgcctcccgcaacaaatttgtattttggccacaacatggaccgaccgaagttttgaaccccccaaatttaaacaagggccgttccaaagccacccgggaaaatgcaccctcc

SEQ ID NO: 68758 - DNA, 2052 bp, Homo Sapiens
  misc_feature (1489)..(1500): n is a, c, g, or t
  misc_feature (1841)..(1841): n is a, c, g, or t
  misc_feature (1877)..(1892): n is a, c, g, or t
cagtcgacggtaccggacatatgcccgggaattcggccattacggccgggcaagtgtagtattccattactatgtggcttagggatttatttgttttttaaaatcaaccatgttagctgggattagactccctacagtccttcaatggaaaagtaacatttaaaaatcctttgggtaattcaaattacagatttaaaagagcttaagatctggtgttttgttaatgcttctgtttattccagaagcattaaggtaacccattgccaagtatcattcttgcaaattattcttttatataactgaccagtgcttaataaaacaagcaggtacttacaaataattactggcagtaggttataattggtggtttaaaaataacattggaatacaggacttgttgccaattgggtaattttcattagttgttttgtttgttttgatttgaaacctggaaatacagtaaaatttgactgtttaaaatgttggccaaaaaaatcaagatttaatttttttatttgtactgaaaaactaatcataactgttaattctcagccatctttgaagcttgaaagaagagtctttggtattttgtaaacgttagcagactttcctgccagtgtcagaaaatcctatttatgaatcctgtcggtattccttggtatctgaaaaaaataccaaatagtaccatacatgagttatttctaagtttgaaaaataaaaagaaattgcatcacactaattacaaaatacaagttctggaaaaaatatttttcttccattttaaaactttttttaactaataatggctttgaaagaagaggcttaatttgggggtggtaactaaaatcaaaagaaatgattgacttgagggtctctgtttggtaagaatacatcattagcttaaataagcagcagaaggttagttttaattatgtagcttctgttaatattaagtgttttttgtctgttttacctcaatttgaacagataagtttgcctgcatgctggacatgcctcagaaccatgaatagcccgtactagatcttgggaacatggatcttagagtcactttggaataagttcttatataaatacccccagccttttgagaacggggcttgttaaaggacgcgtatgtagggcccgtacctactggcagttgggttcagggaaatgggattgacttggccttcaggctcctttggtcataattttaaaatatgggagtagaaaacaacaaagaatggaatggactcttaaaacaatgaaagagcatttatcgtttgtcccttgaatgtagaatttgtttttgatttcataattctgctggtaaatgtgacagttaaaatggtgcattatgtatatatattataatttagaaataccattttataattttactattccagggtgacataatgcatttaaatttgggatttgggtggagtattatgtttaactggagttgtcaagtatgagtccctcaggnnnnnnnnnnnnttctgttttaaaaagcaatctgattcttagctcttgaaactattgctacttaaatttccaataattaaaaatttaaaatttttaaattagaattgccaatacttctacatttgagaagggtttttttagaaatacatttagtaaagtccccaagacattagtcttacatttaaacttttttctttaaaacatggttttggtggttaacttttacacagttctgagtactgttaatatctggaaagtatcttgagatatcagtggaaagctaaacagtctaaattaacatgaaatacttcattttgattgagaaaataaaatcagattttttcaaagtcaanccaaaacacacaccggggtcacaccgaaaacagacnnnnnnnnnnnnnnnntccttgtgggcggcccccggccctgaaaaaagtttccaaaacacattcgtttggggcccggggggccccccggaaggtaaaggggaacagggggccaatagctggtttccccaaggaaaaaccccggggcactgaaataaggggcttgggaatcccccac

SEQ ID NO: 68759 - DNA, 1618 bp, Homo Sapiens
  misc_feature (18)..(18): n is a, c, g, or t
  misc_feature (936)..(948): n is a, c, g, or t
cagatcataatggatttngacatggcagaaagttgcaagtttacaaaatccaaagaccttcttcaagctcaaagatgctgagaataacagtatgattagttttcagtacaaataaaaaaattaaatcttgatttttttggccaacatttaaaacagtcaaattttactgtatttccaggtttcaaatcaaaacaaacaaaacaactaatgaaaattacccaattggcaacaagtcctgtattccaatgttatttttaaaccacccaattataacctactgccagtaattatttgtaagtacctgcttgttttattaagcactggtcagttatataaaagaataatttgcaagaatgatacttggcaatgggttaccttaatgcttctggaataaacagaagcattaacaaaacaccagatcttaagctcttttaaatctgtaatttgaattacccaaaggatttttaaatgttacttttccattgaaggactgtagggagtctaatcccagctaacatggttgattttaaaaaacaaataaatccctaagccacatagtaatggaatactacacttgctttttatatcatatggaaacagctccaggcagagcacaagtagaagaaaacctgccaaatcaaagtactgtaaataaagttcctctacgtactccagttgacaaaacctcaaaaataaaaatcagaagaccacccattgttaccctcccccccgcaacaaaacccacccaaaaaactttagttctgaacctaacatttccctaagaagttcacaggagaagctttaaggtacttaaagctgcagcagtacagttgaaagcgccacattacagaggaaatgccctaaagggttcagcagctgcccacccatcccgaaccaccccccatcccagtaatatgtaaaagctcctgttaaagnnnnnnnnnnnnnatgctaataaaggcataccacctagtgtgctaaagactacgactagcagcattagagcagtaaagtgaaaataggaagcctacaggaatgatctaaatgcctacttagaagaaacaaagcagcagacagaatccttagccctctagtctatgtagggaagcagttgaattaaactcagatttacccacattaacaaaaatttaacaaagcttccccaagacaccagaataaaacttgacctttccagtcaaagggcagagagaggcctcttccatgtcctggagttgaatgagttcaaagattggcaataaaggaaaaaagaaagcattacgggtatgatgggaacaagctttggagtttatcgaacagtcacaccaagtttctctagcacacggacacccttttcttggtactcttgtcgggtcatccaaaagttgtctttgtctttcatgatatccgctagaactgcaccacccaggaataccatgtgctttctgcggggtgggtcttcaatgcggatcttaaatttagaaagtttttccacatcacccttcaaaactcgttctaagtaaagctgtttaagttctcgttccaaccgtgatggcaggccaggatacatagtagacggacgcgtgggtcgacgatatcccgggaattccggaccggtcca

SEQ ID NO: 68760 - DNA, 771 bp, Homo Sapiens
tttgtattgacttactaccatctttataaaaatcgaatatacacacaaacacatcaacaactgtggaactgtatccattaaactttgataagacaacacaaagaactaatagctaagatgtggctgagttgaaagcacttccaatagtattttaattttaaaaggtccatatttacatggtatgctaaatgctcttgcatctcattttaaatgcatgatgaactcaagaacaaagataatggttgcagcagatcttccacgagggtttggctggtgtgggctgacttcacgtgagcagcataccaaacacctaagtaccattcctttctcattctgcttctttccttttctgtagtttccttcaaggaaactaaaccttcattactgggattgtctggtactaagaatccattttcgatggttgtgggtattgagtgaggtcggactgtgttggactgttctaatcagcgctttaaggcgggcctgcatgactttgccaatcacctttcaagaacattctatgagaaagtctgcctatgtgcatgtgtagacagttagagaaacacgcacaccccagggcctgtgtcacactcaggtaacaccaaaacagaccttccagtggccatgaagtccaccttaacaatgaaggcccaaacaggatccgttttattaacactgactacaaaaaagtctgtttcaatgcctacttttcagagacaacatgcatatttttggttttaaacacagcacactctatttcaaaaagtgttt

SEQ ID NO: 68761 - DNA, 1051 bp, Homo Sapiens
  misc_feature (36)..(36): n is a, c, g, or t
  misc_feature (38)..(38): n is a, c, g, or t
  misc_feature (44)..(44): n is a, c, g, or t
  misc_feature (49)..(49): n is a, c, g, or t
  misc_feature (92)..(92): n is a, c, g, or t
  misc_feature (117)..(117): n is a, c, g, or t
  misc_feature (157)..(157): n is a, c, g, or t
  misc_feature (160)..(160): n is a, c, g, or t
  misc_feature (168)..(168): n is a, c, g, or t
tcgaaatcacgatgaagcagggatctgcatgccaananctaccngaacnttgtgaaagccaaagagagcaggggaccgtttatacgtcatancatcaaatcaacattgctccatgtngagagcacagcaactcatttatatacatatacataggctntgntgatgaanaacgacaattgaggagaggacgtgaagtgcatcctggctacagctctgtaaaaatgtcaccatggcttccatccaatggaatgagtcgatgttctttaatgctataaaatgttagaatgtgccatcagctaatgccaggcttacgtatttctagaccataaagcagtttttcacaaattcatctttacagaaaaccagcatctagcttagcatctttccccttttaatttgtaggcttttaaaggcaaatcattcccaccatcacttaacgccgggattatacacattctagaaatgattctgagaggagtgtatagtatggtgcctatctacactcacatgatattcttattcacgttttttttaaccataagtggcaaatattttaaaatatttgaaaaacactccagaatctagtacgctttatttttagactgaacctaaagtaggttgttcttttaacaaagggtttaattcgggtggggaatataacatatcaaaatacatgaacaaatggaaagttacttctagaaaagcaaagaaattgggtatcatttttgtttcttgggaagctaattttgttgaatgtttagaattgagcaaagatgtaaatttttgaagggcagtttagaaaaattaactttgtgaatgaacttaagatgtctgtactctatatgtgatgctgtgcagtttgtttttatatggaaagatgtcaactatagccataaccaataaaataaaaactgatgaggcatgcagctttcagcacatcttttatacatgaagaaattaattttgtgttgctatggtgttgaaatatccaagatgttctgtatctatgtaaacatgattcctttaataaattgtattttattattaaaaa

SEQ ID NO: 68762 - DNA, 1411 bp, Homo Sapiens
tcaaatcattcctgtgatgccagatagtagttcctcagggaagaacagaaaagaggaaagttatatatttgagtcaaagggtgatggaggaggaggggaacacccagccccagaaacaggtgcagtgctacccctggcgctgggtttggctatcactgctctgctgcttctcatggttgcatgccgactacgactggtgaaacagaaactgaaaaaagctcgtcccattacatctgaggaatcggactacctcataaatgggatgtatctatagtaatgtaatttcaataccttggggcagggacatgttttgtttataatttatacatctattaagttctggatatttacagcttcttttgtttttaattgggccagaagattctgcaaatcccaaatctttctttattatttattgtaaaaaaaaggttccttagaagtcataaaatattttgaaatttagagaggaattcatgattaaagattcctaaaaatataattctgatttatgtaagctgtccctgaaaatagaaatgtgtacttagctgagagaaaattcagcatctcaggaggtggtattaggatgactgtgttaacccattaccttttagaagccaactgttggccccttaccatgctggactgctataggcccagcttccccttgttctgtggcccttttcttcctccttgaagctcccagtattctttttcttttcccctctaaacctgtttctgagagtggatctcaagcaagttcatgccttcaatcagatgttacttagggtgggtatacctaaattataaaccttatgtacaagtcagtaagccttagggaaggtgagtgtgggtccttcctaatccctctgacgtcatgtcatataggtggctgcctccttagactgacctttgggagaaaaaaaccccagactttgaattagtaacagctctaagatggtcatgcagtgagataggaaatcaagatggaagcagagaatctggcatgccaaaaactaacagaaacttagttgaaggcaaagagagcaaggagaacgtttaatacttcattacatcaaatcaacactgctccatggtgagagcacagcaactcatttatatatatatacataggctttgttgatgaaaaacgacaattgaagagaggacgttgagtggattcctgggtacagcttttgtaaaaatgtcaccatggctttcatccaatggaatgagtcgatgttttttaatgctataaaatgttagaatgtgccatcagctaatgccaggcttacgtatttctagaccataaagcagtttttcacaaattcatctttacagaaaaccagcatctagcttagcatctttccccttttttatttgtaggcttttacaggcaatcattcgcaccatc

SEQ ID NO: 68763 - DNA, 1192 bp, Homo Sapiens
  misc_feature (325)..(325): n is a, c, g, or t
gcaggctgtaccggccggaattaccgggatatcgtcgaccacgcgtgcgaagctaacagcatatctaaccagagaatttctgattccttatactgtgattatattatattgaggcatttgtagtgcagctgaagactgaatttatgccttttgtaaacatgataggtataaatgtcttataaacattctggagtatgtatagctttaatgaatgaaatttaatggacctgattaaaatgaagggatttaatcgttgttaaagttaagttagtcaaataaattacctactggaatatagcccaagccagtaaaggtttaatatttngcattttcgtgcttttattttctccttccattcataagtatatacttgaaagtacatctgtagcctatgatttgagtctcttgaagttctaggaagaggcaaactacaaactactaggattctgatgtcagatgtagtcattccagaaccttctcttaatgagttcacctgctagtacaatctccacaacttgaatggcattggttgttctgtaattcctgccaaaagcatcacaagttgtacatcatcaaggctccctttgcactcccaagaagaactggtaattttaaacaaaagtatgtgtctttatttgtattggaaaatactgtctttaaattgtttcttgttgacactccccacaatggaaaaattaccgaattaaacctgttttatggatggcagcttggagcatagcaagaagttggaggatttgaattccattcccagttctcattgtgttttgtttcttaaaactataataatcggttactgttataaagtttaaaaggtggttttaatgtgaatagcaaattctggtatatcgtgactaacgcttaagaatgcctgtctttgagaggaaggtgttataatattaatgaacagtgccaaatacactgtgcatatctgcaatttaatctttgaatgtatgttactggattagctccctcctcctgtgtgatggtaccatgcatagagtcaatcaaatccttgtgatgttttgtatggactttgacaatatgtaaataatgtgtaaagccagtttttatgattaaggaatcaaatttattgaattttattattgaaagttgaaacttaacatgtatgaacaaaaaccaataaaagaatatactcttttcattgactata

SEQ ID NO: 68764 - DNA, 351 bp, Homo Sapiens
tgtctttctgtcgctcgttgtctggcctggcccgggctttggctctcggtgtgcacacccatgcaaaggaaaagccatggcgccaatgctttgcagagcgagaccctcttaaggagaacaaggactccggggggatgcgctagcctctgtctgaggaaaaccagggtaaactgcagaagaaagtgaggatgtatgtccagacaacgtccataaaggccatcctgaaatctcctttttaaatttatgaactttaaggactagaaacacaagcaaacgatagtagagatcaagaggaaaattacatagagaagtacatgcaattacaaagaggtcaaaaaacaaaaatgaaaa

SEQ ID NO: 68765 - DNA, 3327 bp, Homo Sapiens
  misc_feature (83)..(191): n is a, c, g, or t
gggcgaggcctgggtggcgaattcggcacgagggcgcgcccaggacgcctcctctcgctgctggcccggccggcggccctgannnnnnnnnnnnnnnnnnnnnnnnnnnnnnnnnnnnnnnnnnnnnnnnnnnnnnnnnnnnnnnnnnnnnnnnnnnnnnnnnnnnnnnnnnnnnnnnnnnnnnnnnnnnnaggacggacaggacccgcacagcaagcacctgtacacggccgacatgttcacgcacgggatccagagcgccgcgcacttcgtcatgttcttcgcgccctggtgtggacactgccagcggctgcagccgacttggaatgacctgggagacaaatacaacagcatggaagatgccaaagtctatgtggctaaagtggactgcacggcccactccgacgtgtgctccgcccagggggtgcgaggataccccaccttaaagcttttcaagccaggccaagaagctgtgaagtaccagggtccttcgggacttccagacactggaaaactggatgctgcagacactgaacgaggagccagtgacaccagagccggaagtggaaccgcccagtgcccccgagctcaagcaagggctgtatgagctctcagcaagcaactttgagctgcacgttgcacaaggcgaccactttatcaagttcttcgctccgtggtgtggtcactgcaaagccctggctccaacctgggagcagctggctctgggccttgaacattccgaaactgtcaagattggcaaggttgattgtacacagcactatgaactctgctccggaaaccaggttcgtggctatcccactcttctctggttccgagatgggaaaaaggtggatcagtacaagggaaagcgggatttggagtcactgagggagtacgtggagtcgcagctgcagcgcacagagactggagcgacggagaccgtcacgccctcagaggccccggtgctggcagctgagcccgaggctgacaagggcactgtgttggcactcactgaaaataacttcgatgacaccattgcagaaggaataaccttcatcaagttttatgctccatggtgtggtcattgtaagactctggctcctacttgggaggaactctctaaaaaggaattccctggtctggcgggggtcaagatcgccgaagtagactgcactgctgaacggaatatctgcagcaagtattcggtacgaggctaccccacgttattgcttttccgaggagggaagaaagtcagtgagcacagtggaggcagagaccttgactcgttacaccgctttgtcctgagccaagcgaaagacgaactttaggaacacagttggaggtcacctctcctgcccagctcccgcaccctgcgtttaggagttcagtcccacagaggccactgggttcccagtggtggctgttcagaaagcagaacatactaagcgtgaggtatcttctttgtgtgtgtgttttccaagccaacacactctacagattctttattaagttaagtttctctaagtaaatgtgtaactcatggtcactgtgtaaacattttcagtggcgatatatcccctttgaccttctcttgatgaaatttacatggtttcctttgagactaaaatagcgttgagggaaatgaaattgctggactatttgtggctcctgagttgagtgattttggtgaaagaaagcacatccaaagcatagtttacctgcccacgagttctggaaaggtggccttgtggcagtattgacgttcctctgatcttaaggtcacagttgactcaatactgtgttggtccgtagcatggagcagattgaaatgcaaaaacccacacctctggaagataccttcacggccgctgctggagcttctgttgctgtgaatacttctctcagtgtgagaggttagccgtgatgaaagcagcgttacttctgaccgtgcctgagtaagagaatgctgatgccataactttatgtgtcgatacttgtcaaatcagttactgttcaggggatccttctgtttctcacggggtgaaacatgtctttagttcctcatgttaacacgaagccagagcccacatgaactgttggatgtcttccttagaaagggtaggcatggaaaattccacgaggctcattctcagtatctcattaactcattgaaagattccagttgtatttgtcacctggggtgacaagaccagacaggctttcccaggcctgggtatccagggaggctctgcagccctgctgaagggccctaactagagttctagagtttctgattctgtttctcagtagtccttttagaggcttgctatacttggtctgcttcaaggaggtcgaccttctaatgtatgaagaatgggatgcatttgatctcaagaccaaagacagatgtcagtgggctgctctggccctggtgtgcacggctgtggcagctgttgatgccagtgtcctctaactcatgctgtccttgtgattaaacacctctatctcccttgggaataagcacatacaggcttaagctctaagatagataggtgtttgtccttttaccatcgagctacttcccataataaccactttgcatccaacactcttcacccacctcccatacgcaaggggatgtggatacttggcccaaagtaactggtggtaggaatcttagaaacaagaccacttatactgtctgtctgaggcagaagataacagcagcatctcgaccagcctctgccttaaaggaaatctttattaatcacgtatggttcacagataattctttttttaaaaaaacccaacctcctagagaagcacaactgtcaagagtcttgtacacacaacttcagctttgcatcacgagtcttgtattccaagaaaatcaaagtggtacaatttgtttgtttacactatgatactttctaaataaactcttttttttctctcctagagcaaagggcccgagttttaacgcatcttgtggggcggccttcggcccttcaaagaagtttttcctagcccctctcgttggggtgcgccgggcccgataagggtaagcgcacgatgggcccccagcgtggctatcctcagggacatcccggccgcttaaattagggtctggggatcgctcagcaaaacaaacaaaggcccccttgggccagacccgatcgctctttcaatccaataccgcacacctgtaatgcacccgagcgccccgtagacggcgaattcttttttaccgaaagcacgtttttctaccattaaccaccacaccacgaggtctatctcactctcgactcgtaacggccctggggccca

SEQ ID NO: 68766 - DNA, 915 bp, Homo Sapiens
  misc_feature (77)..(185): n is a, c, g, or t
  misc_feature (836)..(836): n is a, c, g, or t
ggcctgggtggcgaattcggcacgagggcgcgcccaggacgcctcctctcgctgctggcccggccggcggccctgannnnnnnnnnnnnnnnnnnnnnnnnnnnnnnnnnnnnnnnnnnnnnnnnnnnnnnnnnnnnnnnnnnnnnnnnnnnnnnnnnnnnnnnnnnnnnnnnnnnnnnnnnnnnaggacggacaggacccgcacagcaagcacctgtacacggccgacatgttcacgcacgggatccagagcgccgcgcacttcgtcatgttcttcgcgccctggtgtggacactgccagcggctgcagccgacttggaatgacctgggagacaaatacaacagcatggaagatgccaaagtctatgtggctaaagtggactgcacggcccactccgacgtgtgctccgcccagggggtgcgaggataccccaccttaaagcttttcaagccaggccaagaagctgtgaagtaccagggtcctcgggacttccagacactggaaaactggatgctgcagacactgaacgaggagccagtgacaccagagccggaagtggaaccgcccagtgcccccgagctcaagcaagggctgtatgagctctcagcaagcaactttgagctgcacgttgcacaaggcgaccactttatcaagttcttcgctccgtggtgtggtcactgcaaagccctggctccaacctgggagcagctggctctgggccttgaacattccgaaactgtcaagattggcaaggttgattgtacacagcactatgaactctgctccggaaacccagttcgtggctatcccactcttctctgggtcccgagatggngaaaagggggattcagaacagggaaaagcggaatttggagtccctggaggggaatacgcgggaagccgcagcggaaata

SEQ ID NO: 68767 - DNA, 1764 bp, Homo Sapiens
  misc_feature (1684)..(1694): n is a, c, g, or t
  misc_feature (1697)..(1725): n is a, c, g, or t
ggcctgggtggcgaattcggcacgaggggccccgcccggtgcgctggaggtcgaagcttccagctctggacatcctgagcccaagtcccccacactcagtgcagtgatgagtgcggaagtgaaggtgacagggcagaaccaggagcaatttctgctcctagccaagtcggccaagggggcagcgctggccacactcatccatcaggtgctggaggcccctggtgtctacgtgtttggagaactgctggacatgcccaatgttagagagctggctgagagtgactttgcctctaccttccggctgctcacagtgtttgcttatgggacatacgctgactacttagctgaagcccggaatcttcctccactaacagaggctcagaagaataagcttcgacacctctcagttgtcaccctggctgctaaagtaaagtgtatcccatatgcagtgttgctggaggctcttgccctgcgtaatgtgcggcagctggaagaccttgtgattgaggctgtgtatgctgacgtgcttcgtggctccctggaccagcgcaaccagcggctcgaggttgactacagcatcgggcgggacatccagcgccaggacctcagtgccattgcccgaaccctgcaggaatggtgtgtgggctgtgaggtcgtgctgtcaggcattgaggagcaggtgagccgtgccaaccaacacaaggagcagcagctgggcctgaagcagcagattgagagtgaggttgccaaccttaaaaaaaccattaaagttacgacggcagcagcagccgcagccacatctcaggaccctgagcaacacctgactgagctgagggaaccagctcctggcaccaaccagcgccagcccagcaagaaagcctcaaagggcaaggggctccgagggagcgccaagatttggtccaagtcgaattgaaagaactgtcgtttcctccctggggatgtggggtcccagctgcctgcctgcctcttaggagtcctcagagagccttctgtgcccctggccagctgataatcctaggttcatgacccttcacctcccctaaccccaaacatagatcacaccttctctagggaggaggcaaatgtaggtcatgtttttgttggtactttctgtttttttgtgacttcatgtgttccattgctccccgctgccatgctctctcccttgtttccttaagagctcagcatctgtccctgttcattacatgtcattgagtaggtgggtagccctgatgggggtcgctctgtctggagcataacccacaggcgttttttctgccaccccatccctgcatgcctgatccccagttcctataccctacccctgacctattgagcagcctctgaagagccatagggcccccacctttactcacaccctgagaattctgggagccagtctgccatgccaggagtcactggacatgttcatcctagaatcctgtcacactacagtcatttcttttcctctctctggcccttgggtcctgggaatgctgctgcttcaaccccagagcctaagaatggcagccgtttcttaacatgttgagagatgattctttcttggccctggccatctcgggaagcttgatggcaatcctggaagggtttaatctccttttgtgagtttggtggggaagggaagggtatatagattgtattnnnnnnnnnnnggnnnnnnnnnnnnnnnnnnnnnnnnnnnnnacgcagaaataaatctatgagaaatctatctacaaacta

SEQ ID NO: 68768 - DNA, 930 bp, Homo Sapiens
catcggcacgaggaggtgacggagcggtggcccgccggtgcgctggaggtcgaagcttccaggtagcggccgcagagcctgacccaggggcgctggacatcctgagcccaagtcccccacactcagtgcagtgatgagtgcggaagtgaaggtgacagggcagaaccaggagcaatttctgctcctagccaagtcggccaagggggcagcgctggccacactcatccatcaggtgcgggaggcccctggtgtctacgtgtttggagaactgctggacatgcccaatgttagagagctggctgagagtgactttgcctctaccttccggctgctcacagtgtttgcttatgggacatacgctgactacttagctgaagcccggaatcttcctccactaacagaggctcagaagaataagcttcgacacctctcagttgtcaccctggctgctaaagtaaagtgtatcccatatgcagtgttgctggaggctcttgccctgcgtaatgtgcggcagctgggaagaccttgtgattgaggctgtgtatgctgacgtgcttcgtggactccctggaccagcgcaaccagcggctcgaggttgactacagcatcgggcgggcacatccagcgcccaggacctcagtgccattgcccgaacccttgcaggaatggcgtgtgggctgtgagggtcgtgctgtcagcgccattgacggagcacggtgagccgtgccaacccaacacaagggagcagccagctggggcctgaaagcagcagaattgacagtgaagttgccaccttctaaaaaaacccttcaaagttaccacccgcacgcagcagccgcagccacctcttcggaccctgaagcacacctgactgagctgaggggacccgtcccggggacaacaaggcagccagaagaagcccaaggcagc

SEQ ID NO: 68769 - DNA, 956 bp, Homo Sapiens
  misc_feature (20)..(21): n is a, c, g, or t
ggcccacccgcgagtgattnnaaaaaccaccccatacggtcctaggtagcgaggcctgagtggcgatttccgcacgaggggccccgcccggtgcgctggaggtcgaagcttccagctctggacatcctgagcccaagtcccccacactcagtgcagtgatgagtgcggaagtgaaggtgacagggcagaaccaggagcaatttctgctcctagccaagtcggccaagggggcagcgctggccacactcatccatcaggtgctggaggcccctggtgtctacgtgtttggagaactgctggacatgcccaatgttagagagctggctgagagtgactttgcctctaccttccggctgctcacagtgtttgcttatgggacatacgctgactacttagctgaagcccggaatcttcctccactaacagaggctcagaagaataagcttcgacacctctcagttgtcaccctggctgctaaagtaaagtgtatcccatatgcagtgttgctggaggctcttgccctgcgtaatgtgcggcagctggaagaccttgtgattgaggctgtgtatgctgacgtgcttcgtggctccctggaccagcgcaaccagcggctcgaggttgactacagcatcgggcgggacatccagcgccaggacctcagtgccattgccccaaccctgcaggaatggtgtgtgggctgtgaaggtcgtgctgtcacgcattgaaggagcacgtgagccgtgccaaccaacacaaggagcagcagctggggctgaagcagcagattgagagtgaagttgccaaccttaaaaaaaccattaaagttacgacgcgcagcagcaagccgcagccccattcttcaggacccctgaacaacaccctgaacctgaacctgaagggaaacccagcttccctggccaaccaacccaagcgcccaagccccaagacaaaagaaa

SEQ ID NO: 68770 - DNA, 1098 bp, Homo Sapiens
  misc_feature (689)..(689): n is a, c, g, or t
  misc_feature (844)..(844): n is a, c, g, or t
  misc_feature (925)..(925): n is a, c, g, or t
ggaattcccgggatcgcccggtgcgctggaggtcgaagcttccaggtagcggcccgcagagcctgacccaggctctggacatcctgagcccaagtcccccacactcagtgcagtgatgagtgcggaagtgaaggtgacagggcagaaccaggagcaatttctgctcctagccaagtcggccaagggggcagcgctggccacactcatccatcaggtgctggaggcccctggtgtctacgtgtttggagaactgctggacatgcccaatgttagagagctgaagcccggaatcttcctccactaacagaggctcagaagaataagcttcgacacctctcagttgtcaccctggctgctaaagtaaagtgtatcccatatgcagtgttgctggaggctcttgccctgcgtaatgtgcggcagctggaagaccttgtgattgaggctgtatatgctgacgtgcttcgtggctccctggaccagcgcaaccagcggctcgaggttgactacagcatcgggcgggacatccagcgccaggacctcagtgccattgcccgaaccctgcaggaatggtgtgtgggctgtgaggtcgtgctgtcaggcattgaggagcaggtgagccgtgccaaccaacacaaggagcagcagctgggcctgaagcagcagattgagagtgaggttgccaaccttanaaaaaccattaaagttacgacggcagcagcagccgcagccacatctcaggaccctgagcaacacctgactgagctgagggaaccagctcctggcaccaacagcgccagcccagcaagaaagcctcaaagggcaaggggcctccgagggagcgccnagatttgggccaagtcgaattgaaagaactgtcgtttcctccctggggatgtggggtcccagctgcctgcctggctcttangagtcctcagagagctttctgtgcccctgggcagctggatatcctaagttcatgacccttcacctcccctaaacccaaaatagatccaactttctctagggagggagccaaaggaggggcctgggttttggttgggaaacttcccgggtgttttgggggacctcaggggggtc

SEQ ID NO: 68771 - DNA, 1072 bp, Homo Sapiens
  misc_feature (873)..(873): n is a, c, g, or t
  misc_feature (913)..(913): n is a, c, g, or t
  misc_feature (951)..(951): n is a, c, g, or t
  misc_feature (956)..(956): n is a, c, g, or t
  misc_feature (960)..(960): n is a, c, g, or t
  misc_feature (995)..(995): n is a, c, g, or t
  misc_feature (1014)..(1015): n is a, c, g, or t
  misc_feature (1028)..(1028): n is a, c, g, or t
  misc_feature (1034)..(1034): n is a, c, g, or t
ccggaatttccgggatgggaggtggcaggaaaggcttggaacagctgccggaggtgacggagcggcggccccgcccggtgcgctggaggtcgaagcttccagctctggacatcctgagcccaagtcccccacactcagtgcagtgatgagtgcggaagtgaaggtgacagggcagaaccaggagcaatttctgctcctagccaagtcggccaagggggcagcgctggccacactcatccatcaggtgctggaggcccctggtgtctacgtgtttggagaactgctggacatgcccaatgttagagagctgaagcccggaatcttcctccactaacagaggctcagaagaataagcttcgacacctctcagttgtcaccctggctgctaaagtaaagtgtatcccatatgcagtgttgctggaggctcttgccctgcgtaatgtgcggcagctggaagaccttgtgattgaggctgtgtatgctgacgtgcttcgtggctccctggaccagcgcaaccagcggctcgaggttgactacagcatcgggcgggacatccagcgccaggacctcagtgccattgcccgaaccctgcaggaatggtgtgtgggctgtgaggtcgtgctgtcaggcattgaggagcaggtgagccgtgccaaccaacacaaggagcagcagctgggcctgaagcagcagattgagagtgaggttgccaaccttaaaaaaaccattaaagttacgacggcagcagcagccgcagccacatctcaggaccctgagcaacacctgactgagctgagggaaccagctcctggcaccaacagcgccagcccagcaagaaagcctcaaagggcaaggggctccgagggagcgccnagattttggtccagtcgaatttgaaggactgtcgtttccntcccctgggggatgtgggggtcccagctgcctgcctgncctcnttangagtcctcagagaagccttctggtgcccctggccncagctgataatccctaggnntcatggacccttnccaccntcccctaaaccccaaacatagatcaaccccctttcttt

SEQ ID NO: 68772 - DNA, 762 bp, Homo Sapiens
attgacatcagcataggatgattcacagtggaagagagacccaaatcatctgaagctcaactacttactggaaggtatacctctcattacccacacacgaaggaaagcaggaccttcatcccagtgacctcagctaagactgggtcctttggagttactgcagttactgttggagattccaactctaatgtcaatcgttccttatcaggagaccaagacacattccaccccagtggggggtcccataccactcatggatctgaatcagatggacactcacatgggagtcaagaaggtggagcaaacacaacctctggtcctataaggacaccccaaattccagaatggctgatcatcttggcatccctcttggccttggctttgattcttgcagtttgcattgcagtcaacagtcgaagaaggtgtgggcagaagaaaaagctagtgatcaacagtggcaatggagctgtggaggacagaaagccaagtggactcaacggagaggccagcaagtctcaggaaatggtgcatttggtgaacaaggagtcgtcagaaactccagaccagtttatgacagctgatgagacaaggaacctgcagaatgtggacatgaagattggggtgtaacacctacaccattatcttggaaagaaacaaccgttggaaacataaccattacagggagctgggacacttaacagatgcaatgtgctactgattgtttcattgcgaatcttttttagcataaaattttctactctt

SEQ ID NO: 68773 - DNA, 1108 bp, Homo Sapiens
  misc_feature (97)..(131): n is a, c, g, or t
  misc_feature (1032)..(1032): n is a, c, g, or t
  misc_feature (1040)..(1040): n is a, c, g, or t
  misc_feature (1084)..(1084): n is a, c, g, or t
gttctgacaactcaaatgatgagagcggccatgaccgcccgcttttaataagcccgaagacgacgagcgcagcgagtagtgagcgaggaagcggcgnnnnnnnnnnnnnnnnnnnnnnnnnnnnnnnnnnncagtcgacggtaccggacatatgcccgggaattcggccattacggccgggggcctcattgcccagcggaccccagcctctgccaggttcggtccgccatcctcgtcccgtcctccgccggcccctgccccgcgcccagggatcctccagctcctttcgcccgcgccctccgttcgctccggacaccatggacaagttttggtggcacgcagcctggggactctgcctcgtgccgctgagcctggcgcagatcgatttgaatataacctgccgctttgcaggtgtattccacgtggagaaaaatggtcgctacagcatctctcggacggaggccgctgacctctgcaaggctttcaatagcaccttgcccacaatggcccagatggagaaagctctgagcatcggatttgagacctgcaggtatgggttcatagaagggcacgtggtgattccccggatccaccccaactccatctgtgcagcaaacaacacaggggtgtacatcctcacatccaacacctcccagtatgacacatattgcttcaatgcttcagctccacctgaagaagattgtacatcagtcacagacctgcccaatgcctttgatggaccaattaccataactattgttaaccgtgatggcacccgctatgtccagaaaggagaatacagaacgaatcctgaagacatctaccccagcaaccctactgatgatgacgtgagcagcggctcctccagtgaaaggagcagcacttcaggaggttacatcttttacaccttttctactgtacaccccatcccagacgaagacagtccctggatcaccgacagcacagacagaatccctgctaccagaagacccaagacacattccacccccagtggggggggtcccataccanctcatggngatctgaatcagatggggacactcacatggggaagtcaagaaanggtggagcaaaacacaaacctcct

SEQ ID NO: 68774 - DNA, 4439 bp, Homo Sapiens
  misc_feature (1824)..(1856): n is a, c, g, or t
  misc_feature (4018)..(4048): n is a, c, g, or t
  misc_feature (4264)..(4273): n is a, c, g, or t
acacctttcctactgtacaccccatcccagacgaagacagtccctggatcaccgacagcacagacagaatccctgctaccatccagcacaactcctagtagtacaacggaagaaaacagctacccagaaaggaacagtggtttggcaacagatggcatgagggatatcgccaaacacccagagaagactcccattcgacaacagggacagctgcagcctcagctcataccagccatccaatgcaaggaaggacaacaccaagcccagaggacagttcctggactgatttcttcaacccaatctcacaccccatgggacgaggtcatcaagcaggaagaaggatggatatagactccagtcatagtacaacgcttcagcctactgcaaatccaaacacaggtatggtggaagatatggacaggacaggacctctttcaatgacaacgcagcagagtaattctcagagcttctctacatcacatgaaggcttggaagaagataaagaccatccaacaacttctactctgacatcaagcagagaccaagacacattccaccccagtggggggtcccataccactcatggatctgaatcagatggacactcacatgggagtcaagaaggtggagcaaacacaacctctggtcctataaggacaccccaaattccagaatggctgatcatcttggcatccctcttggccttggctttgattcttgcagtttgcattgcagtcaacagtcgaagaaggtgtgggcagaagaaaaagctagtgatcaacagtggcaatggagctgtggaggacagaaagccaagtggactcaacggagaggccagcaagtctcaggaaatggtgcatttggtgaacaaggagtcgtcagaaactccagaccagtttatgacagctgatgagacaaggaacctgcagaatgtggacatgaagattggggtgtaacacctacaccattatcttggaaagaaacaaccgttggaaacataaccattacagggagctgggacacttaacagatgcaatgtgctactgattgtttcattgcgaatcttttttagcataaaattttctactctttttgttttgtgttttgttctttaaagtcaggtccaatttgtaaaaacagcattgctttctgaaattagggcccaattaataatcagcaagaatttgatcgttccagttcccacttggaggcctttcatccctcgggtgtgctatggatggcttctaacaaaaactacacatatgtattcctgatcgccaacctttcccccaccagctaaggacatttcccagggttaatagggcctggtccctgggaggaaatttgaatgggtccattttgcccttccatagcctaatccctgggcattgctttccactgaggttgggggttggggtgtactagttacacatcttcaacagaccccctctagaaatttttcagatgcttctgggagacacccaaagggtgaagctatttatctgtagtaaactatttatctgtgtttttgaaatattaaaccctggatcagtcctttgatcagtataattttttaaagttactttgtcagaggcacaaaagggtttaaactgattcataataaatatctgtacttcttcgatcttcaccttttgtgctgtgattcttcagtttctaaaccagcactgtctgggtccctacaatgtatcaggaagagctgagaatggtaaggagactcttctaaggcttcatctcagagaccctgagttcccactcagacccactcagccaaatctcatggaagaccaaggagggcagcactgnnnnnnnnnnnnnnnnnnnnnnnnnnnnnnnnngacactgtccaaaggttttccatcctgtcctggaatcagagttggaagctgaggagcttcagcctcttttatggtttaatggccacctgttctctcctgtgaaaggctttgcaaagtcacattaagtttgcatgacctgttatccctggggccctatttcatagaggctggccctattagtgatttccaaaaacaatatggaagtgccttttgatgtcttacaataagagaagaagccaatggaaatgaaagagattggcaaaggggaaggatgatgccatgtagatcctgtttgacatttttatggctgtatttgtaaacttaaacacaccagtgtctgttcttgatgcagttgctatttaggatgagttaagtgcctggggagtccctcaaaaggttaaagggattcccatcattggaatcttatcaccagataggcaagtttatgaccaaacaagagagtactggctttatcctctaacctcatattttctcccacttggcaagtcctttgtggcatttattcatcagtcagggtgtccgattggtcctagaacttccaaaggctgcttgtcatagaagccattgcatctataaagcaacggctcctgttaaatggtatctcctttctgaggctcctactaaaagtcatttgttacctaaacttatgtgcttaacaggcaatgcttctcagaccacaaagcagaaagaagaagaaaagctcctgactaaatcagggctgggcttagacagagttgatctatagaatatctttaaaggagagatgtcaactttctgcactattcccagcctctgctcctccctgtctaccctctccccttcctctctccctccacttcaccccacaatcttgaaaaacttcctttctcttctgtgaacatcattggccagatccattttcagtggtctggatttctttttattttcttttcaacttgaaagaaactggacattaggccactatgtgttgttactgccactagtgttcaagtgcctcttgttttcccagagatttcctgggtctgccagaggcccagacaggctcactcaagctctttaactgaaaagcaacaagccactccaggacaaggttcaaaatggttacaacagcctctacctgtcgccccagggagaaaggggtagtgatacaagtctcatagccagagatggttttccactccttctagatattcccaaaaagaggctgagacaggaggttattttcaattttattttggaattaaatacttttttccctttattactgttgtagtccctcacttggatatacctctgttttcacgatagaaataagggaggtctagagcttctattccttggccattgtcaacggagagctggccaagtcttcacaaacccttgcaacattgcctgaagtttatggaataagatgtattctcactcccttgatctcaagggcgtaactctggaagcacagcttgactacacgtcatttttaccaatgattttcaggtgacctgggctaagtcatttaaactgggtctttataaaagtaaaaggccaacatttaattattttgcaaagcaacctaagagctaaagatgtaatttttcttgcaattgtaaatcttttgtgtctcctgaagacttcccttaaaattagctctgagtgaaaaatcaaaagagacaaaagacatcttcgaatccatatttcaagcctggtagaattggcttttctagcagaacctttccaaaagttttatattgagattcataacaacaccaagaattgattttgtagccaacattcattcaatactgttatatcagaggagtaggagagaggaaacatttgacttatctggaaaagcaaaatgtacttaagaataagaataacatggtccattcacctttatgttatagatatgtctttgtgtaaatcatttgttttgagttttcaaagaatagcccattgttcattcttgtgctgtacaatgaccactgttattgttactttgacttttcagagcacacccttcctctggtttttgtatatttattgatggatcaataataatgaggaaagcatgatatgtatattgctgagttgaaagcacttattggaaaatattaaaaggctaacattaaaagactaaaggnnnnnnnnnnnnnnnnnnnnnnnnnnnnnnncaggggggcccccaatagaagatatcccttcgaggggcccaacggtttaacgacgaccccagcttctcttcgacaccacgcggggccccaatatagagagctccgatactaactcaccaccaaggccagggccgaccgtctaaacaacgcccgcggcacgggacacaccagggctagagtggcgccaacctctgggacaacgaccccctcaccacnnnnnnnnnncccaatcttgggcccaacctacccctacagaacaatatcaaagcgcccaaagggaacctatcaacccttccgagcgcacaggggcgctacccaacgcggaatagtccgcctgcatgaagagcttggcacggacactgactcccaacctctattccgacggcgtgca

SEQ ID NO: 68775 - DNA, 734 bp, Homo Sapiens
  misc_feature (91)..(91): n is a, c, g, or t
taaataaaaacaagttgcattgtcgagtttggaggaggacttctcatatgtttcagaaggaaaggagagaacagaggaagaatacattttntgctggtcttgaatttgcagcctctcttgaaggttggttcattcatggtggaattatggccagtggaatgtgggttgaagtaacccatgcccactgcaggtctggctcacaaaactctcccatatgagacctccattctgtgtttacagctaaacaaaaagactccaggacccagagaaggcagagccatgagatgggaggaatctgtaaaaaggctgtcaggaaagccaaccaactaggacagccaaactggactaatatatgcaacagaagtcaacctctattgtgttacgccactgcactggggttgttacagcattgagcatgccccaatgcacaaaaaaactgtgcgctaccatcaggaggatcaggatatatgaaatcaagtttatttacagaaagtgcacaaataaagcaccctttagagataacacaagcgactatctggaaaagggtggataataagcatgattgggaaagcaggcttctaagaaatagataccaaaatgtagaagtagaaagattgtgatgttgccattcacacatcatgtcagttttgtagaggcacaaattgggtcccacgggttatcctgcacctgcgtacaaattttgtttgactgtcactgtataaaaaaattgaatc

SEQ ID NO: 68776 - DNA, 862 bp, Homo Sapiens
  misc_feature (831)..(831): n is a, c, g, or t
  misc_feature (839)..(839): n is a, c, g, or t
ggtgggaagccaggaaaacctggagatcatggcagaccaggtccatctgggttgaaaggagaaaaaggtgataggggagacattgcttcccagaacatgatgcgagcagttgcaagacaagtctgtgaacaattgataagtggtcagatgaacagattcaatcagatgctgaatcagattccaaatgattaccagtccagtcgcaaccagccaggcccgccgggtccaccgggacctcctggtagcgcaggagccagaggagaacctgggcctggggggcggccaggcttcccgggcacaccagggatgcagggaccccctggggaacgaggtttgccaggagagaaaggtgaaaggggtactggatcttcaggacctcgggggctgcctggccccccaggtccacaaggagaatccagaacaggtccaccagggtccacaggttcaagaggtccccctggccccccaggccggcatgacaggctacggacgacctcggcagatcatcagttagagcggagagggctagccctgagcccggccctcccccagctccttggctgcagccatcccgcttagcctgcctcacccacacccgtgtggtaccttcagccctgggccaagctttgaggctctgtcactgagcaatggtaactgcacctgggcagctcctccctgtgcccccagcctcagcccaacttcttacccgaaagcatcactgccttggcccctccctcccggctgcccccatcacctctactgtctcctccctggggctaaagcaggggagaaagcgggtttggggggtagcctgggatgtggggccaagtnccattgtnccttccttggggggaaaaaagcc

SEQ ID NO: 68777 - DNA, 1728 bp, Homo Sapiens
  misc_feature (1086)..(1117): n is a, c, g, or t
  misc_feature (1121)..(1121): n is a, c, g, or t
  misc_feature (1124)..(1124): n is a, c, g, or t
cggtccggaattcccgggatccagacacaagtcttcactccttcctgcgagccctgaggaagccttctttccccagacatggccaacaagggtccttcctatggcatgagccgcgaagtgcagtccaaaatcgagaagaagtatgacgaggagctggaggagcggctggtggagtggatcatagtgcagtgtggccctgatgtgggccgcccagaccgtgggcgcttgggcttccaggtctggctgaagaatggcgtgattctgagcaagctggtgaacagcctgtaccctgatggctccaagccggtgaaggtgcccgagaacccaccctccatggtcttcaagcagatggagcaggtggctcagttcctgaaggcggctgaggactatggggtcatcaagactgacatgttccagactgttgacctctttgaaggcaaagacatggcagcagtgcagaggaccctgatggctttgggcagcttggcagtgaccaagaatgatgggcactaccgtggagatcccaactggtttatgaagaaagcgcaggagcataagagggaattcacagagagccagctgcaggagggaaagcatgtcattggccttcagatgggcagcaacagaggggcctcccaggccggcatgacaggctacggacgacctcggcagatcatcagttagagcggagagggctagccctgagcccggccctcccccagctccttggctgcagccatcccgcttagcctgcctcacccacacccgtgtggtaccttcagccctggccaagctttgaggctctgtcactgagcaatggtaactgcacctgggcagctcctccctgtgcccccagcctcagcccaacttcttacccgaaagcatcactgccttggcccctccctcccggctgcccccatcacctctactgtctcctccctgggctaagcaggggagaagcgggctgggggtagcctggatgtgggccaagtccactgtcctccttggcggcaaaagcccattgaagaagaaccagcccagcctgccccctatcttgtcctggaatatttttggggttggaactcnnnnnnnnnnnnnnnnnnnnnnnnnnnnnnnngggnggncgctctaaaaaatccctcgaggggcccaagcttacgcgtaacccagctttcttgtacaaaaggtccctataaagaagcatattatggggggggccctggacaaaatttcacgagggggcgcactggtaaaactgcctatttttttatctaagagggggaacctaacttctggggtgtaaaataattggggcggcggcctttttaaatttaaaggtcgaaggaaaatataaaaattttttaattgtataaaagaacaacacttccttggggggggcttgacttgtttgaaaaacccccctcaacgaattaataatttactgaaaagaaataaaaaacatttactaagggatttgaggttggaaaggggatttttaaattcccgggccccaaaaaatctttttctggcccccttgtttcttttaaaaatatttttcacgcgccggggggccggggcgtcccacaggttgggtgggaggttttaaaaataactgtaaaaagggttttttattttgccccccctgtactccttaaaaagtggggtgggaaatggaatatggcacgccccctcaccatctctgttgatagggagtctctcttagtgtgt

SEQ ID NO: 68778 - DNA, 1010 bp, Homo Sapiens
  misc_feature (58)..(58): n is a, c, g, or t
gggaacttggcccccccattccagggtttaccccccaggcccggttttctccccttgnttaggcccagggaaggagacagtagaggtgatgggggcagccgggagggaggggccaaagccagtgatgctttcgggtaaagaagttgggctgaggctgggggcacagggaggagctgcccaggtgcagttaccattgctcagtgacagagcctcaaagcttggccagggctgaaggtaccacacgggtgtgggtgaggcaggctaagcgggatggctgcagccaaggagctgggggagggccgggctcagggctagccctctccgctctaactgatgatctgccgaggtcgtccgtagcctgtcatgccggcctgggaggcccctctgttgctgcccatctgaaggccaatgacatgctttccctcctgcagctggctctctgtgaattccctcttatgctcctgcgctttcttcataaaccagttgggatctccacggtagtgcccatcattcttggtcactgccaagctgcccaaagccatcagggtcctctgcactgctgccatgtctttgccttcaaagaggtcaacagtctggaacatgtcagtcttgatgaccccatagtcctcagccgccttcaggaactgagccacctgctccatctgcttgaagaccatggagggtgggttctcgggcaccttcaccggcttggagccatcagggtacaggctgttcaccagcttgctcagaatcacgccattcttcagccagacctggaagcccaagcgcccacggtctgggcggcccacatcagggccacactgcactatgatccactccaccagccgctcctccagctcctcgtcatacttcttctcgattttggactgcacttcgcggctcatgccataggaaggacccttgttggccatgtctggggaaagaaggcttcctcagggctcgcaggaaggagtgaagacttgtgtcaggatcccgggaattccggaccg

SEQ ID NO: 68779 - DNA, 846 bp, Homo Sapiens
  misc_feature (141)..(141): n is a, c, g, or t
ggtccctctgcactgctgccaagtcttgcccttcaaagaggtcaacagtctggaacatgtcagttcttgatgaccccatagtcctcagccgccttcaggaactgagccacctgctccatctgcttgaagaccatggaggtnggcttctcgggcaccttcaccggcttggagccatcagggtacaggctgttcaccagcttgctcagaatcacgccattcttcagccagacctggaagcccaagcgcccacggtctggccggcccacatcagggccacactgcactatgatccactccaccagccgctcctccagctcctcgtcatacttcttctcgattttggactgcacttcgcggctcatgccataggaaggacccttggttggccatgtctgcgggaaagctccttggaagttctcctggatggggcaacagacagtagagccttggcctaaccaggccggcgcctgcacccttacacacaccttgtggatgtggctggctgagatggggagcctccctctcaccccaggtggtttccatcaattcctctgcactacgccaagtcatccggggcatttcaatgagaccacgggcctgtcccagtctgagagagatccaggacgctactgatccagcccaccctgcctggagcttgggcccccatgctgactgagagggtgggtttccgctagcacgaagggatctgggctgacactctgtgcactcctgcagctcgtatcaaagcgagtgaggtcactccgcttggactcatcccccttactccccaggtacccgctcgcgtacttcatcaccactgtacctctcgcgccctcgtgacgcgac

SEQ ID NO: 68780 - DNA, 923 bp, Homo Sapiens
ctaacaagcaagagatgaggagattccatttggtgttattccggcatagagcaagcggcaggctttgatgcagaagcttattgtagaattgttaagtgattttagtcgacaggatcacatacaaatcatttacaagccacaattaggttattatttacataagacatttctctataaccaggttaattgtttttcttaaaatggcatagactcctctggttagtagttttattatgcacctctttcaaaactgaggctcctcatggctgtgtgttggaacttttttaaaataatgtttttctacattattactgaaatgcatcaggattataaactgacaccactgcttttgtctcattcaagttagtaaaaagagtctccaccctcctttgtgatgtcgacccggttcgttaaccattatctgtggtgagatttccatacagactcatttcctaataagcacgtgcgcaaacatctcagaaacaggattttcatgtattcaaactgtaagcagcactggcgacttagaaaatgtgttagccggaacctggatagctttgcccgttgtatgggatgctggcacactgagaagaatcacagtatccaggaggacctgggggtcctcggatacctgagtttccaggacggccaggggggccagggggacctcttgaacctgtggaccctggtggacctgttctggattctccttgtggacctggggggccaggcagcccccgaggtcctgaagatccagtacccctttcacctttctctcctggcaaacctcgttccccagggggtccctgcatccctggtgtgcccgggaagcctggccgccccccaggcccaggttctcctctggctcctgcgctaccaggaggtcccggtggacccggcgggcctggctggttgcgactgga

SEQ ID NO: 68781 - DNA, 1216 bp, Homo Sapiens
  misc_feature (688)..(791): n is a, c, g, or t
ctattgcaatattgcatttcttttatttaaaaaaaagcttgaagcaaatataaaaatgttaacacttacatttttgtatatatagacactttttgtattttctacatttttcatatgtaaaccctccccactctccacacatcattattcattatgatcatgaggggtttatcccaggatattcattgatagaaaattaaaagagtaatttataaaatcactacatgaacaagtaaaaacacacacagcaaaatttacatcaaaattattacgtggtacagaatccaaaagtcataaaaagcaaaagctatctttttttcactctggcacccatctgttcttccctggagtcaaacactattaccaatttttaggtatacttccaaagatacttactgcatttacaagcacagacttatattgattctaaaagaataagagacattttcagcatgttgttttgttcaacaccacagtatatcttaaagatggtcgcccatcaatacatatagagatctctcttttttatgggcttcatagtattatcatgtgctgatatgccaaaaactaatccattagacccttttgggtatatatttactattttgcagtcttctgctcttaggaataaagtgaaattcaatcacctgtatagaagtatttcacacatgtttgaatatatatgtannnnnnnnnnnnnnnnnnnnnnnnnnnnnnnnnnnnnnnnnnnnnnnnnnnnnnnnnnnnnnnnnnnnnnnnnnnnnnnnnnnnnnnnnnnnnnnnnnnnnnnngcaatgcatggaagtgctttcccccttaaagtttgttaccaatctgagtaattttgtcaattgatacttctgctatcatgagtaatgtttccatatctttaggagctattttaaattctttttctgtattctaccacctgtcaaatcctttgctcatttttcctttgagaccttagaatttttctcttcgatttgtagaagctattttttgaaaataagaaattaactatttggctgtgatattcattgcaattctttttccagtgtgttgtttcttgaccttttatgctgtttttggtacagagataattttgtttaaaatagtcaatattttccttcctggtttctgattgagggccatacttagaccttccccccggccgtaatggccgaattcccgggcatatgtccggtaccgtcgactg

SEQ ID NO: 68782 - DNA, 1047 bp, Homo Sapiens
  misc_feature (589)..(603): n is a, c, g, or t
agcccaaacttaacctctgagaaagaacataagaactcaaggagaacataagagaaaaggaaacctgttacagaaaagacaagaatctgtgttttggaatgagtctattcttgggtattgaacttttagttttgtttgcccaaggattaattgaggaaatcagctaagaaaatggactttagacaaaagcaagaggatcagatgaagaaaaggagaggtagatacagtcagtgtcacttcaggaaagctatttaaaaaaacttgaaatttaattgaaagaagaaacaacaacaaaaaagcctaaacctagcctctgaacaacactaacatgagaacacaagaacttaagagaaaaagaaacctactcaagaaaagacagaagagacagtgatttgggatgagtctactctaggattttcaactttttagttttgttccttcaaagttgaaggaaaaaaagtttggttttataaaattcatgttattgtaatttttctaggtggatggctactttaatctctaaaaaagccaagtgaagtaaaagtattcagtatgccttttcctcaagttactttccttcattttcttnnnnnnnnnnnnnnnttattaaatgtttctcacatatctcacatataatgtaatttccctaaatgaagttgtctctacttctgctcatcaaattgctgtgatagtgaattatttattcatgggagataatttattttaaaggacagaattaccaagcgttacaaaatcagttctttccttggttttgtgttagtgttggtggtattttattgttgtttttctgtgtttatgtgtctcagctttctccaaggaatatgtatgaaataacttaaactgattttttctttgttaaatctaatttgcagtgtatttttgcattttctagttctgaaagtggaaaatgaaacagtctataataaacttagatgatatatagttttaaaacggtctcaaaaagtactgatataaggtcagtctatattctggaaatgtttatattaaagtgttttaatttctaaa

SEQ ID NO: 68783 - DNA, 612 bp, Homo Sapiens
ggtgagatcctggtgttccccaaaaggtgttgactgattcagctctgctgcctcatagccttcctgagttccagctacagacctggggtctcgtgttcattcttggggttccagtgactaaactgctaaaatggttcacctgagagcaagaagcacactgccttgggacattttcattcactgcatcccatctagttgtgcccagtgtagaccaaatgtcatcatccaaaccacacgggacagaggcctgcatgcgtcctgtttggcaaacagctgcccagccagtgggggagcagttcatgcttaaactaccaccccctccaggtgtcttaggcacgctggtccttaggagaagggttgaccttccactccctcttgcaggtgtccttaagtttgctcgcttggtcaagtcctacgaagcccaggatcctgagatcgccagcctgtcaggcaagctgaaggcgctgtttctgccgcccatgaccctgccaccccatgggcctgctgctggtggcagcgtggccgcctcctgagagttggccctcccttgtgccactgccaggggaggaaaggccttgatgttccagacaataataaatgcgcctgtgactt

SEQ ID NO: 68784 - DNA, 474 bp, Homo Sapiens
  misc_feature (375)..(375): n is a, c, g, or t
ggccattggcaacaagggaaggcccaactctcaggaaggcggccaacgtgccaaccaagcaagcaggcccaatgggggtggcaagggtcatgggcggcagaaacaagcgccttcagcttttcctgacaggctggcgatctcaggatcctgggcttcgtaggacttgaccaagcgagcaaacttaaggacaccttccccgtcgcagctgaaccataggctttgataacctcctgctggatctgcgtgccacgggcagcacgaattgcagcatcttacccatgtcgttgcaggcgttatcccgagcctcgtccatgcgcactgcattctccgggcggagaacgcctggatcacctccgcgaggaccacctttgcttntcagcgctcaaggccgccggttgggtcgaggtctggccatagggcgtctgaagctctaggttcagcggaggtaaatggaaaactcacgaataaagagcc

SEQ ID NO: 68785 - DNA, 1283 bp, Homo Sapiens
ttttgctctgggcctttactgccgaatccaggtctccgggcttaacaacaacgaaggggctgtgactggctgctttctcaaccaatcagcaccgaactcatttgcatgggctgagaacaaatgttcgcgaactctagaaatgaatgacttaagtaagttccttagaatattatttttcctactgaaagttaccacatgcgtcgttgtttatacagtaataggaacaagaaaaaagtcacctaagctcaccctcatcaattgtagagttcctttatatcccatcttctctccaaacacatacgcagcagtgttacagctcttttagaatttgtctagtaggctttctggctttttaccggaaagcccctcttatgatgtttgttgccaatgatagattgttttcactgtgcaaaaattatgggtagttttggtggtcttgatgcagttgtaagcttggggtatgaaggtttgggccacgcctgggcgcttccggctgcgccggatgctgtttcctttccgctcccaggggcgtggggaacggttgtaggacgtggctctttattcgtgagttttccatttacctccgctgaacctagagcttcagacgccctatggcgtccgcctcgacccaaccggcggccttgagcgctgagcaagcaaaggtggtcctcgcggaggtgatccaggcgttctccgccccggagaatgcagtgcgcatggacgaggctcgggataacgcctgcaacgacatgggtaagatgctgcaattcgtgctgcccgtggccacgcagatccagcaggaggttatcaaagcctatggcttcagctgcgacggggaaggtgtccttaagtttgctcgcttggtcaagtcctacgaagcccaggatcctgagatcgccagcctgtcaggcaagctgaaggcgctgtttctgccgcccatgaccctgccaccccatgggcctgctgctggtggcagcgtggccgcctcctgagagttggccctcccttgtgccactgccaggggaggaaaggccttgatgttccagacaataataaatgcgcctgtgacttaaaaaaaaataaacttctagacactacacatcaaaatcacaacctcaaaccccgcggcggcaatcaagtccggggcgggcacaacaagacgggacaagagaggcgcgctggtcgcaccgctgtgctcccgtcacccaccttttgtgcacaaggtggccacctgccggcccccaaaaggcagcgaaaaactccggaaggcgggtaccggatgg

SEQ ID NO: 68786 - DNA, 2812 bp, Homo Sapiens
  misc_feature (1260)..(1260): n is a, c, g, or t
  misc_feature (2544)..(2544): n is a, c, g, or t
  misc_feature (2579)..(2579): n is a, c, g, or t
  misc_feature (2628)..(2628): n is a, c, g, or t
  misc_feature (2721)..(2721): n is a, c, g, or t
gcgtgagggtgggatcctcccaagttcctcttagtagccagcttcggcacttccgggaggagccggaaataatttttgtgctcggcggaggctctctaggcgtgcgacccagcgactcgatagccggaagtcatccttgctgaggctggggcaaccaccgcaggtcgagacagcaggcggctcaagtggacagccgggatggcagagcgtgcggcgctggaggagctggtgaaacttcagggagagcgcgtgcgaggcctcaagcagcagaaggccagcgccgagctgatcgaggaggaggtggcgaaactcctgaaactgaaggcacagctgggtcctgatgaaagcaaacagaaatttgtgctcaaaacccccaagggcacaagagactatagtccccggcagatggcagttcgcgagaaggtgtttgacgtaatcatccgttgcttcaagcgccacggtgcagaagtcattgatacacctgtatttgaactaaaggaaacactgatgggaaagtatggggaagactccaagcttatctatgacctgaaggaccagggcggggagctcctgtcccttcgctatgacctcactgttccttttgctcggtatttggcaatgaataaactgaccaacattaaacgctaccacatagcaaaggtatatcggcgggataacccagccatgacccgtggccgataccgggaattctaccagtgtgattttgacattgctgggaactttgatcccatgatccctgatgcagagtgcctgaagatcatgtgcgagatcctgagttcacttcagataggcgacttcctggtcaaggtaaacgatcgacgcattctagatgggatgtttgctatctgtggtgtttctgacagcaagttccgtaccatctgctcctcagtagacaagctggacaaggtgtcctggggaagaggtgacgaatgagatggtgggagagaagggccttgcacctgaggtggctgaccgcattggggactatgtccagcaacatggtggggtatccctggtggaacagctgctccaggatcctaaactatcccaaaacaagcagggccttggagggcctggggagacctgaagttgctctttgagtacctgaccctatttggcattgatgacaaaatctcctttgacctgagccttgctcgagggctggattactacactggggtgatctatgaggcagtgctgctacagaccccagcccaggcaggggaagagccccctggngtgtgggcagtgtggctgctggaggacgctatgatgggctagtgggcatgttcgaccccaaagggcgcaaggtgccatgtgtggggctcagcattggggtggagcggattttctccatcgtggaacagagactagaggctttggaggagaagatacggaccacggagacacaggtgcttgtggcatctgcacagaagaagctgctagaggaaagactaaagcttgtctcagaactgtgggatgctgggatcaaggctgagctgctgtacaagaagaacccaaagctactgaaccagttacagtactgtgaggaggcaggcatcccactggtggctatcatcggcgagcaggaactcaaggatggggtcatcaagctccgttcagtgacgagcagggaagaggtggatgtccgaagagaagaccttgtggaggaaatcaaaaggagaacaggccagcccctctgcatctgctgaactgaacaaactatcagaggaaaggaagtgggactggcactatttgaggttaagacaaactgcatatgtacttcaattgctttgcacttttccgtttcagcggaagacctgaagagtggtcagaacagagcctttgatttttattatggttattttattgattattactggcaaaaacggccaggtacaacacctttttcatacaaggcccaggaggcttagtccagtctgtgctcctgggctacaaggacccagcctgagatggtcccatctgcagggccccgcaccagttggagcagatgcctccccaccaccaattgccaaaggtccaataaaatgcctcaaccacggagtctgcgtgtgtcagtgatgcctagccccgccttccccagcagaccaatgtagggatggaaaagggagaaaaacagtaaacttgtgaccctgaggttcttgtctccagcgtccaccctgcggcttgggagctcctcctcgggaggcagcccccgtacatacgcacccgcgactttgcagctttcacctgaaggtctgagcgaagcccgggcggcgcacgtgcagtggatacctccacccccctgggaggcggggtcgcgctcagagccaatgagagcttgcggggtggaggggtagggaagcttccacaggccggtggggaggaagttataaagagggtacgagggggccagctggagagccatgcagtccaagcgggattgtgaggtaagcggctggcgacttgggggccggcgagccccgccggagcgggggtcggctttagggacccagtacacangagaggtgggggcggcttggcgattcgcattccancttctttcctctcagcttgggtgaagggtgatcagagacaggcgggctngaggtggtcaggaacagatcgctgggcagtacgggcaagaataggcggcaccccagtcgtatccagccctgtaggcatcactattgcacacangtacgtgtacatcaaacttgtaatcctcacccccgtggtctctgcgatctgctcagcatccaagagcatatcgacagcacgtcggggatgt

SEQ ID NO: 68787 - DNA, 1217 bp, Homo Sapiens
ctctttgcactgatttttattaaacaagtaaggctggtagtggaacatatttttatttaatgcataaacatataagtcccttattagagaaactgtatatattgatgaatatggtcaatggtcacatctatgggttaattctttaaaaatcagaaccaataattaggatagattttatgctctcttcattacattgtgaagtgtcttgtgtagtcatattctattgttggaatgacagcttgtacaaatttcaagaaaataagaagatacatatgaactccaagttctccccctccttctgcaacagtctcaatgattttcttcatcacctcagcatgccttggcttaaataatgctgcttcagtttttacgactataatcttcatgacagagacagtcaactttagaatatgagagtaaatctatgattccagaggatttgaaggcacaatctgaggcagcccatggaatggtctaaaatgtccttgaagttttattttataggcactcagattttttgaaatacttatatcccattccacaatacagtcatctattttattaaaatgtttaacataattaccagttatttttcccccaactgagtaaagtttatacctcagagagatacgcttcagtttgataagcaccatcctaagaccttaaaccataagaggaatcaagagaataactctaaaaactgaaaactttttagattacataattcaaaactaaaactaatggctcctaaattatttttcatagttagcaaagtttcagacataataaaactgaaaaaatgagcaaggtcttccacggagttaaagtttgagagtaaagaggttgcagaatatgagaagaaaatattaaaggttgtttttaactagagggaagagaaaacaaaatgtttcatctaactagtcaacagaatatgagtttcactgaaaaatattgttactagtatgttaccagtattttccagtcaactgggaaagttatctattagaaataaccaacctaaagaaattggcatgtagtaactgttttttaagaaaaattctgaactaatcatgtatataggttcagcttcacagatttggctctgtgaaaaaacactgatacaaagaaaatcccaacttataaaatgcacttgacttgctaaggctgcccggccgtaatggccgaattcccgggcatatgtccggtaccgtcgactg

SEQ ID NO: 68788 - DNA, 766 bp, Homo Sapiens
ccgtaagagatcacactgaaaataagacatataaggcttcaagatgctcagcactatgtgaagaggaagaagatgaagatgaaggagaagctgcagatatggaagaatatgaagagagtggattgttggaaacagatgaggctaccctagatacaaggaaaatagtagaagcttgtaaagccaaaactgatgctggcggtgaagatgctattttgcaaaccagaacttatgacctttacatcacttatgataaatattaccagactccacgattatggttgtttggctatgatgagcaacggcagcctttaacagttgagcacatgtatgaagacatcagtcaggatcatgtgaagaaaacagtgaccattgaaaatcaccctcatctgccaccacctcccatgtgttcagttcacccatgcaggcatgctgaggtgatgaagaaaatcattgagactgttgcagaaggagggggagaacttggagttcatatgtatcttcttattttcttgaaatttgtacaagctgtcattccaacaatagaatatgactacacaagacacttcacaatgtaatgaagagagcataaaatctatcctaattattggttctgatttttaaagaattaacccatagatgtgaccattgaccatattcatcaatatatacagtttctctaataagggacttatatgtttatgcattaaataaaaatatgttccactaccagccttacttgtttaataaaaatcagtgcaaagagaaa

SEQ ID NO: 68789 - DNA, 594 bp, Homo Sapiens
gcacgaggattatattttgcttatagaagagaaagatatcccttccgaagaggaggaagctcacagaagtgtataaccttccaaaaagtaaataagtccaggcttgccgtgattatgccctacccggacttccttatcccgtctgtgggagacccaggtgctttctcattactcttcagaaggaaaccgctttggaggtcgtgtaattgggacttggggatcagggagaagttgccgaaacttctcataccagtaactactgaagtagaagattctggaaaaatccttgtcttgggggcacaggctaaaacctgaaggatttttaagatgaccaaggttccagccaccaagaagcttcagagttcccccaactcgggggctgtccggcccttttatgcctcggagaacctaaggcaggtcccagacaacccaatgaagagcatcaagtatatggacaaggaaataataaacctcaaaaaggaccttatacgaagccgctttttgatccagtctgtgaagatagcccgtggatattttgctattctgagggaagagactgcaaagaaaaagaagcaacaacaacttcagaaactg

SEQ ID NO: 68790 - DNA, 1817 bp, Homo Sapiens
  misc_feature (1552)..(1552): n is a, c, g, or t
  misc_feature (1621)..(1676): n is a, c, g, or t
gggggcaccggaggctccgaggctcctgcgctcccgcgccgcgctcccctcgcccgcccgggccgccaggagaagaaactgaggcctggaatttgattaactcattcaaggttacccagttgatagaaggacaaggacagaatcaccagcactggctgaaggtaccttaacatggggaatcttcttaaagttttgacatgcacagaccttgagcaggggccaaattttttccttgattttgaaaatgcccagcctacagagtctgagaaggaaatttataatcaggtgaatgtagtattaaaagatgcagaaggcatcttggaggacttgcagtcatacagaggagctggccacgaaatacgagaggcaatccagcatccagcagatgagaagttgcaagagaaggcatggggtgcagttgttccactagtaggcaaattaaagaaattttacgaattttctcagaggttagaagcagcattaagaggtcttctgggagccttaacaagtaccccatattctcccacccagcatctagagcgagagcaggctcttgctaaacagtttgcagaaattcttcatttcacactccggtttgatgaactcaagatgacaaatcctgccatacagaatgatttcagctattatagaagaacattgagtcgtatgaggattaacaatgtaccggcagaaggagaaaatgaagtaaataatgaattggcaaatcgaatgtctttgttttatgctgaggcaactccaatgctgaaaaccttgagtgatgccacaacaaaatttgtatcagagaataaaaatttaccaatagaaaataccacagattgtttaagcacaatggctagtgtatgcagagtcatgctggaaacaccggaatacagaagcagatttacaaatgaagagacagtgtcattctgcttgagggtaatggtgggtgtcataatactctatgaccacgtacatccagtgggagcatttgctaaaacttccaaaattgatatgaaaggttgtatcaaagttcttaaggaccaacctcctaatagtgtggaaggtcttctaaatgctctcaggtacacaacaaaacatttgaatgatgagactacctccaagcaaattaaatccatgctgcaataacaattctggaataagcacctgctgtagacagaagacagtattctgcaatgactgagaatgcagttttttagtgattgcaattactatctcatttattcttgcttttatttctttcctctgttcctcttccctcttttttaatcatgttcttaagacttcttttctgtgccaaaatcagtaaagttacactctgaagggatatcatcctttcaaacgggccatctaaggcagctaattatgcattgcattggggtctctactgagaaaaattctgtgacttgaactaaatatttttaaatgtggattttttttgaaactaatatttaatattgcttctcctgcatggcaaaactgcctattctgctatttaaaaaccctcaatgactttattttctactgccgcctnttttcatgtgcaaccaaaatgaaaatgtttaaattaactgtgttgtacaaatggtacccaacacaaacnnnnnnnnnnnnnnnnnnnnnnnnnnnnnnnnnnnnnnnnnnnnnnnnnnnnnnnntttgtaaggatgtatgttgtgtgtttaacctttattaactaacgttaaaagctgtgatgtgtgcgtagaatattacgtatgcatgttcatgtctaaagaatggctgttgatgataaaataaaaatcagctttcatttttct

SEQ ID NO: 68791 - DNA, 635 bp, Homo Sapiens
  misc_feature (455)..(494): n is a, c, g, or t
ggtctgcaatgactgagaatgcagttttttagtgattgcaattactatctcatttattcttgcttttatttctttcctctgttcctcttccctcttttttaatcatgttcttaagacttcttttctgtgccaaaatcagtaaagttacactctgaagggatatcatcctttcaaacgggccatctaaggcagctaattatgcattgcattggggtctctactgagaaaaattctgtgacttgaactaaatatttttaaatgtggattttttttgaaactaatatttaatattgcttctcctgcatggcaaaactgcctattctgctatttaaaaaccctcaatgactttattttctactgccgcctttttcatgtgcaaccaaaatgaaaatgtttaaattaactgtgttgtacaaatggtacccaacacaaactttttttaaattagtaatacnnnnnnnnnnnnnnnnnnnnnnnnnnnnnnnnnnnnnnnntaaggatgtatgttgtgtgtttaacctttattaactaacgttaaaagctgtgatgtgtgcgtagaatattacgtatgcatgttcatgtctaaagaatggctgttgatgataaaataaaaatcagctttcatttttctaaaa

SEQ ID NO: 68792 - DNA, 439 bp, Homo Sapiens
tgctgccgccgcggcgggggcagctcgcaaacctgtggcggtgacgtgagccccgccaacccggaaacggcggcggcggcggcaccggaggctccgaggctcctgcgctcccgcgccgcgctcccctcgcccgcccgggccgccaggcccagtcccagggcgcaaggctacttgcgtcagcagcgtgccgaagcaagatagcggaatcaggaagagagccggccggaagacacctgccctggccggaagatacgtacccctgaagatcgagaaagaggccatccgggtatcacgtagcagtttcgtacgactaggagacttcctgttacaggagactatgaaacctttgttccgtcctcacttggggctgacgccattttaggcctcagcccgcctgcatccaggcgctcattaaaacagcatgttgctccacaaaaaa

SEQ ID NO: 68793 - DNA, 1640 bp, Homo Sapiens
  misc_feature (1212)..(1322): n is a, c, g, or t
  misc_feature (1447)..(1456): n is a, c, g, or t
catcttgttgctttattcagtttgctccgagggcaaaatcaacagtagtagagatcacaaacattattttgattggcctcacaagcctcatcagtaaaacctgaaaaaacagaaaatgttacacaagttgcaaagaaagcactcctggcgttcactgacatgatagcaaaaggaaagaatataaatgcaacaggtgttaacatttagaacagtacttgtaaacctgctcatttctagacaagtccgggactctcgctgcgaacccttcatctatcactgctgatttcctttgacatgaaatatgactttatgaaaatcttcctaaacctcactctggctgcacctgagtggttcctattccaactgttctgataatgaattcacccaagctttaaccgcagctatccctccagagtccctgacccgtggggtgtacagtgaagagacccttagagcccgtttctatgctgttcaaaaactggcccgaagggtagcaatgattgatgaaaccagaaatagcttgtaccagtacttcctctcctacctacagtccctgctcctattcccacctcagcaactgaagccgcccccagagctctgccctgaggatataaacacatttaaattactgtcatatgcttcctattgcattgagcatggtgatctggagctagcagcaaagtttgtcaatcagctgaagggggaatccagacgagtggcacaggactggctgaaggaagcccgaatgaccctagaaacgaaacagatagtggaaatcctgacagcatatgccagcgccgtaggaataggaaccactcaggtgcagccagagtgaggtttaggaagattttcataaagtcatatttcatgtcaaaggaaatcagcagtgatagatgaagggttcgcagcgagagtcccggacttgtctagaaatgagcaggtttacaagtactgttctaaatgttaacacctgttgcatttatattctttccatttgctatcatgtcagtgaacgccaggagtgctttctttgcaacttgtgtaacattttctgttttttcaggttttactgatgaggcttgtgaggccaatcaaaataatgtttgtgatctctactactgttgattttgccctcggagcaaactgaataaagcaacaagatgaaaactggagagagggggggcggcgcgagcgctcaggtccgggagcccnnnnnnnnnnnnnnnnnnnnnnnnnnnnnnnnnnnnnnnnnnnnnnnnnnnnnnnnnnnnnnnnnnnnnnnnnnnnnnnnnnnnnnnnnnnnnnnnnnnnnnnnnnnnnnnccgctgcgcggcgccggaaaacttctccccgcgccttcgtgggcggccggcggggccgcccggaggcggaggcgccgccggcgaccacgccggcgcacccaaacaagacccacgggggcgcggannnnnnnnnntggcggtcgcccggcacaaaaaaacacgccccggggggggcgagcaccaccgggagtgcgggaagagacgagcgccagagggcggcggccgcgcccggcggatctcttctggggggtccgtccggcggcgggcctgctggcgggcagcgggtgtcgcatgcggtgactggcgcgcgcgcgcgga

SEQ ID NO: 68794 - DNA, 1355 bp, Homo Sapiens
cagtcgacggtaccggacatatgcccgggaattcggccattacggccggggtcccaatccttttggtgatcctaatttatcacaacctataatgccaattcagcagaatgtggcagacattttatttgtgagaacaagttatgtgaagaaaatcattgaagactgcagtaattcagaggaaaccgtcaaattgcttcgtttttgctgctgggagaatcctcagttctcatctactgtcctcagtgaacttctctggcaggttgcatattcctatacctatgaactgcggccctatttggatctgcttttgcaaatcttactgattgaggactcctggcaaactcacagaattcataatgcactgaaaggaattccagatgaccgagatgggctgtttgacacaatccagcgctctaagaatcactatcaaaaaagagcataccagtgtataaaatgtatggtagctctatttagtaactgtcctgttgcttaccaaatcctgcagggcaatggagatcttaaaagaaagtggacctgggcagtggaatggcttggagatgaacttgaaagaagaccatatactggcaatcctcagtacacttacaacaattggtctcccccagtgcaaagcaatgaaacgtccaatggttatttcttggagagatcacatagtgctaggatgacacttgcaaaagcttgtgaactctgtccagaggaggagccagatgaccaagatgctccagatgaacatgagtcgcctccacctgaagatgccccattgtacccccattcacctggatctcagtatcaacagaataaccatgtgcatggacagccatatacaggcccagcagcacatcacatgaacaaccctcagagaactggccaacgagcacaagaaaattatgaaggcagtgaagaagtatccccacctcaaaccaaggatcaatgaaatgcacataattaactggttccatcaagactgtgcacccaggccttacagtccaacctttttctgtgtctggctaatatttaaaactagaaaaactattcctaatcaacatggagtggagagtttattcactgtcttatctgcagaaatttgctgtcaatatataacccgcctgcagtggaaagtgtatagtgttttgtaataaatggcctgatgctaatgtgtaaatggcaaaggtgtatatagtatattaatgttgactgttaattcttaagcaagaaacttttttcttgatgagactcacagatctacacaaactacaaaagttaattttcttgttacacccactgcactctgcaaccagtgttgcctgcctcatggcagttggatcagctcctttaca

SEQ ID NO: 68795 - DNA, 476 bp, Homo Sapiens
tcggtcggtacctctgtgcgcatttaggtataggaatatgcaacctgccagagaagttcactgaggacagtagatgagaactgaggattctcccagcagcaaaaacgaagcaatttgacggtttcctctgaattactgcagtcttcaatgattttcttcacataacttgttctcacaaataaaatgtctgccacattctgctgaattggcattataggttgtgataaattaggatcaccaaaaggattgggaagaggaggattaccattgattgaagactgcattcttgaagagacattgcaacagcggatcagctgtgacactactgagtataatttgcctaattcagcatactggtatttgattggaggacctggaccttcatctaaagacacaagcataaaagtagcaggtacactcaatttcagaagctgtgtcttctctgccacacctaaatgcgcacagaggtaccgacc

SEQ ID NO: 68796 - DNA, 2681 bp, Homo Sapiens
  misc_feature (126)..(126): n is a, c, g, or t
  misc_feature (145)..(146): n is a, c, g, or t
  misc_feature (227)..(227): n is a, c, g, or t
  misc_feature (940)..(958): n is a, c, g, or t
  misc_feature (2433)..(2445): n is a, c, g, or t
  misc_feature (2538)..(2548): n is a, c, g, or t
  misc_feature (2608)..(2619): n is a, c, g, or t
ctatagccccagttcatttgtcggtgatgtttgattgaccgtacattcaacagaacgttgactgtagaattatcgatcattaggattgcctcgagccagattcgcagagattaatcatggcaactntatataacaatatatagtnnacagaagccagccagagagtgtcagcacttaaaatttgaccccaaaaactacaaatcagaaaagtattttatgttctagcngaggagaaggcttagggctaaccagaggtctgaccctagaatgccaaggaactgagaatgggctccgatgaaaaccttccttttcagattccctgtctgctcaattaaagatgtttgaatccaaaggaagtcaaggaagaaaaagcatggaaaggaagagaactgattcctactgaaaattcaaattctattaccattctaactttcataaaaagttgggatcaagaagcagctgatttcctgccagggcttatattagggggtgattcttaaaggacattaggattggtgctcagaaatggttaatcatgctgtgtgctagccagggccagctggtaccttctttgccatgagcattcaagggacggctaacctttattgacaatctatatcgcaaaagtcaggaaagaggttgtgagctgattggattaaagacctggcacttcagtaactcagcacgcttccacttcactcaacttaagagagttcattgacagtgttaggatgtgaaggctgggaaacacttattttgcttcaagagttccacttggctctcccaaataggtacctcaaaaactgttagcaagcggcatttggatgtcttgacaggggctttgcagggatttttagggttttttccacattgtccacattaatggttggcatgattgtgcttgcaggccaagaaatgatcataccccttgccaaaggtnnnnnnnnnnnnnnnnnnntgagttgaaaattgaagtgacctctttccagctgagttgcaggcttattttgtaacctttcctcatccagttttccctgagaacctgggtttatctctagatagctgttcaggttttttagctgaggggtaagtatcctagctgagagttttgcatctttgggctgggtttgcagtggttgtgttttgcataaaatgtctagtctttgccacagatagtgagctacccactaatgagcccatggttttatttcagaagcacatgagggtgtgaaaccactctgttacctttctgtattgtcttagctattcaagccagtcagaggataatatatatattctcatcagcactcagagtagtcagtgaagagagtagatcacacttgggcacaccaggattcacataaacattgtatcttctctgtggatgctcaggccttgtctacaatgaggctttacaaccttcctttgttttggctcgggattacttcctggctgtctaataattgaaccataaccatgtaatattatgtaaaggcctggaaattactgttgctaaaaaaagtcatgtagtttcatgtagtgtagcatccttggcatcgttttccaaaatttgttccttctcccttttttttctttcgtgtgtggcatgagtgtgtatctgtgtaaatatgattgtatatgtgttactccgatatgtaatccatttcactggctgagtttggcccctagccatgtgttaatataaagtaggcatggcttcccaatggaaatctctgagaatgacagtggagttgtgcaagcattttacattgccacataattgacttgccattttatggttaaaaacggcacattaggcagttgaatatgacgttaccttgcagactaaaaggttgaaggcccgaaactaacttttagctaacaataagggctgtgccccaatggaaactgagttcattttctgagaaaggtttggatgactgaaatatttcctctacagtcaaggactttggcatgcggtggctgaaactgagcttttttgtgtgggctccagttctcactgttctgcaatgctcatggcaagttgaatggtgagctagcttataaattaaagagctctgaactgtattcagaccgactgggtatctagcttactgttttaacatcattgttgaaaccagaccctgtagtccagtggtgctgccctgttgtgcaaactgctcctttttctcgtgtttttgtaaagagcttccatctgggctggacccagttcttgcacatacaagacaccgctgcagtcagctaggacctttccgccatgtattctattctgtagtaaagcatttccatcaacaatgcctaattgtatctgttatttttggtttaacacacactgattcatactaataaatattttcagttttaaaaccccaccacgcacaaagcaccgccccccgtcccaggaaagtagtnnnnnnnnnnnnngaaacccaccccatgggggccacccgtcacgacactccccccgctccaccgggacgcgatgcgcggccctgcaacgccaaacacatatttttnnnnnnnnnnncgcgccctccacaaaaactccctccgggaggggcgcgcctttggcaagcccccgccttcnnnnnnnnnnnnataagggcggccgccccttatcgtacgtacgccccaataaaacccccgggcactagggtttc

SEQ ID NO: 68797 - DNA, 991 bp, Homo Sapiens
  misc_feature (77)..(111): n is a, c, g, or t
accatacagatctatggggcttcggcgtcttagccgaacgacgagcgcagcgagtcagttgagcgaggaagcggcgnnnnnnnnnnnnnnnnnnnnnnnnnnnnnnnnnnncagtcgacggtacggacatatgcccgggaattcggccattacggccgggagcttgggaaatgtcccaggctattcaagaaatataaaaaactagaaggatactatatataccatatacaatgctttaatattttaatagagctactgtatataatacaaattagggaaatacttgaatatatcattgagaaaaaattattgtcagatcttactgaattattgtcagactttattaaataaagatagaagaaaaccttgctaatgaattaaagtgaaatttgcatgggattcagtttctctaatgttattttccgctgaaatctctaaagaacaagaatgacttcaattagtaaaagtcaattttgggaaaagtcatgggtatctgttttttaagtgtgtcaagctgattaaaatggatgaaacaaattactcatcataagttgtttcttaagcttgtcaatatgtcaatagatggtgagtccagaacttatttcaaattgctaagacaaattatctaaattcgtaagaattaacatatagaatggtctggtcagtacatttataatttatctatgcatgaaaaagtattgttttgtttgaaacatgaatttcatagcaagctgccatagaaaggaacgcaggctgttctagaccttcaactgcctaaattatacaaaaattcattttaataaactcaattattagctatttattattcaaagacccatatttaaatcctttgctgaccatgttgacatatatcagccttcttctagacaaactgtcaactctcaaccatcttgacagtagaagtgacagtaaaaaatgttgaatgatcagagattatattaaaataaacatgtaattttcaacctcgtgc

SEQ ID NO: 68798 - DNA, 766 bp, Homo Sapiens
  misc_feature (47)..(69): n is a, c, g, or t
  misc_feature (95)..(95): n is a, c, g, or t
tgataaaagcatgaacctgcatgtaagaaacgagaggacgtgtgttnnnnnnnnnnnnnnnnnnnnnnnccccagggaaggaaaatccaagagtntcaggtctagagcttgtgctgcacttggaaagagcacctggcacctgcccctgagcaacagtggggccagctgcaggcccaaagacctgctccaccagtcacagcagctgtgaggccttgggcaagtcacctcttggagcctactcgtgcagtatggagacagtaactctgccttaaatgcctcacaggcttgttagaagggacaaagaaaatgatggacttagtgcatattatatactatatacaccgtctatggctgtccagatatttacagtattacttagctatttccactgccaccaaacgagacagcaggcggagagtgactctggaaggaggctgaatgtaagatgaggcagtcagtattagggaaaggccgcatccccatgaagggggtgggctggccttttctttcccatggccccctcaggcatttcctctggcatatgcttactcaggctgcgggggtcaccccagctttcccttaaactgatgggagagcaaaggagactggtgtttggtattctgcagccccaggctcagctggaccacagtgggcagggaatgaatgggctctggaagtactgcacagatgactgacagagaagaacaaatgaataaacaggtactgtaagaatccggaataaatagactcaccatgagtgtgcttc

SEQ ID NO: 68799 - DNA, 1165 bp, Homo Sapiens
  misc_feature (71)..(103): n is a, c, g, or t
  misc_feature (105)..(350): n is a, c, g, or t
aggctggaccggtccggaatttcgggataaagaagacagtattttaaggattctgatcagaaccagattcnnnnnnnnnnnnnnnnnnnnnnnnnnnnnnnnngnnnnnnnnnnnnnnnnnnnnnnnnnnnnnnnnnnnnnnnnnnnnnnnnnnnnnnnnnnnnnnnnnnnnnnnnnnnnnnnnnnnnnnnnnnnnnnnnnnnnnnnnnnnnnnnnnnnnnnnnnnnnnnnnnnnnnnnnnnnnnnnnnnnnnnnnnnnnnnnnnnnnnnnnnnnnnnnnnnnnnnnnnnnnnnnnnnnnnnnnnnnnnnnnnnnnnnnnnnnnnnnnnnnnnnnnnnnnnnnnnnnnnnagaaccagattcttaactgccacagactcttgtattatgtaatttatatacagaacacaaagcacttgatttgcttaactgatgtacttgatgatactataaaacctatattatgagaaagcattgctccttcaaaggaatcaagtgatagcaaacactcggtcctgtttccaggttttcctcactgttcattttgcctttgttcttgcaggcggagaatgaaaggggcgagagctaaagtgtgttgtcaatgcaagtcaatcattaaccaacaataatttacaaaagaactttatatttgctgtaatcattaaatttagttactaatcccaggaaaagggttagtccttcctcctagtttgtagatttgcaaatggagatgaataattgaatcctattttaatcttttatctgcagtaatctgggcttcttattaccggatatatttgcattttacctccaggccatgttagttcttagaagattattttcctcatgaaccctgttttgttttgcttcctttctgcttcaattctaatgtcacattgcatacctggatgtaaacagcagtcagtttctcagatcaaatagagccctgtagcaacttggaagacacagaagacacacggacataaaactgtatttattatccagggaatgtcactacggattaattatgttaatgaggccatcaaaatctatggtaatctttcaggctttgttgtttgataccagatacagcaaatgagataataatgtgtctaattgtgcctagccagtattggtatttaataaaactttgtcattgaaaaaaa

SEQ ID NO: 68800 - DNA, 811 bp, Homo Sapiens
aatgaaattgttaaggaggaaaaatttttaatatagtcttatctaccacacatccccatagatttaaggattttaatacgaaagacatgatgtatgtatttaagccacgttaaaagaaaacaatataactatggaccggtattcagtgaatacagtttcatggattttaattctttcaaagcacattaaaaatggcgtgctgataaaccccaagtaaattaacccttttcccgtataaagccattttttgttttgaagaggggaaattatatttattgttgtttactgaatcctggtgtgaaagcatatcagatatgtatgaactgctactgctgtacttccgatttacggacatcattttattgctatttgtagacgtgataacatgaacatgagtacctatttatgtgggccttcagtggatgggcagtgccactcaggtctctggggtttccctctctaattttaagtaaattgacatataactactatgcttataaaaatgaagtaaggaaaacaagtagtcctgtttgccactaaaaacattttcaaaggaaaaataaaatgaaagtactttttactttttatgatactcagaaattaggatgaagaacttttaaaattgctgaagatcaaagaggttatctctgccagtcacaagtgtggctggtgtcattctgggtctgactggagccctcctggactgtttctttaatttcaaaagccctgcagacatagtacctggtcagaactatgcctcggtttatttatcattttgaaataaaatcagaatttcaacctgtaaaaaaaa

SEQ ID NO: 68801 - DNA, 1215 bp, Homo Sapiens
  misc_feature (85)..(110): n is a, c, g, or t
  misc_feature (226)..(495): n is a, c, g, or t
  misc_feature (718)..(728): n is a, c, g, or t
cggggcagatgtctacttgttcagtttttcaaatctgttttcctgagtataaataagagtatttaaagaaataatttggattgcnnnnnnnnnnnnnnnnnnnnnnnnnnaaccatctgatactaagaagatgaatttgcacagatttctctgcataatttctcaatatctttagcacagtatggtgatgatgacttttaagcatttacatcacgtactcataacnnnnnnnnnnnnnnnnnnnnnnnnnnnnnnnnnnnnnnnnnnnnnnnnnnnnnnnnnnnnnnnnnnnnnnnnnnnnnnnnnnnnnnnnnnnnnnnnnnnnnnnnnnnnnnnnnnnnnnnnnnnnnnnnnnnnnnnnnnnnnnnnnnnnnnnnnnnnnnnnnnnnnnnnnnnnnnnnnnnnnnnnnnnnnnnnnnnnnnnnnnnnnnnnnnnnnnnnnnnnnnnnnnnnnnnnnnnnnnnnnnnnnnnnnnnnnnnnnnnnnnnnnnnnnncataaacatgacaggcttttggactttgtattacctgtatgttttataatggatcatgcataatttctcaggagaataaaatgagaattcatatatacgttcatctttcaagtcagagcaatgagttgggaaaagaggtggcatttctgatcggataatggaatactctcatttattttatgacattctctgtctactcagatcatagtgaaaactggaaacnnnnnnnnnnncagcctcttcttggaaagtgacagcagaaggtggcatggagcttgtgtccttggacaacaaatctggatatactaggattaattatcagaagacagctcaggccaagttttgatcgttccatacagtaccttgtttatctgcttcttaaagaatcagccgagacaccataaaagaaataggctttttgtgccttttgctgttaatgtttaatttacaaactgttttggtaaatctcttaatgtaagtagctatttgactttggaattttgcattcgaggtatactgtcatttcttgaaatctttttctcgtttagttgctctgtgggaaatgtgaggaagcctaagtttgtatttgtaaatttcttatgccatcctctagtcaaattttttttcattgtttaaaaatacggaagtgttccaatataattttttcctgtactggatggctaggattctagagaattgattataaaatattttcaatac

SEQ ID NO: 68802 - DNA, 2143 bp, Homo Sapiens
  misc_feature (1625)..(1627): n is a, c, g, or t
gcggccgccaacccctgtccctgccttggcccccacttccacacctgcatccatcactccagcatcagcgacagcatcttctgaacctgcacctgctagtgcagctaaacaagagaagcctgcagaaaagccagcagagacaccagtggctactagcccaacagcaactgacagtacatcgggtgattcttctcggtcaaacctttttgaagatgcaacgagtgcacttgtgacgggtcagtcttacgagaatatggtaactgagatcatgtcaatgggctatgaacgagagcaagtaattgcagccctgagagccagtttcaacaaccctgacagagcagtggagtatcttttaatgggaatccctggagatagagaaagtcaggctgtggttgacccccctcaagcagctagtactggggttcctcagtcttcagcagtggctgcagctgcagcaactacgacagcaacaactacaacaacaagttctggaggacatccccttgaagttttacggaatcagcctcagtttcaacagatgagacaaattattcagcagaatccttccttgcttccagcgttactacagcagataggtcgagagaatcctcaattacttcagcaaattagccaacaccaggagcattttattcagatgttaaatgaaccagttcaagaagctggtggtcaaggaggaggaggtggaggtggcagtggaggaattgcagaagctggaagtggtcatatgaactacattcaagtaacacctcaggaaaaagaagctatagaaaggttaaaggcattaggatttcctgaaggacttgtgatacaagcgtattttgcttgtgagaagaatgagaatttggctgccaattttcttctacagcagaactttgatgaagattgaaagggacttttttatatctcacacttcacaccagtgcattacactaacttgttcactggattgtctgggatgacttgggctcatatccacaatacttggtataaggtagtagattgttgggggtggggagggagggatctaggatacagggcagggataaatacagtgcatgtctgcttcaattagcagatgccgcaactccacacagtgtgtaaaatatatacaaccaaaaatcagcttttgcaggtctttatttcttctgtaaaacagtaggtaacttttcctaggtttcactctttttagtgtactagatccagaaacttagtgtaatgccctgctttatatttctttgacttaacattggtttcagaaagaatcttagctacctagaatttacagtctctgtttcatggcaacactggataatggctttgtgaaatttaaaaaatttttgtagcgactgtaaacagaaatgccaaattgatggttaattgttgctgcttcaaaaataagtataaaattaatatgtaaggaagcccattctttcatgttaaatacttggggtgggaggggagaaagggaaccttttcttaaaatgaaaataattactgctattttaaaatttcttgatcattgaatgtgagacccttctaacatgatttgagaagctgtacaagtataggcagagttattttcctgtttacattttaaaggatgnnnggggaaaaaattggtaggtgtctaattactgtttacttcattgttatattgcagtaaaagttttaaaacaaccattgcatgtttgcttttgatgtatccctttgtgaaattagcacttttggggccaatggagaaatgcagcattcactctccctgtcttttccccttccctcagcagaaacgtgtttatcagcaagtcgtgagtcaaactgctgccttttaaaaaacccacaaaatgctgattcagttcaaaattaatgcaaatgtttcaaaactgggtttctgatatttgtaaatgtgtttctttattagataagagtgtattaccattaaagtcattagtataatattgctttcaaaaagaaatggtagacaaaactataatccagcatcttttattgcattggaaagactggcaaagtcttttggatgggttgggagatgtggctggaaagtactttggaaaatatacaatcaagatatctcatggcatattaaaagaaaaatcttaatagc

SEQ ID NO: 68803 - DNA, 1754 bp, Homo Sapiens
  misc_feature (71)..(106): n is a, c, g, or t
  misc_feature (138)..(165): n is a, c, g, or t
  misc_feature (295)..(311): n is a, c, g, or t
  misc_feature (333)..(345): n is a, c, g, or t
  misc_feature (401)..(425): n is a, c, g, or t
taacgacgggcagtgccaagctaaaattaacctcactaaagggaatacgcttgcggccgcggctgtaggcnnnnnnnnnnnnnnnnnnnnnnnnnnnnnnnnnnnngagattgaaattgtttactcttccatcatttnnnnnnnnnnnnnnnnnnnnnnnnnnnntggaggatgatttaaaagatgctttctatctctgggaaaaaggagcagcatttggccatgttcttttgtttttctattcctgtcccaaatcaaagagcatggttctcaggaaaaccagttccccagtttnnnnnnnnnnnnnnnnnttccttgtagtttcttagaggnnnnnnnnnnnnnccccaacttttagcactgatactacatattgctctgttaaagaattttctctgccnnnnnnnnnnnnnnnnnnnnnnnnncgcttaaagctggagtttgacattctgctttcagatgctgtctttttattagtgagtgatgatggtttgctaataatcaataggtaataattttttgtaatcccatcaagtggctccatatgtttctgctctctcgtgactgtgttaatgtttaactgttgtaccttaaagccgaaatcagtaactatgcatactgtaaccaaggtattgggcttacagagttgtttgttgtataaagaaaattttaaatgttgttgcaaactaacgagttacaccattttaaactttctttcctcccccctttttttgcccacaaatggtattataatgcttgcttagtcaaagaagagagactaaacaagggtaaaaattttaacagtacagaatttgccatcatatcattgccttgattctaactgtttgtgtcctaagatgcaaaagaagtcagtggcttttaactgtttacaaatagaatgtgattgtaaaatgtacagtttggttgtgtttgaattatgaaatttcttcagatataataaaccatgactttttggctgctcaacattaattgtctcctttttgtgaatttatttgtaggctctttttttataatgaaagtttcaaagttgctatgtatgagggttctcatagagcaaccgattaaaaatctaagcaaatatttgaacattttatctgaactcatcacaatttcaccctgaaataatgtgagaacaatgggaaactgtagcttgctccttcccaccctctctgagcatctttgggatcttgttgctcaaaactcttctgtgacttcatcttccccaccatttgtgcccatctcaagcctcagcaagaaaccatgtggaacatgaagcttaatgacttgacagtgtactagtgttaaactctcatacctctgttacaaagcgagaaacgccacacccggactggccttttcttcccccttcacggccctcgcttctccctgcaggagctcgggggcgaaacctgtgtatggatttcagtgtatgacttcagatcatgctccaacttgccaggtgtgagctaatgttgtcggacaccttactataagcaaatgttattcagtgcgttcaatgtatattgacttccatactggtttttccaaaaaccaaaggtagctttgaaaaaccatgtctggaaatgtttggagcgttaagctgattgaccttctgaccttggggctttgagtagtatataattcataactgcgttaattgtattgttaaagtgtttgggagttttttgcgcttgttatgtggaaataaagtgtttgatttaaaatttttaaaa

SEQ ID NO: 68804 - DNA, 234 bp, Homo Sapiens
  misc_feature (130)..(146): n is a, c, g, or t
  misc_feature (168)..(180): n is a, c, g, or t
tggaggatgatttaaaagatgctttctatctctgggaaaaaggagcagcatttggccatgttcttttgtttttctattcctgtcccaaatcaaagagcatggttctcaggaaaaccagttccccagtttnnnnnnnnnnnnnnnnnttccttgtagtttcttagaggnnnnnnnnnnnnnccccaacttttagcactgatactacatattgctctgttaaagaattttctctgc

SEQ ID NO: 68805 - DNA, 1283 bp, Homo Sapiens
  misc_feature (488)..(578): n is a, c, g, or t
ggactctcagatacattcctgtgatctgttatttttctctcttttactctaactggacttctctgattttcttttatttcattcaactcactcttatcccccttgatccatctttcaccacttgataccctcattctttgagctctctgcatctcttgcctccaatgtggaggagtctcactacgtctgaaacgatcccttgatctggatctggaaggagttcgataacgccttggtcctcttcctttaattttcctgccagatctagtaactaaaagtcgtctctggtatgaagcaggctgggagttaggtggattacactctctttccctttctctctctctgtttttcctttccttctcatcagctttaggaggactttttctcattaggaatctattttcaggtataggagggatctcttctggacggacagtagactggggttgtgcttcaagattttcagcttcactctcactagatgcacnnnnnnnnnnnnnnnnnnnnnnnnnnnnnnnnnnnnnnnnnnnnnnnnnnnnnnnnnnnnnnnnnnnnnnnnnnnnnnnnnnnnnnnnnnnagtagcactttcggaatcagaggaatcagaagaggactgagaatcacttgagctatctgagtcactagatgaggaggaggaagatgatgatgatttatgccttttcttttcttctttcttaactttagatttgggaatcagctctccacaactgagtatccgtacctccgcaaacggtttgctagctgcatctgttttctggttttcaatctctcttacaacttcttgaccagagattacttgtccaaaaacaacatgatgcccatctaaatgaggagttggtttcgttgttatgaagaactgtgaaccatttgtatccttccctctgttggccattgacaagagaaattctttgttgtgtttaacagcgaaactctcgtcttcaaaaaatcctccatagatagattcccctcctcgtccatttccttcactgaagtcaccaccttgaaccataaaatccttgacaactctgtgaaagagacaactcttataatgtaatggtttctgagttgatttcccggtccccttttcacctgtacaaagacaacgaaagttctcgcatgttttggggcacacatcagaaaataattcaaagacaactcttccagcaggttgattgttaatggcaatgtcaaaaaaacatcgaggacgttgaacctttattcccatggctccaatacttaatcttcaaatgaagaaaagacc

SEQ ID NO: 68806 - DNA, 917 bp, Homo Sapiens
  misc_feature (67)..(157): n is a, c, g, or t
  misc_feature (206)..(206): n is a, c, g, or t
  misc_feature (699)..(761): n is a, c, g, or t
agtgactcagatagctcaagtgattctcagtcctcttctgattcctctgattccgaaagtgctactnnnnnnnnnnnnnnnnnnnnnnnnnnnnnnnnnnnnnnnnnnnnnnnnnnnnnnnnnnnnnnnnnnnnnnnnnnnnnnnnnnnnnnnnnnngtgcatctagtgagagtgaagctgaaaatcttgaagcacaaccccagtntactgtccgtccagaagagatccctcctatacctgaaaatagattcctaatgagaaaaagtcctcctaaagctgatgagaaggaaaggaaaaacagagagagagaaagggaaagagagtgtaatccacctaactcccagcctgcttcataccagagacgacttttagttactagatctggcaggaaaattaaaggaagaggaccaaggcgttatcgaactccttccagatccagatcaagggatcgtttcagacgtagtgagactcctccacattggaggcaagagatgcagagagctcaaagaatgagggtatcaagtggtgaaagatggatcaagggggataagagtgagttgaatgaaataaaagaaaatcagagaagtccagttagagtaaaagagagaaaaataacagatcacaggaatgtatctgagagtccaaacagaaaaaatgaaaaggagaagaaagttaaagaccataaatctaacagcaannnnnnnnnnnnnnnnnnnnnnnnnnnnnnnnnnnnnnnnnnnnnnnnnnnnnnnnnnnnnnnggccaaatctaaaagtaggagtaagagcaaagagaaatcaaagagtaaagaaagagattcaaaacataatagaaatgaagaaaagaggatgaggtcaaggagtaaaggaagggatcatgaaaatgttaaagaaaaagaaaagcagtctgattctaa

SEQ ID NO: 68807 - DNA, 884 bp, Homo Sapiens
  misc_feature (37)..(37): n is a, c, g, or t
  misc_feature (74)..(158): n is a, c, g, or t
tagtgactcagatagctcaagtgattctcagtcctcntctgattcctctgattccgaaagtgctactgaagagnnnnnnnnnnnnnnnnnnnnnnnnnnnnnnnnnnnnnnnnnnnnnnnnnnnnnnnnnnnnnnnnnnnnnnnnnnnnnnnnnnnnngtgcatctagtgagagtgaagctgaaaatcttgaagcacaaccccagtctactgtccgtccagaagagatccctcctatacctgaaaatagattcctaatgagaaaaagtcctcctaaagctgatgagaaggaaaggaaaaacagagagagagaaagggaaagagagtgtaatccacctaactcccagcctgcttcataccagagacgacttttagttactagatctggcaggaaaattaaaggaagaggaccaaggcgttatcgaactccttccagatccagatcaagggatcgtttcagacgtagtgagactcctccacattggaggcaagagatgcagagagctcaaagaatgagggtatcaagtggtgaaagatggatcaagggggataagagtgagttgaatgaaataaaagaaaatcagagaagtccagttagagtaaaagagagaaaaataacagatcacaggaatgtatctgagagtccaaacagaaaaaatgaaaaggagaagaaagttaaagaccataaatctaacagcaaagagagagacatcagaagaaattcagaaaaagaagacaagtataaaaacaaagtgaagaaaagggccaaatctaaaagtaggataagagtgagttgaatgaaataaaagaaaatcagagaagtccagttagagtaaaagagagaaaaataacagatcacaggaatgtatctgagagtccaaacag

SEQ ID NO: 68808 - DNA, 1739 bp, Homo Sapiens
  misc_feature (42)..(42): n is a, c, g, or t
  misc_feature (76)..(76): n is a, c, g, or t
  misc_feature (135)..(135): n is a, c, g, or t
  misc_feature (165)..(165): n is a, c, g, or t
  misc_feature (167)..(167): n is a, c, g, or t
  misc_feature (171)..(171): n is a, c, g, or t
  misc_feature (187)..(187): n is a, c, g, or t
  misc_feature (189)..(189): n is a, c, g, or t
  misc_feature (198)..(199): n is a, c, g, or t
  misc_feature (214)..(214): n is a, c, g, or t
  misc_feature (217)..(217): n is a, c, g, or t
  misc_feature (221)..(222): n is a, c, g, or t
  misc_feature (670)..(683): n is a, c, g, or t
  misc_feature (996)..(1041): n is a, c, g, or t
  misc_feature (1059)..(1120): n is a, c, g, or t
  misc_feature (1396)..(1404): n is a, c, g, or t
  misc_feature (1442)..(1451): n is a, c, g, or t
tgacgtacatcaccagaacagttgctgtccgattatcgatcnttgggattgcctgagccagatcgcagagcaaaantgtgaatggtcaagtatgagttcagatgatgattggggaagactaaaaccagccaggtntcagagcagtagacactacagagtaactcntnacgngagaagagaaagagtngnaagagacgnngaagggacagaaagntanggannaattggatctcgctccaaagacaggaaggaaaaagatgagttactccgacaaggaaggaaaggaagaggcgacacagtacatcccccagcccatctcgcagtagcagtggtagacgagtgaaatccccatcaccaaaatcggagcgatcagagcgttcagaaagatctcataaagagagctcacggtccaggtcatctcacaaagattctcctagagatgttagcaaaaaagccaaaagatcaccatctggttcaaggacacctaaaaggtctaggcgatcacggtctagatctcctaaaaaatcaggaaagaagtccagatcccagtccagatctccacacaggtctcataaaaagtcaaagaaaaacaaacactgacgtaaatttttaagatgctgtcacttattggaaatgcgatttgttttgtgcctgaacggtctgttttttnnnnnnnnnnnnnntcaaatgaaagagcattcctggggttttttgtttgtttgtgtatgcatgtgtaaactcatgagcaactgcatctgtagatctgtcattgttttatattgtgtaaattactttcattgtggctatttctcaagatgaaatttttattgttctaatggatttcatcagaaatgtgtataatggatctgctgacagtagtagtattttgttttaggatgttgtgacttagcaaaaataatacagatgtcttccccccttttgtagctttgacaatttgaattagatttcaaataaaatctgaacagaaaactagcnnnnnnnnnnnnnnnnnnnnnnnnnnnnnnnnnnnnnnnnnnnnnngactacaatccgagcacnnnnnnnnnnnnnnnnnnnnnnnnnnnnnnnnnnnnnnnnnnnnnnnnnnnnnnnnnnnnnntaaattcttttggttcaccccctcttgccccctaaaaaaagttttccaaacccatttcctttggtgccccgcgggccccctgtgggaagcgggcacctgggctaccaaatgtgttttcccaaagcaaaactctggggcgaaggacataggcgggggggttttccaacccacaaaaaaagaagacggcggggggacacaccccgcggggtttttgaaaaaaacctacaagtgggggtgttcgccaagcggtcttccggcggggtacttctaccaatnnnnnnnnncccccgaccgccagggtcccaattataaatatttatgnnnnnnnnnnacctctccgcttttatttaatggagattgagggtggggaatctgctttcttaaagaacatttcttctccgcacaccagttggggtaacccccctcccacaacgatcaggctggtcttacgaacccccccgtataccccccgcccagcgcggtgactattgcacgccacctctccgtcggcccccctgtgcggaaaaataatatattatttgtaccccccctatgggggacataaaccaatgtgcgtgtgagcagaagactagaagatggtacccgagcagattcgcgg

SEQ ID NO: 68809 - DNA, 1799 bp, Homo Sapiens
  misc_feature (44)..(44): n is a, c, g, or t
  misc_feature (83)..(83): n is a, c, g, or t
  misc_feature (1287)..(1341): n is a, c, g, or t
  misc_feature (1583)..(1633): n is a, c, g, or t
gtccacatccaatatacattccgccttctatgatggaacatacncttcccccacctccatccggactgccttttaatgcgcanctagagagcggttaaaaaaccctaatgctcctatgttaccgccacctaaaaacaaagaggattttgagaagactctgtcgcaagccatagtcaaagtggttatcccaacagaaaggaatttgctcgccctgatacatcgaatgatagagtttgttgtacgtgaagggccaatgtttgaagctatgattatgaacagagaaatcaacaatcctatgttcaggttcttatttgaaaaccagacaccagcccatgtttactataggtggaagctttattctattctgcagggagattctccaactaaatggcggacggaagattttcgtatgttcaaaaatggatctttttgggaggccaccaccattaaatccgtacttgcatggaatgtcagaagagcaagaaacagaagcttttgtagaggaacctagtaaaaagggagcacttaaggaagaacagagggataaattggaagaaatcttgcggggattaactccaaggaaaaatgatattggagatgcaatggttttctgtcttaataatgctgaagctgctgaagaaatagtggattgcattactgagtcgttgtccatcttaaagacaccccttcctaaaaagattgccagattatatttggtttctgatgttttgtacaactcttcagccaaagttgctaatgcttcatatatatagaaaatgttttgaaacacaagttatgtcagatattttccagacctcaaagccacctatcgtacaattcaagggccatttacaatctgaaaactttaagcaacgggtaatgacttgcttcagagcatgggaagattgggcaatttatccagaaccatttttgatcaaactacaaaatattttcttaggacttgtaaatattattgaagaaaaggaaacagaggatgttccagatgaccttgatggtgcccccatcgaggaagagcttgatggtgcacctctggaagatgtagatggaattcctattgatgctactcccatcgatgatcttgatggagtccctataaaaagtcttgatgatgatcttgatggagtgccttttggatgcaactgaaggactcaaaaaagaatgagcctatatttaaagttgccccatcaaaatgggaagctgtggatgaatctgaattggaagcacaggctgttacaacttctaaatgggaattatttgaccagcatnnnnnnnnnnnnnnnnnnnnnnnnnnnnnnnnnnnnnnnnnnnnnnnnnnnnnnnaagatactcaaagttccaaatctgaagaacatcatttgtactctaatccaatcaaagaagaaatgactgagtctaagttctctaagtactctgaaatgagtgaggaaaaacgagccaaacttcgtgaaattgagctcaaagttatgaagtttcaggatgaattggaatctgggaaaagacctaaaaaaccaggccagagttttcaggagcaagtagaacactacagagataaacttcttcannnnnnnnnnnnnnnnnnnnnnnnnnnnnnnnnnnnnnnnnnnnnnnnnnntaaagaaaaattggaatctcgctccaaagacaagaaggaaaaagatgagtgtactccgacaaggaacggaaacggaagaggcgacacagtacatcccccagcccatctcgcagtagcagtggtagacgagtgaaatccccatcaccaaaatcggagcgatcagagc

SEQ ID NO: 68810 - DNA, 177 bp, Homo Sapiens
ggtgaaaatgttaccctctggtacctcagtttcttttatatagtggcaatttgaatagaggcagtcacataagatttacttcagctgaatggctaaaatttgagaaatactattgaaaaatctcattaaaaaatagtatgcaaataaaaactatcaaatgtccaaagccctcgtgcc

SEQ ID NO: 68811 - DNA, 713 bp, Homo Sapiens
catttttgtaaaaataaggtttaataaaacatcagcaatctgcatgagaaggtaaattacaatgagaaacttaaaaagcttacggtctaagtcaaccaatgtagaaggtagtggttgaagaaaacaagctttgacttttaaaatttcctaaccaggggatttatttagaaattctggcattcaaatgtacatgtaaaatccaatttaacagatcaaaattgttacactaagtttcacttagtatctaagtatccaatcacaattgtatctaagtttcacttttaagaaacattataaaggtaattaaaactctaggtgtatacttatatggaactagtttatttcctatttaactactgttcattgcgtaaagtatgttgtcccaattttcagctgttttaaggaattataaaacattgagatctactaggaagagggaaagcctacttctaagtgatgccactagtacaatcaggcttggattaagtctcttctcaggggcagctttgatttagccatggactcacaaggaaaacaagaggtggatttggttagggagcaacagcaaattcagcccgaccatattcctaatctaaacacattttcagcataaagatgtaaaaacaattttttttggttcaaaagttatggttgccatggagacaaaaagaatatacctgaatttataaactgagatatatttcagctccttg

SEQ ID NO: 68812 - DNA, 915 bp, Homo Sapiens
  misc_feature (13)..(13): n is a, c, g, or t
  misc_feature (46)..(46): n is a, c, g, or t
gtcatgaagtgtnacggttaatgggagcatcctgggcgtcagaagngaggagatggagcagttgtttcatgacgatcagggcggtgttaccaggtggatgactgggtggcttggaggaggatcaaaaagtgttcccaacacacctttgagaccaaatcagcaatctgtggttaatagttctttttcagaactttttgttaaatttctagaaacagaatctcatccatccattccaccaccaaagctttctgttcatgatatgaaacctctggattcaccaggaagaagaaaaagagatacaaatgcaccagaaagttttaaagatacagcagaatccaggtctggtagaagaacagatgtaaatccgtttttggctcctcgctcggcagctgtacctcttattaacccagctggacttggacctggtgggcccgggcatcttcttctgaaacccatctcagatgttttgcccacatttacacctttgccagcgttacctgacaacagtgctggggttgtgctgaaagaccttttaaagcaatagatgattctcaagccagagacaatctagcactttaaagaaaccatgaacactatatgtatgtactttatcacaaagtggcctttggggagaaagtcatgtatttgttcgcaattatgctttctctgaatttaataaaaatattcctaatgctttccgcccaaccggaccagaagaaaaaaaagaacatggcgggccgccctcgggccctcggagaaagctttcctaagacccatttcgtcttgggggcggcgggggccccaggagcggtaagggggaatcatggggcccataaggctggctttccctaagggagcaacccttggggttaatggaccttaagtgggctttggcgattctctcccgccccaatt

SEQ ID NO: 68813 - DNA, 757 bp, Homo Sapiens
catagtacaggatgatttctgtccacacaaaggttaaattagattgcacagttaattttcacttatattagtggtactatagtgtgggtgatgcctttttcttgtaagcccagtacatatattatgcctgcctaagttctgaactggggctgtatttcagtagttgtagaattattgatatttagttttgatagctaatgtttaattgtttggatctgcacagtttggtttttgcacaaaagtcatttaaaaaaatctgagtaattgtcaaatattaaaagaaagatattcttcctgtaaggaatacagtttttagtcaaagtggccattacatcctctttttaatttacataatacagatacttgagaaagttgttgtggtgttgtatgccaagaaaattctttttattggtgcctatattgtaacaattatttttaatgcattgtattttgaagtaacggttcagttaaatttttcacctgctgtgtaactgaaacacaattacagtttataatcatctgtagaagtctggagataattttgcaactcatgttatgggttaaatgaatatttttgtaaaagtaaaagcaacaaatttataaattgattatttgaaactttacaacacaattgcatcccaaatacaaattgtattgcttattcattatagctattcgtcctgtaatctgtttctaggtgaagcatactccagtgttttaggggttttgaaaataaatatttagtgttcgcagtcaa

SEQ ID NO: 68814 - DNA, 967 bp, Homo Sapiens
  misc_feature (854)..(903): n is a, c, g, or t
atttcattggttgggatgctttgccaggtcatgtgcttattgtctcattttgtagtcttttaaagttgtatgaacccttaatttgaagaactaacttgatttctagagaaatatccacactatctcagtggtattttgcattggaaaaaggaagcactgtgtagcagtgaattgtctgctttccaccgagtactgtgtttattctctctccaggaaagcagatcaaaagaaagttagcagatcgagtgtcttcttccttagaaataggttctggtagcttctgtgcctgggtagtatcagaccagtgggagtaaaccgagtgttaagtgtcaaggtgagaaagcctcacattctctcaagacagttgctctaggagctgagttgctggtttggaagtgtggagattgcatttctggcttctctcaatggcttgtgttgaggactctgggtgctcctggccctaattgtgcaccctgatccccgtgcttggagctaggcctggtggcgtgctctagccctctcagttaccagctctttggagaaggatcaaaattcagatggaatgtgggatgggtaataggtgagagtagaaacccttccctccaggaggcccccgctgactcccacagaaacccacctaccataagatgtcttcaggtggccttgtccaaggatgggggtcaggcattttatatcaagggtgctctgaacatattttattttttaaaaaaactatgtttgtgaattttgcgtatactggcaagcttttgaaaatgtatttaattttgtattgtttaccaatgatttatttacaagatatttactcaaataaatggagctgcttacaagcctgnnnnnnnnnnnnnnnnnnnnnnnnnnnnnnnnnnnnnnnnnnnnnnnnnngaccgcgtatgcggccgcaagcttattccctttagtgaggttaattttagcttggcactgcccg

SEQ ID NO: 68815 - DNA, 762 bp, Homo Sapiens
ctcaggtgtttgcaacagtgttctaactattaacgctacgatgcctgaacctaccaagtctgctcctgccccaaagaagggctccaagaaggcggtgactaaggctcagaagaaggacgggaagaagcgcaagcgcagccgcaaggagagctattcagtgtatgtgtacaaggtgctgaagcaggtccatcccgacaccggcatctcttccaaggcaatggggatcatgaattccttcgtcaacgacatcttcgagcgcatcgcaggcgaggcttcccgcctggcgcattacaacaagcgctcgaccatcacctccagggagatccagacggccgtgcgcctgctgcttccgggggagctggccaagcacgccgtgtcggagggcaccaaggccgtcaccaagtacaccagttccaagtaactttgccaagggagagacatgaagacagaggagaaatgaatgcataaaataactgataatatgaatctatacatagaacttaggaagtctcatctgcctgaaaatgactgtgtggatcccacccaaatccaactcatcctggtttgctgcacactggttcatcaaaagaaggttaccgaggggaaggaactaaaggtgtttgcacttcatgttactttttgagtttataaacataaaaacagaatttacttctgttacagacctagttactgggaattcattacttgccatggactacctttgctaagaaaagtctgaatgagaagatggcaggacgtctg

SEQ ID NO: 68816 - DNA, 1667 bp, Homo Sapiens
agatgcctgagccagccaagtctgctcccgccccgaagaagggctccaagaaggcagtgaccaaagcgcagaagaaagatggcaagaagcgcaagcgcagccgcaaggagagttactctgtgtacgtgtacaaggtgctgaaacaggtccatcccgacactggcatctcttccaaggccatgggcatcatgaattctttcgttaacgacatatttgagcgcatcgcgggcgaggcttcccgcctggcgcattacaacaagcgctcgaccatcacctccagggagatccagacggccgtgcgcctgctgcttcccggagagctggccaagcacgccgtgtcggagggcaccaaggccgtcaccaagtacaccagctccaagtaaacattccaagtgggctggatgacactttgcacacaattattgattatgcctgtgagcagaacattccctttgtgtttgctctcaaccgcaaagctctggggcgcagtttgaataaggcagttcctgtcagtgtggtggggatcttcagctatgatggggcccaggatcagttccacaagatggttgagctgacagtggcggcccgacaggcgtacaagaccatgctggagaatgtgcagcaggagctggtgggagagcccaggcctcaggcacctcccagcctacccacacagggccccagctgccctgcagaagatggccccccagccctgaaagaaaaagaagagccacactacattgaaatctggaaaaaacatctggaagcatacagtggatgtaccctggagctagaagaatccttggaggcttcaacctctcaaatgatgaatttgaatttatgagagttcttgcctgtgtgtctgtattttgggtaaggaggggaggtctgaaaaagactttggggctttttcttctgtttttcatgacaatgtaatttgtgtaactgttgaatctggaaattgatcagcattaaagggcacatgaagcagtgtctgcaggcgttcagtgctgcggagcctgttaaaggtcactcagatgtgcaggtgttaatcttctctaaaagcctggtgatacagctctggctttctgagcacactacggatctggaaaatactggaaaatgtgatacttagaatactttggctgctaaggaaacttcctctccattgcagaatagctgagccaagtgagtgagtttgcagaaagcaggtggtgagctcctgcctgctggaggttgccatggagggccattcctgcccggcaacagcaccgtcctgcagggagccacttggcagaagggtgcagggctgctggtgtcagagcaagagggctacagggaaagggccctttctcaggggatgtagcttttttaaaagatttgggaacacttggaggatttgctaaaatgagcctcagaaggaaaattggttttctaacctgtgactttttgaaatgaattattcctttcagtctttatttttcaaagaaacaatgtgtattgaagtacctagatttgtttgataatcaacaaatctttcctttttcaatgaacatattctgaatgtggtttctgtcttagaccaggaggacagagtttgctttcatattttccctgtaagtaagagggcttatttattttaaataaagagtaattattaaattttg

SEQ ID NO: 68817 - DNA, 931 bp, Homo Sapiens
  misc_feature (478)..(532): n is a, c, g, or t
ttgtggaactgatcctgggccccatcatagctgaagatccccaccacactgacaggaactgccttattcaaactgcgccccagagctttgcggttgagagcaaacacaaagggagtgttctgctcacaggcataatcaataattgtgtgcaaagtgtcatccagcccacctggtcaaaggacaatgaaaaaatgacaggaagacatgtcacatggagtgtggtgttaatactggttgcaaagagctttttcttagcaacacacccatctatgattttatatccaaggcagatgcccctgaaaatacaaggagaaagcaagttgcagaatcaactctccaaaaatatggggaaaaatggaaagaaaacacacagctggtattgtcttaacaggaaaagttaactattagtattactgaaacttaccacctattagctcctgtgtcctcccccaaatcccaaaaggcagacagatgctgnnnnnnnnnnnnnnnnnnnnnnnnnnnnnnnnnnnnnnnnnnnnnnnnnnnnnnncacattgtacccctggtcgaggcacaggtctggctcccgagggctcaccaccctctactccctgaccctgcttctgggccagggaccagccaaggctggtgcaccagagagaggatggaggtgaaatgagtaccatgtgcaggtgatgcacctggaaaacccaacagcacctgagaagtactcctaacagcatgagaaatacatgagggggtgtggcacaagcacacagcagccagttggcatatatcaaagagatgactccatttacaacagcagcacaagactatagttggtaggaatgaatttttcaagaaacatgaaaagatttacaggcaacttcagcatgctgttaaagaacgcaataccagcctacgcaacatagtaagatcccgtctctac

SEQ ID NO: 68818 - DNA, 1720 bp, Homo Sapiens
  misc_feature (77)..(85): n is a, c, g, or t
  misc_feature (94)..(94): n is a, c, g, or t
  misc_feature (180)..(180): n is a, c, g, or t
  misc_feature (552)..(552): n is a, c, g, or t
tgttaatggtaaaaactgaggaagggccttaaagggttggaattttacccattgccccacttctttttttgtagccnnnnnnnnntttttaacncggcccccctccccagctggttgcactgaggtgactaagggatacatttggaggaagtagctccaaagaacatttccatttcactngtgccttcacatacatctaatgaaaatgaacagcacccttcatccatccacggaaagcgattaagaaaagggtgggatggaaaaattaacccaacaatattagatcaatacgtagtatttaagtgtccataatgtgccaggctgaagatgcacgggaaaaccacactagccggtctgtcaagggcttgagaataccataaacaagaaaacagacgaaccaatttcagacagctgctggaaggaagataaaatgagacaggcaagtatgagaggcgcgaattcctgagtggatgacgtaggtctctgagaggtgacttttgagccccgtatctacatggtaaagtgcctcgcagtgacctggggcccgtagcngttacccatttaaagcacagaccattaaatgcagaaattatcaacaaaattgagaaataggaatttcaaagtctcaaagtgaacgacggaaactgaaatctacaaattagaaaaaggcgcagaattttgaatattcttgtcgcccaatcaggacaaggctgggacccggctgcgcggccttcgtccaaaatacacagaacggctggtatccacaggaggccccatcgcacggcagaactggtgaccggacacaaaagctgctgccaagcgtcagtcatacagagctgtcacgcagtgtttgcggaacccgggctgaattgtgtcctggagttctcttaaatgacagccgaactcagccacttcgttttagaatgaaacagacccaaggagccaccagggcgcgtgtggggcgggagtgggggcgggtaaagagggcggattcccaacagcctaattgagaaccgactcctgggaaggctaagcagcacaatgagtaaagacacgctctagattcaaaagcaaatccaatgacgcactggggacctcgagttccaaatagttaaaaagctacgtatgccatttcccatgaccttcacactaaaataacttactttatgaaaagaaactaagggaataagtgaacaagctcttttctagtgattaggtgggtggctctgaaaagagcctttggagtcaagcagccggcgactcgagcgagcgagcgccaggtcccggcagggactcacttggagctggtgtacttggtgaccgccttggtgccctcggacacggcgtgcttggccagctcgccgggcagcagcaggcgcacggccgtctggatctcgcgggatgtgatggtggagcgcttgttgtagtgcgccaggcgggaagcctctcccgcgatgcgctcgaagatgtcgttgacgaaggagttcatgatgcccatggccttggacgagatgccggtgtcggggtggacctgcttcagcaccttgtacacgtagatggagtagctctctttgcggctgcgcttgcgcttcttgccgtctttcttctgggctttggtgacggctttcttggagccctttttaggggccggagcggattttgccggttcaggcatggtaagacacagtacaaacgcggcttagccaagaaaagaagtccc

SEQ ID NO: 68819 - DNA, 857 bp, Homo Sapiens
gctgggtggcgaattcggcacgagggttttctcgatctgctgctcgtctcaggctcgtagttcgccttcaacatgccggaaccagcgaagtccgctcccgcgcccaagaagggctcgaagaaagccgtgactaaggcgcagaagaaggacggcaagaagcgcaagcgcagccgcaaggagagctactccgtatacgtgtacaaggtgctgaagcaggtccaccccgacaccggcatctcctctaaggccatgggaatcatgaactccttcgtcaacgacatcttcgaacgcatcgcgggtgaggcttcccgcctggcgcattacaacaagcgctcgaccatcacctccagggagatccagacggccgtgcgcctgctgctgcccggggagttggccaagcacgccgtgtccgagggcaccaaggccgtcaccaagtacaccagcgctaagtaaacttgccaaggagggactttctctggaatttcctgatatgaccaagaaagcttcttatcaaaagaagcacaattgccttcggttacctcattatctactgcagaaaagaagacgagaatgcaaccatacctagatggacttttccacaagctaaagctggcctcttgatctcattcagattccaaagagaatcatttacaagttaatttctgtctccttggtccattccttctctctaataatcatttactgttcctcaaagaattgtctacattacccatctcctcttttgcctctgagaaagagtatataagcttctgtaccccactggggggttggggtaatattctgtggtcctcagccctgtaccttaataaatttgtatgccttttctcttaaaaaaa

SEQ ID NO: 68820 - DNA, 402 bp, Homo Sapiens
ggtatatataaccaggtacaccagaggttacatatgtttgagttagactcttaaaatcctttgccaaaataagggatggtcaaatatatgaaacatgtctttagaaaatttaggagataaatttatttttaaattttgaaacacgaaacaattttgaatcttgctctcttaaagaaagcatcttgtatattaaaaatcaaaagatgaggctttcttacatatacatcttagttgattattaaaaaaggaaaaatatggtttccagagaaaaggccaatacctaagcattttttccatgagaagcactgcatacttacctatgtggactgtaataacctgtctccaaaaccatgccataataatataagtgctttagaaattaaatcattgtgttttttatgc

SEQ ID NO: 68821 - DNA, 134 bp, Homo Sapiens
gcaggaaggaataaggggatttattgaaaatgaaagtacactccacagtgtgggagtgggcctgagcacaggggctcaaaacgcctttcttgtttttgtatatagaaaatatacatgctttctcatctaaccga

SEQ ID NO: 68822 - DNA, 2187 bp, Homo Sapiens
  misc_feature (1205)..(1205): n is a, c, g, or t
  misc_feature (2069)..(2095): n is a, c, g, or t
tggcaaaaagtgtattaaattatgttcaggtaaatatacagagaacatttattgcatttgtgtgaatcacctgatgactcaggggataggatagcacaaagagtaattaattatccctgtaatgaaggcccctggcagtttgtgaacccgtttcgtcccactgtgaaagtatagaaatgaggttcgcagtcttataccatgctgtcagtgatatagctggaaccaagatgggatttgtagtaactcttttcatcaaaggtattaacagtccaaccaacaacctggattcctttagctgaccacttcttcaagtaggccggggatacaaaatccttttgcatgaggaaagctgaaattccacacaggtaccacaagatattatgcatgctccaatcgagcaaaatgtccatcataacaaatataaaatgtttccagaaagtatcatagcgtggtttcccatctccctgtatggcttaggctccaaggtctgtgagttaatgctgttattacatcccgatctgtttgtctcatcttgtagataacttctggcaagaaagaacagaccacactattattatacagttgaggaaattccatatacattttctttagagcctcagtagccttgtgtgcatggcctttgacatcaaagaagattgtgaggttatggtttaggcactctgcaacagcttcccttagggtagggatcttttcatcagggaaatcattcctgagtctgtgctttgctgcaggattcagcttcctaatttgttcaaatgtcaaatcacacaatcgcccagtcccatcagtcgtcctatctactgtgttatcgtgcattaagacaggaatcccgtcagaagtaaactcaatgtccaactccacgcctgttgctccattcttagctgccgaatggccgccagcgtgttctcgggcgcgtcgtggctgccgccacggtgggcgatggcagaaatgcggtcccggggcttgagcacatgcagggccctgcaagagggcaccggctcaaagctgaagacgcgcagtagaacgaagaggctgccggtgaggaggcaggcattgaccgggctccgcgtcaccagcagcagcactagcagcaggaaggagaaagggcccaggaggccgccctggtcctcccacagccacatgccggcgcccgcaccggcacggacgggagtcccggacccgcncgggcttcctggggcagtagaacgagaagcgagggggagggtccaaggcaccggcagcagcaggaaccctctgaggggaccagcgccgccctggcccgcacctgccgtacccggtggagacgctcctagcctgagtagcgccgcggggcccgggaacgccgagtgcgcgccctcggggaggcgggatacgcggggcccgcgcgcgggactttgcactttgaatccagaggaagatgaatttttaaaatctccatcaaacgtgccttaaagctaaagcattttgacaggagtatttaaacttagtccaggatattttcctttgtgttttataactttacagaggaccaaagcaattcttgttttagtttctttgcgaagcctgctcctccttcccttcataaggactttttttgtctttctttaacgcccaggcttcgtcttatttctactgtttttgtcgcaacttccattgatttatgtcccttccctcccccctaagtacatcagggaacctttccacactataaatgatatgactactgtttggggtttctgggcccccatccgtgtacgtatgtggcatttccaggtatgactgagtgtgagagacatgtcagaggctcttcagtgatttcttgctattgaccgatgcttcactgtgccaaaagagaaaaaaaatgttgggttttgtaattaaattatttatatatttttgaaacccgaattgaaaatgttgcaggcaacgggctacagctttattagtggttctctaactgtggtctccttgggccaagcaatttctttaaaggaaaagttgattatgtatgtggggtgccaggaccactgccttgaaagcaagtgtgnnnnnnnnnnnnnnnnnnnnnnnnnnngtgtctgtgtacatattcatgtataaattttatgaaacccaagcatagtgcttattttttaataaaacaactgacttaacacattgtgaaac

SEQ ID NO: 68823 - DNA, 1616 bp, Homo Sapiens
  misc_feature (1290)..(1319): n is a, c, g, or t
  misc_feature (1366)..(1434): n is a, c, g, or t
  misc_feature (1488)..(1552): n is a, c, g, or t
aggagcgagcctgggtggcgaattcggcacgagggttgcagagtgcctaaaccataacctcacaatcttctttgatgtcaaaggccatgcacacaaggctactgaggctctaaagaaaatgtatatggaatttcctcaactgtataataatagtgtggtctgttctttcttgccagaagttatctacaagatgagacaaacagatcgggatgtaataacagcattaactcacagaccttggagcctaagccatacaggagatgggaaaccacgctatgatactttctggaaacattttatatttgttatgatggacattttgctcgattggagcatgcataatatcttgtggtacctgtgtggaatttcagctttcctcatgcaaaaggattttgtatccccggcctacttgaagaagtggtcagctaaaggaatccaggttgttggttggactgttaatacctttgatgaaaagagttactacgaatcccatcttggttccagctatatcactgacagcatggtagaagactgcgaacctcacttctagactttcacggtgggacgaaacgggttcagaaactgccaggggcctcatacagggatatcaaaataccctttgtgctagcccaggccctggggaatcaggtgactcacacaaatgcaatagttggtcactgcatttttacctgaaccaaagctaaacccggtgttgccaccatgcaccatggcatgccagagttcaacactgttgctcttgaaaatctgggtctgaaaaaacgcacaagagcccctgccctgccctagctgaggcacacagggagacccagtgaggataagcacagattgaattgtacaatttgcagatgcagatgtaaatgcatgggacatgcatgataactcagagttgacattttaaaacttgccacacttatttcaaatatttgtactcagctatgttaacatgtactgtagacatcaaacttgtggccatactaataaaattattaaaaggagcactaaaggaaaactgtgtgccaagcatcatatcctaaggcatacggaatttggggaagccaccatgcaatccagtgaggcttcagtgtacagcaaccaaaatggtagggaggtcttgaagccaatgagggatttatagcatcttgaatagagagctgcaaaccaccagggggcagagttgcacttttccaggctttttaggaagctctgcaacagatgtgatctgatcataggcaattagaactggaagaaacttccaaaaatatctaggtnnnnnnnnnnnnnnnnnnnnnnnnnnnnnnactctgtggaagggaaggggttgcctcaaaagtcacagcttagctgnnnnnnnnnnnnnnnnnnnnnnnnnnnnnnnnnnnnnnnnnnnnnnnnnnnnnnnnnnnnnnnnnnnnnactgggcaatatagcaagaccccatctctaaaaaattaggcatggtggtgcatnnnnnnnnnnnnnnnnnnnnnnnnnnnnnnnnnnnnnnnnnnnnnnnnnnnnnnnnnnnnnnnnntgcaatgagccatgattacaccacggcactacaaccttggtggcacagtgagaacctgactctt

SEQ ID NO: 68824 - DNA, 925 bp, Homo Sapiens
gctggtaccggtccggaattcccgggatatcgtcgacccacgcgtccggtctggccctgagtagggtgtgacctccgcagccgcagaggaggagcgcagcccggcctcgaagaacttctgcttgggtggctgaactctgatcttgacctagagtcatggccatggcaaccaaaggaggtactgtcaaagctgcttcaggattcaatgccatggaagatgcccagaccctgaggaaggccatgaaagggctcggcaccgatgaagacgccattattagcgtccttgcctaccgcaacaccgcccagcgccaggagatcaggacagcctacaagagcaccatcggcagggacttgatagacgacctgaagtcagaactgagtggcaacttcgagcaggtgattgtggggatgatgacgcccacggtgctgtatgacgtgcaagagctgcgaagggccatgaagggagccggcactgatgagggctgcctaattgagatcctggcctcccggacccctgaggagatccggcgcataagccaaacctaccagcagcaatatggacggagccttgaagatgacattcgctctgacacatcgttcatgttccagcgagtgctggtgtctctgtcagctggtgggagggatgaaggaaattatctggacgatgctctcgtgagacaggatgcccaggacctgtatgaggctggagagaagaaatgggggacagattgaggtgaaatttctaactgttctctgttcccggaaccgaaatcacctgttgcatgtgttttgatgaataccaaaggatatcacaagaacgatattggaaccagagtattaaaatctgacacatctgggtacctttgaagatgctctgctgggctatagtaaaagtgcatgaaggaccaaatcctgcataattttgg

SEQ ID NO: 68825 - DNA, 2257 bp, Homo Sapiens
  misc_feature (2050)..(2058): n is a, c, g, or t
tgaaaatgaacagtggtacaaaaagcaggctgtaccggtccggaattcccgggatatcgtcgaaccacgcgtccggcctctccgagagctcctggcgcggtcgtcccggcccggggccccaggtgcgcttcccctagagagggattttccggtctcgtgggcagaggaacaaccaggaacttgggctcagtctccaccccacagtggggcggatccgtcccggataagacccgctgtctggccctgagtagggtgtgacctccgcagccgcagaggaggagcgcagcccggcctcgaagaacttctgcttgggtggctgaactctgatcttgacctagagtcatggccatggcaaccaaaggaggtactgtcaaagctgcttcaggattcaatgccatggaagatgcccagaccctgaggaaggccatgaaagggctcggcaccgatgaagacgccattattagcgtccttgcctaccgcaacaccgcccagcgccaggagatcaggacagcctacaagagcaccatcggcagggacttgatagacgacctgaagtcagaactgagtggcaacttcgagcaggtgattgtggggatgatgacgcccacggtgctgtatgacgtgcaagagctgcgaagggccatgaagggagccggcactgatgagggctgcctaattgagatcctggcctcccggacccctgaggagatccggcgcataagccaaacctaccagcagcaatatggacggagccttgaagatgacattcgctctgacacatcgttcatgttccagcgagtgctggtgtctctgtcagctggtgggagggatgaaggaaattatctggacgatgctctcgtgagacaggatgcccaggacctgtatgaggctggagagaagaaatgggggacagatgaggtgaaatttctaactgttctctgttcccggaaccgaaatcacctgttgcatgtgtttgatgaatacaaaaggatatcacagaaggatattgaacagagtattaaatctgaaacatctggtagctttgaagatgctctgctggctatagtaaagtgcatgaggaacaaatctgcatattttgctgaaaagctctataaatcgatgaagggcttgggcaccgatgataacaccctcatcagagtgatggtttctcgagcagaaattgacatgttggatatccgggcacacttcaagagactctatggaaagtctctgtactcgttcatcaagggtgacacatctggagactacaggaaagtactgcttgttctctgtggaggagatgattaaaataaaaatcccagaaggacaggaggattctcaacactttgaatttttttaacttcatttttctacactgctattatcattatctcagaatgcttatttccaattaaaacgcctacagctgcctcctagaatatagactgtctgtattattattcacctataattagtcattatgatgctttaaagctgtacttgcatttcaaagcttataagatataaatggagattttaaagtagaaataaatatgtattccatgtttttaaaagattactttctactttgtgtttcacagacattgaatatattaaattattccatattttcttttcagtgaaaaattttttaaatggaagactgttctaaaatcacttttttccctaatccaatttttagagtggctagtagtttcttcatttgaaattgtaagcatccggtcagtaagaatgcccatccagttttctatatttcatagtcaaagccttgaaagcatctacaaatctctttttttaggttttgtccatagcatcagttgatccttactaagtttttcatgggagacttccttcatcacatcttatgttgaaatcactttctgtagtcaaagtataccaaaaccaatttatctgaactaaattctaaagtatggttatacaaaccatatacatctggttaccaaacataaatgctgaacattccatattattatagttaatgtcttaatccagcttgcaagtgaatggnnnnnnnnntaagcttcaaactaggtattctgggaatgatgtaatgctctgaatttagtatgatataaagaaaacttttttgtgctaaaaatactttttaaaatcaattttgttgattgtagtaatttctatttgcactgtgcctttcaactccagaaacattctgaagatgtacttggatttaattaaaaagttcactttgtaaaaa

SEQ ID NO: 68826 - DNA, 841 bp, Homo Sapiens
aggtttgagggggaatgctggggggctgcttccaagtggagctgtactgttgcatgggggggcaggtagggaggagcaggtaataatgatgttgataataatgatgcaaacagtgatgacagtgacatttatcgagcatccactaagtgccaggcctctgcatgtcagctggttcatctgcatgataacgttaggaagtaggtcttattattacccccttttacagatggtgaaaccaagtctgaggaaagggaaatgacctgttcaaagccatactatgagagcatgggaacccagtcggttttatgccaaagtcccggtttggaacggaactgaactattgtatgtaacactccaccgcccctaccaaactgaaagccgcgtcccccatgcaggtggttctgggtctggacaccctatgagcacctggatctcaaggaagcttaggctggaagccagaggcctggtaacatctactctgaaatccaaactggctcctctgctccccccaaagatctcgtgttcgcgtcagaattccccacttggccgccaggtggcggtggtgtgtcacctgccccggtgtatggccgaggatggggagtgctggagggccagggaccggccgcctaccgctccagggagacctccgggcccgtcctcggggcagcggaggagccagctggacttcggtttgagccccagtgaccttggctggtctcttctcgcgtctgaatctgtttcctcgtcttaaaatgagggtatagtgcccgccagggcagcacatgtactaaaatcggaaggacatagagacgatgagcatgactcctgtaaaaattacttt

SEQ ID NO: 68827 - DNA, 346 bp, Homo Sapiens
gaaacagatattgaatttattggttggctatgagtagaaaaatacatcagtaaagaaaaaagaccctgtatataaatataatactagctagttaaaatttgaccaagaagtttccattgtgggttaatttttaaaggcctaactgaaatatggagtaaccacagcatgcagcatgtaaattaaaggggatagctggagttaaaatattctgaagttcttaaattgtccaaaaggagggttaaatattaatgttatgttacataaaatgtttgtactatgttctagatggttagttaaaagagtaatcaccaaaagaatggaaataaaagtgtgtcacttccaaaac

SEQ ID NO: 68828 - DNA, 1155 bp, Homo Sapiens
  misc_feature (12)..(12): n is a, c, g, or t
  misc_feature (115)..(115): n is a, c, g, or t
atgacaaccagngaaaacttacttgggattattagcactttcaaacttagggacattattaaattggatggaatgcacttctaaatgtttaaattaaaatttcaaagctctttcngagattcaggttctcaataataatattcaagttttagagtttcactttgtactatttaaatttatggaactagtttccatactgacttgtaaggttttggggtcatatataaggactaaagccaagctaggcaaaacaatgacagcaccgttttttcagtgaagctctcagaatgtccagtacagatgttgcagataattccaagaactccttcagcaggtgttccttcaccattccgtaaacaagtattttaagatgttcactttgctcttctttttgggttacatacattttaataactgggtatgttgaagtagtgtctaaaagtatctagtctttattcacagtacattatattgtgtgatgcactggactaactcttgtttaccattcatgtaacaaaacccagcacattatctgcactataagctcaaagaatgtcacatccgcccagacagctctttgatgagggtgatgggaactgaataaaccatacggactggcagtaacaagggcttttactgttctgttcagtggaaccttcttggtcaaattgtaattagctagcattatatttatatacagggtcttttttctttaccgatgtattttcctactcatagccaaccaataaattcagtatctgtttcaaatattttagaagtgtagtttgtatagctgtagtactgaggtttgaggaaaaataaatgttgatcagcagaccacgtatttaaaattctgaatcttctgggacagggttgtaactcagccttccaaagggaagagtgcagggggacggggccatgatatggggaaatggtgtaaactaatgtatttctttattggctgttattctgtataacactcatatctttgccaaagttcaattttatatttaggcaactgatggtccttttgcatttaggattttcgttgttgttaccttatacctcatgatataaggaatgggctcatgtgtcttccgtcttttggaaggaggttgacatattttaaataaatgcttttaaatacagtaaaaa

SEQ ID NO: 68829 - DNA, 1001 bp, Homo Sapiens
agcattggacatatgaacagcttgtaaaaaaagcaggcggtaccggccggaattcccgggatatcgtcgaccacgcgtcgaataagactaatttttaagagtaactcagtaatttcaaaatacagatttgaatagcagcattagtggtttgagtgtctagcaaaggaaaaattgatgaataaaatgaaggtctggtgtatatgttttaaaatactctcatatagtcacactttaaattaagccttatattaggcccctctattttcaggatataattcttaactatcattatttacctgattttaatcatcagattcgaaattctgtgccatggcatatatgttcaaattcaaaccatttttaaaatgtgaagatggacttcatgcaagttggcagtggttctggtactaaaaattgtggttgttttttctgtttacgtaacctgcttagtattgacactctctaccaagagggtcttcctaagaagagtgctgtcattatttcctcttatcaacaacttgtgacatgagattttttaagggctttatgtgaactatgatattgtaatttttctaagcatattcaaaagggtgacaaaattacgtttatgtactaaatctaatcaggaaagtaaggcaggaaaagttgatggtattcattaggttttaactgaatggagcagttccttatataataacaattgtatagtagggataaaacactaacttaatgtgtattcattttaaattgttctgtatttttaaattgccaagaaaaacaactttgtaaatttggagatattttccaacagcttttcgtcttcagtgtcttaatgtggaagttaacccttaccaaaaaaggaagttggcaaaaacagccttctagcacacttttttaaatgaataatggtagcctaaacttaatatttttataaagtattgtaatattgttttgtggataattgaaataaaaagttctcattgaatgcacctattaaaaaa

SEQ ID NO: 68830 - DNA, 2719 bp, Homo Sapiens
tattgtgaattgtgatgacagtaaacacacttatttacagactaatggaaaagtcattttacctggggcaaaaatacccaaaatcacaaacttgaaagaaaggaaaacaagtttgtcagacctaaatgatccaatcattttgtccagtgatgatgatgatgacaacgacagaactaacagaagagaaagcatatctcctcagcctgctgattcagcatgttcttcccctgcaccatccactggaaaagtagaagcagcgctaaatgaaaatacttgcagagcagagcgtgaactacgaagcattccagaagactcagagttaaatacagttacattgccaagaaaagcaagaatgaaagaccagtttggcaattctattatcaacacacctctgaaacgtcttaaagtgttttctcaagaacctccagatgctttagctttaagctgccaaagttcctttgacagtgtcattttaaactgtcgaagtatacgagtaggaacactcttccggctgttaatagagcctgtaattttttgtttagattttatcaaggatacagctagacgaaccagaccatgatcctgtacgagattatattaaatacctctgatctaactaaatgtgaatggtgtaatgtccgaaaattacctgtagtgtttcttcaagcaattccagcagtttatcaaaagctgagcatccaactgcaaatgaataaggaggataaagttcggcaactgattcgtacaaggagtaacatacattaacaacatttaccaagaacaatatataatttcacatttttcaaaatggccttgatcctccggcaaatatggtatttgaaagtatcattaatgaaattggtataaagaataacatctccaatttttttgcgaaaattccctttgaagaagctaatggcagacttgttgcctgtacaagaacctatgaagagagcatcaaaggaagttgtgggcaaaaggaaaacaaaattaaaactgtatcatttgaatctaaaatacaacttagaagcaaacaagaatttcagttttttgatgaagaagaagaaactggagaaaaccacaccatcttcattggcccagtagaaaagttgatagtatatccaccacctccagctaagggaggcatctctgttaccaatgaggacctgcactgtctaaatgaaggagaatttttaaatgatgttattatagacttttatttgaaatcacttggtgctctgaaaacactgaacgaacggaagacgctgaccgaattcatatattcagctcttttccctataaacgccttaatcagagagagaggagaaatcatgaaacaactaatctgtcaatacagcaaaaacggcatgggagagtaaaaacatggacccggcacgtagatatttttgagaaggaatttatttttgtaccccttaatgaagcatggcttaagcaaaatcagactaaactatagcgatgaatcacctgaagctggtaaaatgcttgaagatgaactcgtcgacttctcagaagatcaggataaccaggatgatagcagtgacgatggattcctcgctgatgacaactgcagttcagaaataggacagtggcatttaaagcctactatctgtaaacaaccttgtatcctacttatggactcactccgaggcccttctcggtcaaatgttgtcaaaattttaagagagtatttagaagtggaatgggaagttaaaaaaggaagcaaaagaagtttttccaaagatgttatgaagggctctaatccaaaagtaccacagcaaaacaacttcagtgactgtggtgtatatgtattgcagtatgtagagagcttttttgagaatccaattctcagttttgaactacctatgaatttggcaaactggtttcctccaccaagaatgagaacaaaaagagaagaaatccgaaacataattctgaagctacaggaagatcagagcaaagagaaaagaaagcataaggacacttactcaacagaagcacctttaggcgaaggaacagaacaatatgtcaatagtatctcagattgaccatttctgttacttgtcatttctactttcagaaactaaatgactttcaaatttgggtatagacaataaagaactgaagtgctcactactcagtgatttggaaattttgatgcttgtataaatgtcagataattaatttccaaaggcgtatgtattaagtaaaagtctgtaaatatgttaatgaggccaatttttccagcatttataattatttttttcacttgttaggaagcttttgttatgtattttctgttaatagtacctaaaattgcaacttctaaacccaaataaaaagaaaatatttataggaggaaatgattaatttgatattctttagtgaacttgtttaattcctcagtgggtgtgacatatttcatgggaatattcaaatatctatggtaatatttggaccctttatattgtgttctaaaataagtcaaaatgtgagaaataatattaaatctaagatattttgaactaagcatctttatatgcttgtgtaacaggaagcaaagtaacagcctttcaattcatatactgccttgtgttcagtgaacccaagaaatgtaataaatatttgtaattttacacaaatatttaagaggaaagagtattaagagcaattcaaaaaaagtaaccttatactactaaaa

SEQ ID NO: 68831 - DNA, 733 bp, Homo Sapiens
tttaacttcccattccacttctaaatactctcttaaaattttgacaacatttgaccgagaagggcctcggagtgagtccataagtaggatacaaggttgtttacagatagtaggctttaaatgccactgtcctatttctgaactgcagttgtcatcagcgaggaatccatcgtcactgctatcatcctggttatcctgatcttctgagaagtcgacgagttcatcttcaagcattttaccagcttcaggtgattcatcgctatagtttagtctgattttgcttaagccatctgtatgatgtgtggaacttaaactttcattctgtaggccattctcacttttagtcctatcagcaactttctgggatgtagattctcctttattgaattcttcattttcactcgcagtatgatttatttttttcacactgtattttacactgcatatgtttctcttataacgagggtcactttcttcctgcccaggattggaatcaattacagctatgcaatgttttttgtttagcatcttcttaattacaggcttggcagaagagttttgtgaacaactctccatttcactggctgaagaagaaatacaactgtcctctacagttgaacatttctgtatgacagcattttcatggtaatgaggattaggttcatactttggtttttccaaaccggggaaacaaacaacagccaaaaaccagtgtgcagcttcattaaggggt

SEQ ID NO: 68832 - DNA, 1283 bp, Homo Sapiens
  misc_feature (44)..(44): n is a, c, g, or t
  misc_feature (81)..(115): n is a, c, g, or t
aaaacttgtaatcatatagggcgctactcgtcttagccgaacgnacgagcgcagcgaagtagttgagcgaggaagcggcgnnnnnnnnnnnnnnnnnnnnnnnnnnnnnnnnnnncagtcgacggtaccggacatatgcccgggaattcggccattacggccggggctccgagagcggacagatctctgggtgctgggcggtcatggcgctactagatgtatgcggagccccccgagggcagcggccggaatcggctctcccggttgcgggaagcgggcgtcgctcggacccaggacactacagtttctctatgcgatctccagagctcgctttaccccggggaatgcagcccacagaattcttccagtccctgggtggggacggagaaaggaacgttcagattgagatggcccatggcaccaccacgctcgccttcaagttccagcatggagtgattgcagcagtggattctcgggcctcagctgggtcctacattagtgccttacgggtgaacaaggtgattgagattaacccttacctgcttggcaccatgtctggctgtgcagcagactgtcagtactgggagcgcctgctggccaaggaatgcaggctgtactatctgcgaaatggagaacgtatttcagtgtcggcagcctccaagctgctgtccaacatgatgtgccagtaccggggcatgggcctctctatgggcagtatgatctgtggctgggataagaagggtcctggactctactacgtggatgaacatgggactcggctctcaggaaatatgttctccacgggtagtgggaacacttatgcctacggggtcatggacagtggctatcggcctaatcttagccctgaagaggcctatgaccttggccgcagggctattgcttatgccactcacagagacagctattctggaggcgttgtcaatatgtaccacatgaaggaagatggttgggtgaaagtagaaagtacagatgtcagtgacctgctgcaccagtaccgggaagccaatcaataatggtggtggtggcagctgggcaggtctcctctgggaggtcttggccgactcagggacctaagccacgttaagtccaaggagaagaagaggcctagcctgagccaaagagagagtacgggctcagcagccagaggaggccggtgaagtgcatcttctgcgtgttctctatttgaacaagcatttcccccagggaagtttctgggtgccccactaagtagaataaagaaaaacggttataaataaaaaaaa

SEQ ID NO: 68833 - DNA, 802 bp, Homo Sapiens
  misc_feature (395)..(395): n is a, c, g, or t
gggagaggcgtgaaactccgcagtgctcagccaagcagggagcaacgctaggaagggcgggcagaaagggcacgctcttgtgggtgactacaggttaggagaccgttgaacctggaggggccctaggatggaccccgtggaaagattcagagactgcgccctctccctggcgccgccttcccctacacgcggcgggtatattctgttgcagttggcccaggacctgtttccaagactctgccccctcgcacttccgtccctcctggttttgtaaagtgatgctcataggaacccccaccccgcgtgacactactcccagctcctggctgacttctagtcttctggttgaagctgcgcctttagatgacacgaccctacccacccctggtttccangcggatgccccggggcctggagcccacagaattcttccagtccctgggtgggggcggagaaaggaacgttcagattgagatggcccatggcaccaccacgctcgccttcaagttccagcatggagtgattgcagcagtggattctcgggcctcagctgggtcctacattagtgccttacgggtgaacaaggtgattgagattaacccttacctgcttggcaccatgtctggctgggcaccagactgtccgtactggaagcgcctgctggccaggaaagcaggctgtactatctgcgaaatggagaacgtatttcagtgtccgcagccctcaagctgctgtcccacatgatgtgcccataaccggggcatgggccttctctatggggcagaatgatctggggctgggg

SEQ ID NO: 68834 - DNA, 1152 bp, Homo Sapiens
tgggaagagcacagtggctgccctgctgcagaatctgtaccagcccaccgggggacagctgctgttggatgggaagccccttccccaatatgagcaccgctacctgcacaggcaggtggctgcagtgggacaagagccacaggtatttggaagaagtcttcaagaaaatattgcctatggcctgacccagaagccaactatggaggaaatcacagctgctgcagtaaagtctggggcccatagtttcatctctggactccctcagggctatgacacagaggtagacgaggctgggagccagctgtcagggggtcagcgacaggcagtggcgttggcccgagcattgatccggaaaccgtgtgtacttatcctggatgatgccaccagtgccctggatgcaaacagccagttacaggtggagcagctcctgtacgaaagccctgagcggtactcccgctcagtgcttctcatcacccagcacctcagcctggtggagcaggctgaccacatcctctttctggaaggaggcgctatccgggaggggggaacccaccagcagctcatggagaaaaaggggtgctactgggccatggtgcaggctcctgcagatgctccagaatgaaagccttctcagacctgcgcactccatctccctcccttttcttctctctgtggtggagaaccacagctgcagagtaggcagctgcctccaggatgagttacttgaaatttgccttgagtgtgttacctcctttccaagctcctcgtgataatgcagacttcctggagtacaaacacaggatttgtaattccttactgtaacggagtttagagccagggctgatgctttggtgtggccagcactctgaaactgagaaatgttcagaatgtacggaaagatgatcagctattttcaacataactgaaggcatatgctggcccataaacaccctgtaggttcttgatatttataataaaattggtgttttgtactgtggtttcttatgtttccggcacaccaaacggcccactgccttttgcagcgcacttttcagctgcgggtgtctcctcttttatcatcctcaatgttttaccccctaactgcatcaccttttcccttaagctttttaattcctatgaggccccttccac

SEQ ID NO: 68835 - DNA, 1132 bp, Homo Sapiens
  misc_feature (28)..(28): n is a, c, g, or t
  misc_feature (201)..(201): n is a, c, g, or t
ctctcccgttatgggggtcgggggaatnatgggtcaagggtcttccgaagaaagcgagaaaggaacaggcgccttcaaaagcccacttggcgatgggttacagtaagaggaagtctgcattatcacgaggagcttggaaaggaggtaacacactcaaggcaaatttcaagtaactcatcctggaggcagctgcctactctncagctgtggttctccaccacagagagaagaaaagggagggagatggagtgcgcaggtctgagaaggctttcattctggagcatctgcaggagcctgcaccatggcccagtagcacccctttttctccatgagctgctggtgggttcccccctcccggatagcgcctccttccagaaaagaggatgtggtcagcctgctccaccaggctggaggtgtctgggtgatgagaagcactgagcgggagtaccgctcagggtctttcgtaccaggagctgctccacctgaggaaagacatcggaccgtcagagccggggactaccctcagcccagggagacacctgtgtttccagggctgggactgacctcacaggatcactgctggctctgctaacaaccccaaggacaccaacgtttcccattctgagtacttctccgcaaaccctttgtttcattaaggactgttttacatgaagggtgcaaaagtaggataaaaatgagaaccctagggtgaaacacgtgacagaagaataaagactattgaatagtcctcttctctacccatggacttggcatttttatattcgattttaaggaaatataacttagtagtaaagagatgagcattcaagtcaggcagacctgaatttgggtcaaggctgcgccactcaaaagctatatgacctctatatgagcagcttattcaacctcttttaacctccattttgtcatctgtagaatgatgataaatgcctagctcagaaggattcctaatgaataaatgagtgacagtgcatgtaaacagactagcttaattaatattaatatgactaggatgggctgggcccagtggctcatgcctataatcctagcactttgggaggtcaggagggaggatcactgggcccaggagttttagcctgcgggcaacaat

SEQ ID NO: 68836 - DNA, 408 bp, Homo Sapiens
ggcacgaggctccagataccaatcagggaatgactggccaggactggaacttaacggccttgagaacatgtgggatttgtctttgagccccattggcttgtgatgttttcctctgtcctccctgagacagttgctcctgtcctggggggctctgcctccacctcccagtccaggatgtctgaggtggttgcaggctgcttgctgcccagtttccagtcattccctgattggtatctggagacagaaacctaatgggaagtgtttattgttccttttcctacaaaggaagcagtctctggaggccagaaagaaaagccttctttttcactaggccaggactacattgagagatgaagaatggaggttgtttccaaaagaaataaagagaaacttagaagttgtctctgg

SEQ ID NO: 68837 - DNA, 993 bp, Homo Sapiens
  misc_feature (718)..(757): n is a, c, g, or t
cagtcgacggtaccggacatatgcccgggaattcggccattacggccgggtctgtgactgtgatgcatgtgaggtgttccgacttcatctgttcctcttaactacggtgtttcccttaccatggcattcatgaggcatgaaatgaagtgacgtgcccagaatgagaatttgtccagattattcagataaacgatcataaagcagaatacattgataaataagtagaatatgaagataacatagaataataaaattccaaaatactcaatgggaaatgactagtaatataggctttcaagagttggtaccttttagctatatttgcagattctctgggattttaaggaactgagaaaacagcaaagttgactaaattttatatttcttgtcctctaaatattttgataatttctggattgatgcagtgatgtttttgttccttccgtatttataaatgaaacacctttttttagtgtttctaaacctaaaatctacttggtttgaaatcaagtggttggaacactgtttgacttttatttgaagcatgtttgttgattgaaaatttcattgaggaagttttcaatcagtggtgatcagtttgattctgtaatgagcacagcacctaatatttttgaggagctctgttttgaggaccaatgcttaaggtggaatttgttcgtaaacaatatcccaatagatttgttgacttgaggtctgnnnnnnnnnnnnnnnnnnnnnnnnnnnnnnnnnnnnnnnnccaatagaattaagaattctaatgttgaaaaactgcacaaatttttatgggacaaagcctagaaaagagaaatgtagtttgaatcataatctaaatcatcgtatgatagaagagggaaagttttggtgccataatttctcctttcactggtgttggacttaaatcagttgaaatgtatttctgtaccacaatttacgcttcaataaaagtttaattgtctagtgacattcagaaac

SEQ ID NO: 68838 - DNA, 1353 bp, Homo Sapiens
  misc_feature (42)..(80): n is a, c, g, or t
  misc_feature (83)..(117): n is a, c, g, or t
  misc_feature (1258)..(1276): n is a, c, g, or t
aagacctgtataactcactatagggcgctactctcatcagannnnnnnnnnnnnnnnnnnnnnnnnnnnnnnnnnnnnnncgnnnnnnnnnnnnnnnnnnnnnnnnnnnnnnnnnnncagtcgacggtaccggacatatgcccgggaattcggccattacggccgggggagagcgcacggtggagccgccagttgagaaggactctgatccggctcagctttccaatcagctgcggaaggagccacgctttcgggggttgcaagatggcggccaccagtggaactgatgagccggtttccggggagttggtgtctgtggcacatgcgctttctctcccagcagagtcgtatggcaacgatcctgacattgagatggcttgggccatgagagcaatgcagcatgctgaagtctattacaagctgatttcatcagttgacccacagttcctgaaactcaccaaagtagatgaccaaatttactctgagttccggaaaaattttgagacccttaggatagatgtgttggacccagaagaactcaagtcagaatcagccaaagagaagtggaggccattctgcttgaagtttaatgggattgttgaagacttcaactatggtactttgctgcgactagattgttctcagggctacactgaggaaaacaccatctttgcccccaggatacaattctttgccattgaaattgctcggaaccgggaaggctataacaaagctgtttatatcagtgttcaggacaaagaaggagagaaaggagtcaacaatggaggagaaaaaagagctgacagtggagaagaagagaacaccaagaatggaggagagaaaggagctgatagtggagaagaaaaagaggaaggaatcaacagagaagacaaaactgacaaaggaggagaaaaagggaaagaagctgccaaagaaatcaacaaaagtggtgaaaaagctatgtaaggtatacagggaacagcactctagaagctatgactcaattgagactacaagtaccacggtgctacttgcacagacccctttggttaaatgtaaattcttgtacaattgaaggatacgcagaaggacacctttctagtctaacagtcaggagctgctctggtcattcccttgtatgaactggtctaaagactgttagtggggtgttagttgatttttcctggtatactgtttcttggctgacactactggtcaagtaagaaatttgtaaataaatttcttttggttcttattnnnnnnnnnnnnnnnnnnngcctacagccgcggccgcaagcgtattccctttagtgagggttaattcgaagaatggcacgtggccgtcgttgtacc

SEQ ID NO: 68839 - DNA, 915 bp, Homo Sapiens
  misc_feature (79)..(79): n is a, c, g, or t
  misc_feature (107)..(107): n is a, c, g, or t
  misc_feature (151)..(151): n is a, c, g, or t
  misc_feature (720)..(747): n is a, c, g, or t
attaaaccttgtcccaatcacagaatactccagacatggctttgcaaaatatgaagggacagaaagagtagggtgtggnctgcatgtgatttgcagatggagaaagnaaagtagagcatttagctgttcgttttaaactacaggatgtgcnagactcgtttaagaaaatttttgatgaagcaaaacacagcccaggaaaaagattctttgataacacctcatgtttctcggtcaagcactcccagagagtcaccatgtggcaaaattgctgtagctgtattagaagaaaccacaagagagaggacagatgttattcagggtgatgatgtagcagatgcaacttcagaagttgaagtgtctagcacatctgaaacaacaccaaaagcagtggtttctcctccaaagtttgtatttggttcagagtctgttaaaagcatttttagtagtgaaaaatcaaaaccatttgcattcggcaacagttcagccactgggtctttgtttggatttagttttaatgcacctttgaaaagtaacaatagtgaaactagttcagtagcccagagtggatctgaaagcaaagtggaacctaaaaaatgtgaactgtcaaagaactctgatatcgaacagtcttcagatagcaaagtcaaaaatctctttgcttcctttccaacggaagaatcttcaatcaactacacatttaaaacaccagaaaaggcaaannnnnnnnnnnnnnnnnnnnnnnnnnnnccttgttgggcggcctcggccccctcaaaaaacttttctaaaccatttcgttttggggcgcggcgggccccagtaagggaaaaggggaacatgggggccaaaaagctggttttccccaaaaggaaaaatcccggggggcccaggaaaacaaaaagggtttggggaatt

SEQ ID NO: 68840 - DNA, 1405 bp, Homo Sapiens
  misc_feature (1143)..(1143): n is a, c, g, or t
  misc_feature (1290)..(1314): n is a, c, g, or t
cagtcgacggtaccggacatatgcccgggaattcggccattacggccggggaaaggaagaagagtccaccttgcgaccgtatccgctagcgcggcctgggatgcgcttgggctccctgttcgttcccacatgcagggcagcacaaggagaatgggcgtcatgactgatgtccaccggcgcttcctccagttgctgatgacccatggcgtgctagaggaatgggacgtgaagcgcttgcagacgcactgctacaaggtccatgaccgcaatgccaccgtagataagttggaggacttcatcaacaacattaacagtgtcttggagtccttgtatattgagataaagagaggagtcacggaagatgatgggagacccatttatgcgttggtgaatcttgctacaacttcaatttccaaaatggctacggattttgcagagaatgaactggatttgtttagaaaggctctggaactgattattgactcagaaaccggctttgcgtcttccacaaacatattgaacctggttgatcaacttaaaggcaagaagatgaggaagaaggaagcggagcaggtgctgcagaagtttgttcaaaacaagtggctgattgagaaggaaggggagttcaccctgcacggccgggccatcctggagatggagcaatacatccgggagacgtaccccgacgcggtgaagatctgcaatatctgtcacagcctcctcatccagggtcaaagctgcgaaacctgtgggatcaggatgcacttaccctgcgtggccaagtacttccagtcgaatgctgaaccgcgctgcccccactgcaacgactactggccccacgagatcccaaaagtcttcgaccctgagaaggagagggagtctggtgtcttgaaatcgaacaaaaagtccctgcggtccaggcagcattagccatcgtgccctgctgaggggctggctgccttgagtggcctgatcgccacagcccttcttggaagaaaggcgtccgtgtttcaggttccacgcgagtcacctctttcgtcttaatgttcaccgtccacagctttggaataaaccatcctgggaagttgctgcaaaccccttatttcccccgccccaccaccgggacatactggggccaaacanaaaaattgtcggcccccctcggcccttgaaaaacttttccaaaccatttcttttgggcgcgccgggccccacaagggaaaggggaacatgggccataacctggttctccaaggaaaatcccggggccaggactaaaggcttggaatnnnnnnnnnnnnnnnnnnnnnnnnngcgggggaaaccgaaaggggttcttggaccaatccccagagggaagttcctggagggccttttcctgggaactcattccccagggggaccc

SEQ ID NO: 68841 - DNA, 1011 bp, Homo Sapiens
ctagggtcaaaaagcaggcttgttaaacgacggcagtaactataacggtcctaaggtagcgaggcctgggtggcgaattcggcaccagggttcgttcccacatgcaggtcagcacaaggagaatgggcgtcatgactgatgtccaccggcgcttcctccagttgctgatgacccatggcgtgctagaggaatgggacgtgaagcgcttgcagacgcactgctacaaggtccatgaccgcaatgccaccgtagataagttggaggacttcatcaacaacattaacagtgtcttggagtccttgtatattgagataaagagaggagtcacggacagatgatgggagacccatttatgcgttggtgaatcttgctacaacttcaatttccacaaatggctacggattttgcagagaatgaactggattctgttctagaaaggctctggaactgattattgactcagaaaccggctttgcgtcttccacaaacatattgaacctggttgatcaacttaaaggcaagaagatgaggaagaaggaacgcggagcaggtgctgcagaagtttgttcaaaacaagtggctgattgagaaggaaggggagttcaccctgcacggcgggccatcctggagatggagcactacatccgggagacgtaccccgacgcggtgaagatctgcaatatctgtcacagcctcctcatccaggtcaaagctggaaactgtgggaacaggatgcacttaccccgcggggccaagtacttacagtcgaatgctgaacggctgccccatggaagactaatggcccacgagatccaaagtctcgacccgagaagaaggggcgggtctgaatcgacaaaagcccggggccggaggataagcatcgggcgggaggggggctgagggcggatgcagcctctggaaaggcggtcagtcaggagaacctgtagacgccagtgaaaccgggggggaaaaacacgacttgggggagaagagaggttccctaaggaggca

SEQ ID NO: 68842 - DNA, 1045 bp, Homo Sapiens
  misc_feature (110)..(144): n is a, c, g, or t
  misc_feature (631)..(631): n is a, c, g, or t
ccaaaacaaaccaacgagaaccaaacaaaacgatacgatcactaatggtgcgccaggcggcattagtcgaacgaccgagcgcagcgagctggtagcgaggaagcggccgnnnnnnnnnnnnnnnnnnnnnnnnnnnnnnnnnnncagtcgacggtaccggacatatgcccgggaattcggccattacggccgggggaaccgagaggctgagactaacccagaaacatccaattctcaaactgaagctcgcactctcgcctccagcatgaaagtctctgccgcccttctgtgcctgctgctcatagcagccaccttcatcccccaagggctcgctcagccagatgcaatcaatgccccagtcacctgctgttataacttcaccaataggaagatctcagtgcagaggctcgcgagctatagaagaatcaccagcagcaagtgtcccaaagaagctgtgatgtgagttcagcacaccaaccttccctggcctgaagttcttccttgtggagcaagggacaagcctcatagaacctagagtcagagagtgcactatttaacttaatgtacaaaggttcccaaatgggaaaactgaggcaccaagggaaaaagtgaaccccaacatcactctccnactgggtgcctattcagaacaacccaatttctttagcttgaagtcaggatggctcccacctggaacacctataggagcagttctgcactgggttcctcattccacctgcgttcctcctctagctcccatggagccccttggttgcagcatgggctggcacttctagaaccaaaagtgcacaagggaacttcattaaactctgtactcctccccaagatacagaccatagtgggccagaagatttgtgtgacaccaagcagcagtgggtcaggattctggccacctggcaagcaaccacatcgaagagtgaaatcttcaacacaaggatgggtactatttcctaggtccaagcccgtaattaaaaagatgggggttgacatgctacacgaactcgcagaagagaacacacagacg

SEQ ID NO: 68843 - DNA, 830 bp, Homo Sapiens; identical to SEQ ID NO: 4124
  misc_feature (747)..(747): n is a, c, g, or t
  misc_feature (749)..(749): n is a, c, g, or t
  misc_feature (752)..(752): n is a, c, g, or t
  misc_feature (754)..(754): n is a, c, g, or t
  misc_feature (761)..(765): n is a, c, g, or t
  misc_feature (768)..(772): n is a, c, g, or t

SEQ ID NO: 68844 - DNA, 1424 bp, Homo Sapiens
  misc_feature (192)..(202): n is a, c, g, or t
  misc_feature (1219)..(1219): n is a, c, g, or t
acccaaagactacagacctgagccaccatgcccacctgttttcttgacaggacttgcatatgacaagctctctgcttctcctcacctatgcattgcaagccaggtcagaggcaggttaaacaccttaaggacatgttaggacaagtggcatacaagggaaaaaaacccgttcatttaagttacagaaacagnnnnnnnnnnnctggcttattcccacacttactctactcaaagctttgagaagactaattttggcatcctctggctaaatacaaaacaacaaaacaaaacaaggcaaactctttcagcaagagctgtgggggaagggactataagggacacacacaactgacaggcaaaagctctgagcacgtgattgctaagtttaattcaactgttacaccccattctgccttgtaaaaataacaaaacgctcctatcaaaatgacattgtgatgtgagtacaggctttttgttttggtacagctctaaaaaatgttggcaccgaatgcacttaagaaaagtgttaaggcttaatacaaatacagagacgagtcatttctcaatgcagcttagagggtgagaacaggatgctaggtttttaaatcttccaaatacaggcagtccccaacgtacagacatacaggacacctcccaaatgtaaacgacagccacacagcagggcttgcatgcgcaggaactcttcttctcccagtgagcagactaagcactctgaatcccaccccactgcctcgcagagggaaagaaggcaggacagatgcaagaagagtaatgtcaggggctccatcacagctgcccaggggcttctgctgtagttcatattttcctcattcccatctctggtttctcccataacccagaagtccctgccaggggcggaagtaaagagcttttcctctcacctagcggactgcaagggctgggagaatcacagggcccagtaccgtcacgtcctatttcttcctggcaatctgatttggaattcgtgaatcattttctcaataaaaaaacagaagttataaatggtagttcatttccaccattaaactgtttcctttcaagttgcatcaatgactttgaagcacaaacacctgaagtgtgtgtagagtcacacagagtgtttcttggctccaaagtctacaggcaatcaaaagggggaagctgtctttggttgacaaagccttgtgcagaccccagntgtgccaggtgtaggaaggggagcttggcaggcggctcctgcaggcacttaagcagtgaggcaacatgagcctgactgaacatggctgctgcttttctgaagtttaataatgatgatgtttctagcaccaagcattagctttgtaggcactcagagcaaagctgctgcccctcgtgccgaaatcgccacccaggcctcgctacct

SEQ ID NO: 68845 - DNA, 433 bp, Homo Sapiens
ccttgatctcttcttcctcaggtaatccaggatcctggggcacatagacttcttgctgcgatacagttggaaacaagtaagtctacagaatgtttcagtttcccagcaattccaggtctaaggcgcacagttcccttttaggggaagaaacaacttttttacttacaagtctaagaagagtccacatcaatctaaaaacccactccagggaccaggacacattcagaccacccactgtccactttttcaagagcaacactgttcttacctgtattgccacaaggcactgattttccatataggcaacagttctgtttccatagatctaaacttttccacttttcatgcaatgagcatccagagaatccagggaataaaatcctcaagtagcaaattatgggtgcttttctcaaaagaatcattgacagaggta

SEQ ID NO: 68846 - DNA, 425 bp, Homo Sapiens
  misc_feature (303)..(323): n is a, c, g, or t
acccaattaatctcccaatccctagcaactgtgactctgtatttagcacaagagaaagctgagaatgtgggtcttgcctccttccagaaatatgtctggctcatcaggacatttttttaaaacttcaaaatatttttaagatattttaaacttttataaaacaaaaaatcaaccaacaagagacttttctgaggaggaacatttgtatttgaacaagatccttggtgtgtagttcagtcttgcagtatacaagcttttgtgtataaatgttttatgatatgattccctgtattttgcaggggnnnnnnnnnnnnnnnnnnnnnagataaatatgtatatcaatattttaaattcatctttgctttttttagaggagtttgtaatcaccttataacatgaaaataaacatttcctttttaacatcc

SEQ ID NO: 68847 - DNA, 3201 bp, Homo Sapiens
  misc_feature (2940)..(2950): n is a, c, g, or t
tcaaaggggcaagagctgagcggaacaccggcccgccgtcgcggcagctgcttcacccctctctctgcagccatggggctccctcgtggacctctcgcgtctctcctccttctccaggtttgctggctgcagtgcgcggcctccgagccgtgccgggcggtcttcagggaggctgaagtgaccttggaggcgggaggcgcggagcaggagcccggccaggcgctggggaaagtattcatgggctgccctgggcaagagccagctctgtttagcactgataatgatgacttcactgtgcggaatggcgagacagtccaggaaagaaggtcactgaaggaaaggaatccattgaagatcttcccatccaaacgtatcttacgaagacacaagagagattgggtggttgctccaatatctgtccctgaaaatggcaagggtcccttcccccagagactgaatcagctcaagtctaataaagatagagacaccaagattttctacagcatcacggggccgggggcagacagcccccctgagggtgtcttcgctgtagagaaggagacaggctggttgttgttgaataagccactggaccgggaggagattgccaagtatgagctctttggccacgctgtgtcagagaatggtgcctcagtggaggaccccatgaacatctccatcatcgtgaccgaccagaatgaccacaagcccaagtttacccaggacaccttccgagggagtgtcttagagggagtcctaccaggtacttctgtgatgcaggtgacagccacggatgaggatgatgccatctacacctacaatggggtggttgcttactccatccatagccaagaaccaaaggacccacacgacctcatgttcacaattcaccggagcacaggcaccatcagcgtcatctccagtggcctggaccgggaaaaagtccctgagtacacactgaccatccaggccacagacatggatggggacggctccaccaccacggcagtggcagtagtggagatccttgatgccaatgacaatgctcccatgtttgacccccagaagtacgaggcccatgtgcctgagaatgcagtgggccatgaggtgcagaggctgacggtcactgatctggacgcccccaactcaccagcgtggcgtgccacctaccttatcatgggcggtgacgacggggaccattttaccatcaccacccaccctgagagcaaccagggcatcctgacaaccaggaagggtttggattttgaggccaaaaaccagcacaccctgtacgttgaagtgaccaacgaggccccttttgtgctgaagctcccaacctccacagccaccatagtggtccacgtggaggatgtgaatgaggcacctgtgtttgtcccaccctccaaagtcgttgaggtccaggagggcatccccactggggagcctgtgtgtgtctacactgcagaagaccctgacaaggagaatcaaaagatcagctaccgcatcctgagagacccagcagggtggctagccatggacccagacagtgggcaggtcacagctgtgggcaccctcgaccgtgaggatgagcagtttgtgaggaacaacatctatgaagtcatggtcttggccatggacaatggaagccctcccaccactggcacgggaacccttctgctaacactgattgatgtcaacgaccatggcccagtccctgagccccgtcagatcaccatctgcaaccaaagccctgtgcgccaggtgctgaacatcacggacaaggacctgtctccccacacctcccctttccaggcccagctcacagatgactcagacatctactggacggcagaggtcaacgaggaaggtgacacagtggtcttgtccctgaagaagttcctgaagcaggatacatatgacgtgcacctttctctgtctgaccatggcaacaaagagcagctgacggtgatcagggccactgtgtgcgactgccatggccatgtcgaaacctgccctggaccctggaagggaggtttcatcctccctgtgctgggggctgtcctggctctgctgttcctcctgctggtgctgcttttgttggtgagaaagaagcggaagatcaaggagcccctcctactcccagaagatgacacccgtgacaacgtcttctactatggcgaagaggggggtggcgaagaggaccaggactatgacatcacccagctccaccgaggtctggaggccaggccggaggtggttctccgcaatgacgtggcaccaaccatcatcccgacacccatgtaccgtcctcggccagccaacccagatgaaatcggcaactttataattgagaacctgaaggcggctaacacagaccccacagccccgccctacgacaccctcttggtgttcgactatgagggcagcggctccgacgccgcgtccctgagctccctcacctcctccgcctccgaccaagaccaagattacgattatctgaacgagtggggcagccgcttcaagaagctggcagacatgtacggtggcggggaggacgactaggcggcctgcctgcagggctggggaccaaacgtcaggccacagagcatctccaaggggtctcagttcccccttcagctgaggacttcggagcttgtcaggaagtggccgtagcaacttggcggagacaggctatgagtctgacgttagagtggttgcttccttagcctttcaggatggaggaatgtgggcagtttgacttcagcactgaaaacctctccacctgggccagggttgcctcagaggccaagtttccagaagcctcttacctgccgtaaaatgctcaaccctgtgtcctgggcctgggcctgctgtgactgacctacagtggactttctctctggaatggaaccttcttaggcctcctggtgcaagcttaannnnnnnnnnnaatgctatcttcaaaacgttagagaaagttcttcaaaagtgcagcccagagctgctgggcccactggccgtcctgcatttctggtttccagaccccaatgcctcccattcggatggatctctgcgtttttatactgagtgtgcctaggttgccccttattttttattttccctgttgcgttgctatagatgaagggtgaggacaatcgtgtatatgtactagaacttttttattaaagaaacttttcccag

SEQ ID NO: 68848 - DNA, 699 bp, Homo Sapiens
agcgtcccagaaagttaggttgcacgagccgagaatcttctgaacacaagcatgctgtcgcagctcgatggtaaaaataacgatataggttctgttttcatatcgttgatctgtatacaaatagttaattcttcgttctcttgaaacaggttcacctccaatttgtgaagatattggtaggcaaatgttatgctataatagaaggattcccatccctgagcttgaagcaagaattgatgtaagtagtcctgagttactattgggtcatgtgtaaaaagatccttgttacaaaagctgagaatatgtatctttcatcttgctttagttttaaaaagttccaggtatagactttgtttttactacgaacagctgaatgacagtgtcttccatatttcagcctgtgaatgctgagacacttcgagaagtatgtcccaaatacatttataataggagtccagctattgctgctgttggtaaacctggcttcttttcttctatgcaaaaagttggccaagtacttttagttaactcttctttttaatccttaggtcccattaagcaactaccagattttaaacagatacgcagtaacatgtgttggcttcgtgattaaaatgctcctaatcaagattgtttgaacacatgtatttataaaacagagctagagaaaaataaaaatgaacatgtatatacatttgg

SEQ ID NO: 68849 - DNA, 1784 bp, Homo Sapiens
  misc_feature (138)..(138): n is a, c, g, or t
caaggtagcgaggcctgggtggcgaattcggcacgaggggcggctcgagtggtgttgtcatccgcggcgcggcggcggctctggggtttcagcgagagtcttctaatccgaggcgctgcgggacggtcattatatttntggagagaacagattaagaagtacacaggctgctacccaagttgttctgaatgttcctgaaacaagagtaacatgtttagaaagtggactcagagtagcttcggaagactctgggctctcaacatgcacagttggactctggattgatgctggaagtagatacgaaaatgagaagaacaatggaacagcacactttctggagcatatggctttcaagggcaccaagaagagatcccagttagatctggaacttgagattgaaaatatgggtgctcatctcaatgcctatacctccagagagcagactgtatactatgccaaagcattctctaaagacttgccaagagctgtagaaattcttgctgatataatacaaaacagcacattgggagaagcagagattgaacgtgagcgtggagtaatccttagagagatgcaggaagttgaaaccaatttacaagaagttgtttttgattatcttcatgccacagcttatcaaaatactgcacttggacggacaattttgggaccaactgaaaatatcaaatctataagtcgtaaggacttagtggattatataaccacacattataaggggccaagaatagtgcttgctgctgctggaggtgtttcccatgatgaattgcttgacttagcaaagtttcatttcggtgactctttatgcacacacaaaggagaaataccagctctgcctccctgcaaattcacaggaagtgagattcgtgtgagggatgacaagatgcctttggcgcaccttgcaatagctgttgaagctgttggttgggcacatccagatacaatctgtctcatggttgcaaacacgctgattggcaactgggatcgctcttttgggggaggaatgaatttatctagcaagctggcccagctcacttgtcatggcaatctttgccatagctttcagtctttcaacacttcctacacagatacaggattatggggactgtatatggtttgtgaatcatccactgttgcagacatgctacatgttgttcaaaaagaatggatgcgactctgtacaagtgtcacagaaagtgaggttgcacgagccagaaatcttctgaaaacaaacatgttgttgcagcttgatggttcaactccaatttgtgaagatattggtaggcaaatgttatgctataatagaaggattcccatccctgagcttgaagcaagaattgatgctgtgaatgctgagacaattcgagaagtatgtaccaaatacatttataataggagtccagctattgctgctgttggtcccattaagcaactaccagattttaaacagatacgcagtaacatgtgttggcttcgtgattaaaatgctcctaatcaagattgtttgaacacatgtatttataaaacagagctagagaaaaataaaaatgaacatgtatatacatttggaaatttgaattaaatactgtatcatactttcaaaggataaaaagactacccctctgaaggttgttttgtattaatggtcagtctttgttctctgagaaattatgttggaagcagcatactttcaaattattaccatgagtataattttaagaatgaaaatgtttacagtattttcagttttattataaaaatgcacacac

SEQ ID NO: 68850 - DNA, 1053 bp, Homo Sapiens
  misc_feature (871)..(871): n is a, c, g, or t
  misc_feature (969)..(969): n is a, c, g, or t
  misc_feature (1024)..(1024): n is a, c, g, or t
cagtcgacggtaccggacatatgcccgggaattcggccattacggccggggccttctagcagaaatggcggctgcggcggctcgagtggtgttgtcatccgcggcgcggcggcggctctggggtttcagcgagagtcttctaatccgaggcgctgcgggacggtcattatattttggagagaacagattaagaagtacacaggctgctacccaagttgttctgaatgttcctgaaacaagagtaacatgtttagaaagtggactcagagtagcttcggaagactctgggctctcaacatgcacagttggactctggattgatgctggaagtagatacgaaaatgagaagaacaatggaacagcacactttctggagcatatggctttcaagggcaccaagaagagatcccagttagatctggaacttgagattgaaaatatgggtgctcatctcaatgcctatacctccagagagcagactgtatactatgccaaagcattctctaaagacttgccaagagctgtagaaattcttgctgatataatacaaaacagcacattgggagaagcagagattgaacgtgagcgtggagtaatccttagagagatgcaggaagttgaaaccaatttacaagaagttgtttttgattatcttcatgccacagcttatcaaaatactgcacttggacggacaatttgtgggaccaactgaaaatatcaaatctataagtcgtaaggacttagtggattatataaccaccacattataaggggccaagaatagtgcttgctgcctgctggaggtggtttcccatgatgaattgcttgaacttagcaaagtttcatttcggtgactctttatgcacacacnaaggagaaataccagctctgcctcccctgcaattcacagggaagtgagatttcgtgtgaagggattgacagatgccctttggcgcacctttgcaatanctgttgaaaactgttggttggggcacatcccagatacaaatctgtcctcatgggntggcaaacacgcctgatttgggcaaactg

SEQ ID NO: 68851 - DNA, 960 bp, Homo Sapiens
ggccagtaactcctaacggttctaaggtagcgaggcctgggtggcgaattcggcacgaggtgtcatccgcggcgcggcggcggctctggggtttcagcgagagtcttctaatccgaggcgctgcgggacggtcattatattttggagagaacagattaagaagtacacaggctgctacccaagttgttctgaatgttcctgaaacaagagtaacatgtttagaaagtggactcagagtagcttcggaagactctgggctctcaacatgcacagttggactctggattgatgctggaagtagatacgaaaatgagaagaacaatggaacagcacactttctggagcatatggctttcaagggcaccaagaagagatcccagttagatctggaacttgagattgacaaatatgggtgctcatctcaatgcctatacctccagagagcagactgtatactatgccaaagcattctctaaagacttgccaagagctgtagaaattcttgctgatataatacaaaacagcacattgggagaagcagagattgaacgtgagcgtggagtaatccttagagagatgcaggaagttgaaaccaattgacaagaagtggtcaccgatctatcttcatgacgacagcttatcaaaatactgcactttggacggacaattttgggaccaactgaaaatatcaaatctataagtcgtaaggacttagtggattatatttaccacacatttattaggggccaagaatagtgcttgctgctgctggaggtgtttcccatgatgaatgcttgatttagcaaagtttcatttcggtgactctttatgccacacaaaggagaaataccagtctggctcccggaatccccggagtgagatcggtgggggatgcagatgccttggtggctcgcaaattgtggaccgtggtggggcccgcaaaacgtttggtggacccgt

SEQ ID NO: 68852 - DNA, 1122 bp, Homo Sapiens
caataaaactattatcgccgaattcgcacgaggcccagctgccactcctctagttgaaagtgttgtgtttacatctgacattaaattatttttccagcatacaagatttaaatttgggaagggggggatgtcctcaattagaactttttgatcagcctggctggtaccgtctagtactatgcagcggtcctcaagttggagaaaatgtgcctttcattcattacctctctggagacttcttgctggaatgaacagtgtgctcagggactatttggaactggatgtttttgaattattttatacttagagatattctgaattttttgagggccttttaacactccccgagctgattgtttgcaagtgtgtttgttccagagtgtggaagtataaagacatgggcatcacgtaaattggttttgtttgctattctgtgtgtcagaaccaacgagtgtaatggagagggcaggtcatctcttattgtttctaaaacaacttaaaaggtgtagattgggaagaggtgagtgatccagctttctccttttggattgaggctatgtacttggtgggggcaggggagggaatatattataatactattcagttgggataatgggaaaaacagagtatatagggtatctacccagcctagaaagcacaggaacaatacgtcatatatttggaacagttattgtctgtgccatgaccttcatgataccagtgagaagccaggctagagaaataaaatcctgaattacattttagtaattgttttcaagacaacaaaaaataaaacatttcattattcttgtatattgacatatttttcttttcttgaacaacatgcaggtgagtagcatattaatggctggctgtaaattaattttgattcctctgtcaagtagacctaaaactcactgtaagatatttcagttttttccttaaagtgatgatttcaaacctcctgaatatttgcgcgagattttttcttaggaaagaaaaaaggctcaccttggctactgttgtcagcttacagtcatcacataccccctgaaatatttgacacttggaaatgaattcttcctgaaaatatcactgcaataaaatacgtactacgtcagc

SEQ ID NO: 68853 - DNA, 1496 bp, Homo Sapiens
cggtccggaattcccgggatatcgtcgacccacgcgtccgagacaccatgtttagtatttgagcattggttaaatgctaaagaaaaatcgccgttaaagcagttttctttttcactgtctttttcttttcgcggggaacccagctgttcctgcgagggccacctcctcaggaagaccccgcagctctcccgcggcgcttctgcaggaggcagcgacagtttcgagaacccgggccttcccctcccagtgcctccgggggttccggcgtttcaggcgctgctgttttccgggaagggcaggcgcgctgggccttggggagctgcgctcggcgggcggacgcgggggatcatggaagctgataaagatgacacacaacaaattcttaaggagcatttgccagatgaatttataaaagatgaacaaaataagggactaattgatgaaattacaaagaaaaatattcagctaaagaaggagatccaaaagcttgaaacggagttacaagaggctaccaaagaattccagattaaagaggatattcctgaaacaaagatgaaattcttatcagttgaaactcctgagaatgacagccagttgtcaaatatctcctgttcgtttcaagtgagctcgaaagttccttatgagatacaaaaaggacaagcacttatcacctttgaaaaagaagaagttgctcaaaatgtggtaagcatgagtaaacatcatgtacagataaaagatgtaaatctggaggttacggccaagccagttccattaaaatcaggagtcaagattccaggtttatgtagaagtttctaaaatgaaaatcaatgttactgaaattcctgaaacatggcgtgaagatcaaatgagagacaaactagagctgagcttttcaaagtcccgaaatggaggcggagaggtggaccgcgtggactatgacagacagtccgggagtgcagtcatcacgtttgtggagattggagtggctgacaagattttgaaaaagaaagaataccctctttatataaatcaaacctgccatagagttactgtttctccatacacagaaatacacttgaaaaagtatcagatacaggaacatctaagaggacagtgcttctgacaggaatggaaggcattcaaatggatgaagaaattgtggaggatttaattaacattcactttcaacgggcaaagaatggaggtggagaagtagatgtggtcaagtgttctctaggtcaacctcacatagcatactttgaagaatagacttaacagaatcatgaaaactatagctttttaacccggattactgtaaatgtttgacaaaaatgaatatgcttttccttaaaaaatgaaaactttaatttttaccatccatttatgtttagatacaaaacttatttccatgtttctgaatcttctttgtttcaaatggtgctgcatgttttcaactacaataagcgcactgtaataaaaagttttgtttatagatt

SEQ ID NO: 68854 - DNA, 678 bp, Homo Sapiens
  misc_feature (534)..(534): n is a, c, g, or t
agaattcggcacgaggcggcacgaggtcaaaacttgtgaaatgagccaccaatcacaatctgaacttaagctgagtaacttgtagcaagacagcagctgctatgcacactggagtccaccataccaaagcacgaaccagactgtttcttggggtcagccctaaaccgagatttcagtctaccttaccaatggggcatctggctaaacaacctgacaaactgtggccaggggaaccgacacaaccctcaagcatttctatgtattgagaattgtcagtgccctaaggtatccattggttcccttgatgccaacttacaatttttaccggatttgctgaaatgggcacttctgctgtgatgctagtgttgattttgctctcagatgaacacaatgtctcatactaaccaagaagcaagaaaagccccatgctttcatttttcacttggagtgacaatgggagaggtcaggaatcaagttcactttcaagatctaagggagtccactatctgtgcaattgtatttggcttttttttngcactgtttcaatgctggtaattgaaaccattttaatatatttggttgtattcactttatatgtccttccaaaaatgttgttgtgtacaaaccatgctttcaatgttggcttccaagttttttaataagaaactttttgtattt

SEQ ID NO: 68855 - DNA, 551 bp, Homo Sapiens
  misc_feature (90)..(160): n is a, c, g, or t
atgtacaggcacacaaaatttgtccttggatagacacatatcagtccgcttccttctcctctctgaatttctttatttaaaaaaaagaannnnnnnnnnnnnnnnnnnnnnnnnnnnnnnnnnnnnnnnnnnnnnnnnnnnnnnnnnnnnnnnnnnnnnntactaatatgaattattaggctatgctaatatgaatttgtatactaatatgattgaaattagtttgacttctataataattgttctcccagattgggcttctgttttgatagtagaactaaattattaggctatttcaagaaattaatatattactggtagaaaaactgaagctacaaaatggcctggtttctcacttcagttaaatttgtgcttctgagtgcttgtattctaggtgaaaccgcactgagaaggtatttgtggcctatacgctgattcattgattagacttctttgcacaggagagctgctaaaaattactgcggtgaacaggtacgaagaaaaagactgttctctgcccttctttttgcaataaaatattacaaactaaa

SEQ ID NO: 68856 - DNA, 751 bp, Homo Sapiens
tgacggtgtcggctcatgatgaggacgccagaagagatggggagatccgatactccattagagatggctctggcgttggtgttttcaaaataggtgaagagacaggtgtcatagagacgtcagatcgactggaccgtgaatcgacctcccattattggctaacagtctttgcaaccgatcagggtgtcgtgcctctttcatcgttcatagagatctacatagaggttgaggatgtcaatgacaatgcaccacagacatcagagcctgtttattacccagaaatcatggaaaattctcctaaagatgtatctgtggtccagatcgaggcatttgatccagattcgagctctaatgacaagctcatgtacaaaattacaagtggaaatccacaaggattcttttcaatacatcctaaaacaggtatgtgttaatactgctataggaaatgtttatgcttatgcttttctgttagggggaaaagtaagaattagcatttatctgttacatacttttgtttcttgataaattgttttccttttgaattattcaaaataagcctttattttggataaaaatttagcataaccgtgagccaccatgcccggcccaaatattttttattcaggatggtataacctaactgataataggtaataaggttaaatttttttatgacgtattttatttacaaatatcatacactgctggtgttaccatatgaaaggaaataaagtcaattgataattgcctc

SEQ ID NO: 68857 - DNA, 1490 bp, Homo Sapiens
  misc_feature (462)..(470): n is a, c, g, or t
  misc_feature (1438)..(1438): n is a, c, g, or t
tagtgctaatgatcatgactcgatcctctcctcctcttactcacccaggcgatgtcctgatgtacaggtgttaacttacttcaagcatttttgtaagaggtgtctataattcactaaaaaaggtaaaacatgatgattacgttctgggggctctgtaaatgatcccactaaaatgtgacctcggaaaaatatgaatggtgtttaggatgagagaaaaggggaaaacaatagccctggtcagctttataatagagagcctggtttccctagcatgaagagatgtatgttgtagtcctgccactgattactgaagtcctgccattaattgctgaatgtcttcagttgggccactgagcttgtctgaatctgttcccttttataaaagagttactacatcaaaacaaagagtgaaatccaaatttgtcaaactgtatgtattaaacatgtccagttttttggttnnnnnnnnnttgcactggctttgagggaaaacacacagggtgagggaattgggctaaatgacttcttacaggcccctttctgattctttaactttgaaaggcaagccatattgatccagttgttatagtgaactcatggtaatggtttgtgagaacaatagagattttcatttctatgtagatgagttggtatgagaatatatggaatttttaagggactgtttaaatctttgatttgtagactattaaatataccgtatgcataaagtaagcctttagctctaaggtaaagacgacacgttttcggtttgtgactacaaataggttaaaaatagattttaattttattaaaaatataatttaatgcaggttgtttgaagcatctgtcttcatatgatggcattagaacaccttggtataataaaaagttaccgtaatttatgattatttgaatttatccattctgaaaattaataagatctaaaactggcatgacaatcaagatttgtatttagtgaaatttaaaataaatgtaagccatagttaaaactgttgctgcattcatgaatgcccttaggaaaaggtccacagtaaaatcagaaagctgaacctctcctgctgtttataggatatgtttatgctgaattaattgccagggtttcttaaacttttagggaattatactttggtggctcaatagtagattctacaaattatttttaaattgatttcctttccttagagctgcaggagaatatctggcaaggtgcatttaatatttggaaaaaagatatgaccagtaacctactttaggaagaaaataagcatcacctggcatcaggtaggcatcgtaaggttgagctgtcctatctgaaaaaatatgcgatataatttattacagaagttactttatactaatgcttaacatttatgtttttagttacaaccccttcccattttatctgctgatagggtangacatctaaagagagttttaggaatgacatctatttgatgaggtcagatttt

SEQ ID NO: 68858 - DNA, 671 bp, Homo Sapiens
gggggtctccgctcaacgatccttcctcaaagcatggttgctgagtacccagagttgcgaggagttttttaactgatttagccaggtggcaatcatgagtgaatggatgaagaaaggccccttagaatggcaagattacatttacaaagaggtccgagtgacagccagtgagaagaatgagtataaaggatgggttttaactacagacccagtctctgccaatattgtccttgtgaacttccttgaagatggcagcatgtctgtgaccggaattatgggacatgctgtgcagactgttgaaactatgaatgaaggggaccatagagtgagggagaagctgatgcatttgttcacgtctggagactgcaaagcatacagcccagaggatctggaagagagaaagaacagcctaaagaaatggcttgagaagaaccacatccccatcactgaacagggagacgctccaaggactctctgtgtggctggggtcctgactatagacccaccatatggtccagaaaattgcagcagctctaatgagattattctgtcgcgtgttcaggatcttattgaaggacatcttacagcttcccaatgagaggccaggaagtgtgaacatactgatagaaaaagactatattttatcccctcataaaatgttttaaatgtgg

SEQ ID NO: 68859 - DNA, 2626 bp, Homo Sapiens
ctagtacgaggctgggtgtgtaattcggccgaggggaagtgatagccgccgaccgagcctgctgctttcttgctactgcttcggcttcccggctaccccccggacggtgaaggcggcccagctgtggatggtcagatagcccttgtctcccgccgccaatctctggcccctagcagcacggagcagacggcggcagcagcagcagcaggcgaggaggaagatggcgggacggctgccggcctgtgtggtggactgtggcacggggtatacaaaactaggatatgctggaaatacagaaccacagtttatcatcccttcctgtattgctattaaggagtcagcaaaagtgggtgatcaagctcaaaggagggtgatgaaaggtgttgatgacctagacttcttcattggtgatgaagcaatagaaaaacctacatatgcaacaaagtggccaatccgccatggtatagttgaagattgggacttaatggaaaggtttatggagcaagtgatctttaaatatttaagggcagaacctgaagaccattattttcttttgactgaacctccattgaatactccagaaaacagggaatatactgctgaaataatgtttgagtccttcaatgttccaggcttgtacattgctgtgcaggctgttcttgccttagctgcatcttggacctcaagacaagtaggagaacggacgttgaccggtacggtaatagacagtggagatggtgtcactcatgtcattcctgtggctgaagggtatgtgattggcagctgtattaaacacattccaatcgcaggacgagatataacatattttattcagcaactgctgagagaccgagaagtaggaatccctccagaacaatccttggaaactgctaaggcagtaaaggagcgctatagttatgtctgcccagatttagtaaaagaatttaacaagtatgatacagatgggtcaaaatggattaaacagtatactggaatcaatgctatctcaaagaaagagttttctatcgatgttggttatgagagatttttgggacctgaaatcttttttcatccagagtttgctaatccagactttacacaacctatctcagaagttgtagatgaagtaattcagaattgtcctattgatgtcagacgtcctctctacaagaatattgtcctctctggaggttcaaccatgttcagggactttggacgtcgcttgcaaagagatttgaaaagaactgtagatgcccggctgaaattaagtgaggaattgagtggtggtagattgaagccaaaacctattgatgtacaagtcattacacaccacatgcagcgatatgcagtttggtttggaggatcaatgctggcttccacgcctgagttctaccaagtatgccacaccaaaaaggattatgaagaaattggacctagcatttgtcgtcacaatccagtgtttggagtcatgtcgtaaaattggcttcatagttattggggttagggaggtggggaagagataatctttctgattacctgttttgtctggatggctggttttgaggttttaaacctgacttgaaatagtaacaccaaacatgattatacaggaatattttaataagtgtatcaccatgcagatgtagaagagagcgaaagtgattgtgtttttctttagattgaatatttgaatcttatgtgtaacaaaaagaagtgggttttagttctttctgtgccctgatattttgtatattaatgaattatccaagattcgatgggatttatcagtgtgtagatagctctataatgcttgaattgtacacttctaagtgtgcagtgcaagagcttgtttatattatcatactttttatacttttgaggaaacaaaagtcaaagaaaaattgtatttgagggaaaaaaacatgaccaagtaaaggataaattcaaaaaatagcctcatgagacttggcatacacactcgtgggattccagttattatggagtgcttccatccctctccaccccttccccccaaaaggttttctttgcaagtgcttttggaactaagagctagtatcttggattaactgatgcctgctagtgctttctgattactcgcattctgtttcttgctttaaaagaagagtaaagacaagagtgttggaccagtattgcagttctgtagtgtcatttcttataaaaaacaaaacaacaacaataatttatcaaaattggcatatttaaagcctaacattctaataaaggcacaaatttctttttaatacttgtttcagcctctttaatctctttataagttaactaataaatctattttcttcagacttctgcaatagttctttaaaatcacaacagttagcaagctgacttttgtaatgtgctcaatacaaatacttgtgaacttttaatatgttgagtgctttcattttgataactggatctccatttgatattttcatttgtataactcatttgcagtctgaaaattttttttagtgccagtccctgaacatatcattgaaagttaattttctttgcattttaaaatatctggattatgaagaaaaagtgatgaaaataaattaaaactgaattaccttttaaaaaa

SEQ ID NO: 68860 - DNA, 1138 bp, Homo Sapiens
gggactgcgataggaatcatgtctggtcgcggcaaaggcggaaaaggcttggggaagggtggtggggaagagataatctttctgattacctgttttgtctggatggctggttttgaggttttaaacctgacttgaaatagtaacaccaaacatgattatacaggaatattttaataagtgtatcaccatgcagatgtagaagagagcgaaagtgattgtgtttttctttagattgaatatttgaatcttatgtgtaacaaaaagaagtgggttttagttctttctgtgccctgatattttgtatattaatgaattatccaagattcgatgggatttatcagtgtgtagatagctctataatgcttgaattgtacacttctaagtgtgcagtgcaagagcttgtttatatttcatactttttatactttgaggaaaaaaaagtccaaaagaaaaattgtatttgagggaaaaaccatgaccaagtaaaggataaattcaaaaaatagcctcatgagacttggcatacacactcatgggattccagttattatggagtgcttccatccctctccaccccttccccccaaaaggttttctttgcaagtgcttttggaactaagagctagtatcttggattaactgatgcctgctagtgctttctgattactcgcattctgtttcttgctttaaaagaagagtaaagacaagagtgttggaccagtattgcagttctgtagtgtcatttcttataaaaaacaaaacaacaacaataatttatcaaaattggcatatttaaagcctaacattctaataaaggcacaaatttcttttctaatactgtgtgtcaagcctcttgaatctcttgataagttaactaataaatctatttcttcagaatttctgcaatagttctttaaaatcacaacagtaagcaagctggactttggtcaatgctcgcttccaatacatatacttggtgaacttttaaccatgttgcactggcttcaatttggaataactggatctccctttggatctacgtccatcgggataactcaattggccgtctgaaaattttttaggtgccgatcccgaccgtttcattgaacgtcaatttctttactgttagcaactccgg

SEQ ID NO: 68861 - DNA, 661 bp, Homo Sapiens
  misc_feature (97)..(97): n is a, c, g, or t
taaacccttccaatttattaatatctagtctaataaaccctgatttataggacctctgcaccttttttgactttttattcatccattcttaatattntacactatgacaaaatccttaaaactccattattgatgaaatgggaacagacttttgtttttgtatgttggtgttctctgagtggtgaaggcccagggagaatgttttgtttggtggtcacttagcatttgaaaacatccacttccttgtgacttagctgggtatcttttaacatctggaagccacgtccctgattgaaatctctggagacaacttacctttcaccaacttgtctgccaaattgcaccatggaccaagattgcagtggctgcatcaagtctaggcctgccctgaagtctggatttgtaagtcccccatttcaaatggggcagaaggcagaggagcagaggagccactgtgcctttcgctgtcctggagccagttggccttctggttttggtgaaccctgcttttataagaggactccctggcatcttccagtttcccgctacttgttttatgtattattttatgtctgtgtttgtcctggagtgctgtaactcctttcactgtctgctgtaagttcaacttcttcaataaaagaaatgtttcaaattggatgaa

SEQ ID NO: 68862 - DNA, 1353 bp, Homo Sapiens
  misc_feature (41)..(81): n is a, c, g, or t
  misc_feature (84)..(118): n is a, c, g, or t
agatgtatacatcaactatagggcggctagcctttcgcagnnnnnnnnnnnnnnnnnnnnnnnnnnnnnnnnnnnnnnnnncgnnnnnnnnnnnnnnnnnnnnnnnnnnnnnnnnnnncagtcgacggtaccggacatatgcccgggaattcggccattacggccgggagccatcgtaatcacatttctgtacctggaaaaaaaatgtatcttatttttgataatggctcttaaatctttaaacacacacacaaaatcgttctttactttcattttgattcttttaaatctgtctagttgtaagtctaatatgatgcattttaagatggagtccctccctcctacttccctcactccctttctcctttgcttatttttcctaccttcccttcctcttgtctccccactccctccctctttgtttccttccttccttatttcctttagtttccttccttagccgttttgagtggtgggaatcaatgctgtttcactcaaaagtgttgcatgcaaacacttctctttattctgcatttattgtgatttttggaaacaggtatcaaccttcacagttgggtgaacaagtgttgtcctacagatgtccaatttatttgcatttttaaacattagcctatgatagtaatttaatgtagaatgaagatattaaaaacagaagcaaattatttgaagctctctaatttgtggtacgatattgcttattgtgactttggcatgtatttttgctagcaaaatgctgtaagatttataccattgatcttttttgctatatttgtatacagtacagtaagcacaattggcactgtacatctaaaaatattacagtagaatctgagtgtaatatgtgtaaccaaaatgagaaagaatacaagaaatgtttctggagctagttatgtctcacaattttgtagaatcttacagcatctttgataaacttctcagtgaaaatgttggctaggcaagttcagttaaaatatagtagaaatgtttatcctggtatctctaagtatacatttaattgtacagaaaatttacagtgtaacattgtgtcaacatttgcagattgactgtatatgaccttaatctttgtgcagcctgaaggatcagtgtagtaatgccaggaaagtgctttttacctaagacttccttctcagcttctcccataaagagaccctaatatgcattttgatttgtaattggaaatgtaactttcactgaaagtgtcatgtgatgtttgcattacttttaactgctatgtataaaggaaagtgtgtcttttgacttcatcagttatttctcttgtgcacagagaaaaatgcattaaaaatgactaaa

SEQ ID NO: 68863 - DNA, 1645 bp, Homo Sapiens
  misc_feature (327)..(327): n is a, c, g, or t
  misc_feature (407)..(467): n is a, c, g, or t
cacatattacactcagattctactgtaatatttttagatgtacagtgccacattgtgcttactgtactgtatacaaatatacaaaaaagatcaatggtataaatcttacagcattttgctagcaaaaatacatgccacaagtcaccataagcatatcgtaccacaaattagagagcttcaaataatttgcttctgtttttaatatcttcattctacattaaattactatcataggctaatgtttaaaaatgcaaataaattggacatctgtaggacaacacttgttcacccaactgtgaaggttgatacctgtttccaaaaatcacnataaatgcagaataaagagaagtgtttgcatgcaacacttttgagtgaaacagcattgattcccaccactcaaacggctnnnnnnnnnnnnnnnnnnnnnnnnnnnnnnnnnnnnnnnnnnnnnnnnnnnnnnnnnnnnnaggagggagggactccatcttaaaatgcatcatattagacttacaactagacagatttaaaagaatcaaaatgaaagtaaagaacgattttgtgtgtgtgtttaaagatttaagagccattatcaaaaataagatacattttttttccaggtacagaaatgtgattacgatggctgggagcccagcagcctttcaatggctgcattgatgtcgcctcctgttgctattagggcctgcaagtttgcttcacggtttaagaaccccattgcgttgagctgttccagttgttgctgaaatctgacttctggattcggcagctgtggagcatttgctccagccagggcctgcaccatttgctgaatgaactgctggttgggtccagattctgatgtaggactcgtggtttcactaggtgcagcgctggacacagtaggccccgtggggccaccagagccggtggagccagggggggctgcagggccagtgggtcctatgggcccaatggggcctatgggggtaaaagggactatagggcctatggggcctatgggggtgactgggcctacagggcctatagcggttcccagcacccccacccccacacctggagtgaagctcggaatcaggccaggtgcttcagtggctaatgtctgtagcccctgctggatctgcattaaagcctgcattgctcttgggtttgacatggctgatagtgtgtctggattctgcatctgctgcaggaaggctgggagctgtggccgcatctgctcctgcagctgaggatttgcagtaaacagcgggctattcagcatcatctgtgcagccaaatctggattctggctcagcgactgcatcatgcttctcatgtagggcgccgacagcatattctgaatcagctgggggttttcagttatctgttgcagcaggctctgcatgcctggggtactaaagatgctggcgacataattagcggcagcaacggtgttcccagtagcattgctggaactattgccagacccactaccagtgcttgtggtcgtgctggtagttgcagaactctgggtagctggcggtggtgcccatggattgggtagtggatcgcgattttcttgtgcgggaaggctgcgtaccttccccagaggaggaactactccccacggaggccaaatggattaccc

SEQ ID NO: 68864 - DNA, 993 bp, Homo Sapiens
  misc_feature (42)..(76): n is a, c, g, or t
acgacagagcgcagcgacgtcattgagcgaggaagcggccgnnnnnnnnnnnnnnnnnnnnnnnnnnnnnnnnnnncagtcgacggtaccggacatatgcccgggaattcggccattacggccaggatcaatcccgaggctgctgagagacggtggcgcgattgggacagtcgccagggatggctgagcgtgaagatgcagcgggtgtccgggctgctctcctggacgctgagcagagtcctgtggctctccggcctctctgagccgggagctgcccggcagccccggatcatggaagagaaagcgctagaggtttatgatttgattagaactatccgggacccagaaaagcccaatactttagaagaactggaagtggtctcggaaagttgtgtggaagttcaggagataaatgaagaagaatatctggttattatcaggttcacgccaacagtacctcattgctctttggcgactcttattgttggaaatctacatttctgaaggaacccactcaacagaagaagacatcaataagcagataaatgacaaagagcgagtggcagctgcaatggaaaaccccaacttacgggaaattgtggaacagtgtgtccttgaacctgactgatagctgttttaagagccactggcctgtaattgtttgatatatttgtttaaactctttgtataatgtcagagactcatgtttaatacataggtgatttgtacctcagagcattttttaaaggattctttccaagcgagatttaattataaggtagtacctaatttgttcaatgtataacattctcaggatttgtaacacttaaatgatcagacagaataatattttctagttattatgtgtaagatgagtcgctaatttcctgatgctcattctgatacaactatttttcgtgtcaaatatctactgtgcccaaatgtactcaatttaaatcattactctgtaaaataaataagcagatgattctt

SEQ ID NO: 68865 - DNA, 772 bp, Homo Sapiens
gggccccggatcatggaagagaaagcgctagaggtttatgatttgattagaactatcccgggacccagaaaagcccaatactttaggaagaactggaagtggtctcggaaaagttgtgtggaagttcaggagataaatgaagaagaatatctggttattatcaggttcacgccaacagtacctcattgctctttggcgactcttattgggctgtgcttaagagtaaaacttcagcgatgtttaccatttaaacataagttggaaatctacatttctgaaggaacccactcaacagaagaagacatcaataagcagataaatgacaaagagcgagtggcagctgcaatggaaaaccccaacttacgggaaattgtggaacagtgtgtccttgaacctgactgatagctgttttaagagccactggcctgtaattgtttgatatatttgtttaaactctttgtataatgtcagagactcatgtttaatacataggtgatttgtacctcagagcattttttaaaggattctttccaagcgagatttaattataaggtagtacctaatttgttcaatgtataacattctcaggatttgtaacacttaaatgatcagacagaataatattttctagttattatgtgtaagatgagttgctatttttctgatgctcattctgatacaactatttttcgtgtcaaatatctactgtgcccaaatgtactcaatttaaatcattactctgtaaaataaataagcagatgattcttaaaaa

SEQ ID NO: 68866 - DNA, 919 bp, Homo Sapiens
ggggccttttctctgctctcctgaacctttaggcttgtctcggcccatttgaagaccaggaagttgatcaatcccgaggctgctgagagacggtggcgcgattgggacagtcgccagggatggctgagcgtgaagatgcagcgggtgtccgggctgctctcctggacgctgagcagagtcctgtggctctccggcctctctgagccgggagctgcccggcagccccggatcatggaagagaaagcgctagaggtttatgatttgattagaactatccgggacccagaaaagcccaatactttagaagaactggaagtggtctcggaaagttgtgtggaagttcaggagataaatgaagaagaatatctggttattatcaggttcacgccaacagtacctcattgctctttggcgactcttattgggctgtgcttaagagtaaaacttcagcgatgtttaccatttaaacataagttggaaatctacatttctgaaggaacccactcaacagaagaagacatcaataagcagataaatgacaaagagcgagtggcagctgcaatggaaaaccccaacttacgggaaattgtggaacagtgtgtccttgaacctgactgatagctgttttaagagccactggcctgtaattgtttgatatatttgtttaaactctttgtataatgtcaaagactcatgtttaatacataggtgatttgtacctcagagcattttttcaaaggattctttccaagcgagatttaattataagggtagtacctaatttggttcaatggataaccattcctcagggatttgtaaccccttaaatgaaccggaccggaataatatttttcctagtttattatgggggaaagaatgaagttgcctatttttttctggaaggctcccattccggaaa

SEQ ID NO: 68867 - DNA, 936 bp, Homo Sapiens
  misc_feature (373)..(660): n is a, c, g, or t
gcccgccacgttctcagttgctcaattcatcaacaaaccagcagggcccaatttaaattagaggtcattgttaatgaaagaagtaatagcaaagaaggtctccagtgctgaaatgattttcacaggatggttctgtatcttcccagtagccagggagccctttgtctgcccactgttgcctggcacgcagagcctgtccgaacactcatggcaatgaagatggcccgatttggatcctgggtggcctttcagacagtgtgagttcagactggtcttagggcacccataccaggttgctgggaggggcaaaactactcttttttaaaggtaatagaaccttctggagcttgctatcctctgtgaaataatttannnnnnnnnnnnnnnnnnnnnnnnnnnnnnnnnnnnnnnnnnnnnnnnnnnnnnnnnnnnnnnnnnnnnnnnnnnnnnnnnnnnnnnnnnnnnnnnnnnnnnnnnnnnnnnnnnnnnnnnnnnnnnnnnnnnnnnnnnnnnnnnnnnnnnnnnnnnnnnnnnnnnnnnnnnnnnnnnnnnnnnnnnnnnnnnnnnnnnnnnnnnnnnnnnnnnnnnnnnnnnnnnnnnnnnnnnnnnnnnnnnnnnnnnnnnnnnnnnnnnnnnnnnnnnnnnnnnnnnnnnnnnnnnccagtgaaatcaatttctaatgtgcagtcacagccataactgtgtccatgtcttctccttcaccaagggggcgtgtggctctttgggcaccagttctgccttccctagcccatgtctccttgtgctcatgtaggcccctggcccacggctgatcttctttggctcagctgcttggcctccacgcctctagtcctcgctctcagcatgtgggaaggttctgcctggctcctttcaggcctcgtgccgaattcgaccacccagcctcgtacctagccc

SEQ ID NO: 68868 - DNA, 1125 bp, Homo Sapiens
gctaggtagagcctgggtgttaattcggcacgagggggtagggcttcgctttaccgtctcctcctggcgcttgtcctcctctcccagtcggcaccacagcggtggctgccgggcgtggtgtcggtgggtcggttggtttttgtctcaccgttggtgtccgtgccgttcagttgcccgccatggctgagctggatccgttcggcgcccctgccggcgcccctggcggtcccgcgctggggaacggagtggccggcgccggcgaagaagacccggctgcggccttcttggcgcagcaagagagcgagattgcgggcatcgagaacgacgaggccttcgccatcctggacggcggcgcccccgggccccagccgcacggcgagccgccggggggtccggatgctgttgatggagtaatgaatggtgaatactaccaggaaagtaatggtccaacagacagttatgcagctatttcacaagtggatcgattgcagtcagagcctgaaagtatccgtaaatggagagaagaacaaatggaacgcttggaagcccttgatgccaattctcggaagcaagaagcagagtggaaagaaaaggcaataaaggagctagaagaatggtatgcaagacaggacgagcagctacagaaaacaaaagcaaacaacagggcagcagaagaagcctttgtaaatgacattgacgagtcgtccccaggcactgagtgggaacgggtggcccggctgtgtgactttaaccccaagtctagcaagcaggccaaagatgtctcccgcatgcgctcagtcctcatctccctcaagcaggccccgctggtgcactgaagagccaccctgtggaaacactacatctgcaatatcttaatcctactcagtgaagctcttcacagtcattggattaattatgttgagttcttttggaccaaacctttttgtctttagagttgttcattgtttgtgattgcatgtttccttccttcaactgtgttctccctggcattcagagaggagggagaggaggaagaggaaggggagggaagcttcccaagagtagcctcaacctgtgcttctgtgcattattctgagaataaatttctgtttcaaactgtaaaaa

SEQ ID NO: 68869 - DNA, 931 bp, Homo Sapiens
  misc_feature (888)..(888): n is a, c, g, or t
  misc_feature (919)..(919): n is a, c, g, or t
gctatacgggcatagggtcgacggccctgggtgtattggacgagggtctccctcctggcgcttgtcctcctctcccagtcggcaccacagcggtggctgccgggcgtggtgtcggtgggtcggttggtttttgtctcaccgttggtgtccgtgccgttcagttgcccgccatggctgagctggatccgttcggcgcccctgccggcgcccctggcggtcccgcgctggggaacggagtggccggcgccggcgaagaagacccggctgcggccttcttggcgcagcaagagagcgagattgcgggcatcgagaacgacgaggccttcgccatcctggacggcggcgcccccgggccccagccgcacggcgagccgccggggggtccggatgctgttgatggagtaatgaatggtgaatactaccaggaaagtaatggtccaacagacagttatgcagctatttcacaagtggatcgattgcagtcagagcctgaaagtatccgtaaatggagagaagaacaaatggaacgcttggaagcccttgatgccaattctcggaagcaagaagcagagtggaaagaaaaggcaataaaggagctagaagaatggtatgcaagacaggacgagcagctacagaaaacaaaagcaaacaacagggcagcagaagaagcctttgtaaatgacattgacgagtcgtccccaggcactgagtgggaacgggtggcccggctgtgtgactttaaccccaagtctagcaagcaggccaaagatgtctcccgcatgcgctcagtcctcatctccctcaagcaggccccgctggtgcactgaagagcaccctgtggaaacactacatctgcaatatcttaatccctactcagtgaagctcttncacaagtcattgggatttaaattatggttgnaggttcctttta

SEQ ID NO: 68870 - DNA, 1006 bp, Homo Sapiens
  misc_feature (57)..(57): n is a, c, g, or t
  misc_feature (77)..(77): n is a, c, g, or t
  misc_feature (79)..(79): n is a, c, g, or t
  misc_feature (88)..(88): n is a, c, g, or t
  misc_feature (114)..(114): n is a, c, g, or t
  misc_feature (121)..(121): n is a, c, g, or t
  misc_feature (138)..(138): n is a, c, g, or t
  misc_feature (162)..(162): n is a, c, g, or t
  misc_feature (171)..(171): n is a, c, g, or t
  misc_feature (243)..(243): n is a, c, g, or t
tctttctccgctcgttttgttggatgtggcgaaacaatcacaccagaacagtttgcntgataggattatacgactcntntagggattngcctcgagccagaaatcgcacgagtnaaagtcntaatgctctgtatcttntcagaatctccatctctatgacancagcccatntagtttctggagatagcatctgagaaagccaaagtcctcagttacagacagtcactcacagagcagaccacntattcaccagatctaaccactcacacttgaagagccaaactgagcccagaagaatgcccggctgagcccagcctaaatttctaaccagctcaatcctgagctagtatgtttcgggagtgttatgcagttataagttagtaatatatacacccattaaagacaggatctcaggacagattgatcacaaataacctgcaaatgcttgccaccctgtaagtattgattttcttttttcctttatttaaagttagatttgttgtaagatgatattgagttacacagaagttaggcaggagaatagggtttggaggcagggaacttaaggccaattcgtgctgacttcctacaagaaaaaacaccaaggtctgggagcagggaacctaaagccagttaacgtgaacttcctacatctaaaccaaaaggaaaaacctcatctacacccgagtagcaaaggatcgaaagcgactgtcgctacaaccctcccccttgtaccagttctctgatagaaaaggacagtgccttggagtggccgtgggccaagcacaggccatgccttcatctgcatagggtaccaattcgcctcaacctttgattagccaaggaccaaatccttcattcagataaggggtagctgataggaacctcaaaaggagtacttaaaacccagaaaacattgtaaccgggtccttgggcggcttgctggggctcacacccaccctgtagagtgctttctcactttaataaaatcttgcttttgctattc

SEQ ID NO: 68871 - DNA, 526 bp, Homo Sapiens
ttaaagttaaatttgttgtaagatggtattgacttatatagaagtgaggcaagagaatagggtctggaggcagggaacttaaggccaattcgtgctgaattcctaaagaagaaacaccaaggtctgggagcagggaacctaaggccaattaacgtgaacttcctacatctaaaccaaaaggaaaacctcatctacacctgagtagcaaaggatcaaaggtgactgttgctacaaccctctcctttgcaccagttctctgatagaaaaggagagtgacttggagtggccgtgggccaagcacaggccatgccttcatctgcatggggtaccaattcacctcagcctttgattagccacggaccaaatctttcatccagataaggggtagctgatagggacctcaaaaggagtacttaaaacccagataactttgtaaccgggtccttgagctgcttgctggggctcacacccatcccgtggagtgctttcttgctttaataaacccctgcttttgctgtttcaaaaa

SEQ ID NO: 68872 - DNA, 1400 bp, Homo Sapiens
  misc_feature (1214)..(1261): n is a, c, g, or t
cagtcgacggtaccggacatatgcccgggaattcggccattacggccgggggacggacgcttcggccgtaacgatgatcggagacatcctgctgttcgggacgttgctgatgaatgccggggcggtgctgaactttaagctgaaaaagaaggacacgcagggctttggggaggagtccagggagcccagcacaggtgacaacatccgggaattcttgctgagcctcagatactttcgaatcttcatcgccctgtggaacatcttcatgatgttctgcatgattgtgctgttcggctcttgaatcccagcgatgaaaccaggaactcactttcccgggatgccgagtctccattcctccattcctgatgacttcaagaatgtttttgaccagaaaaccgacaaccttcccagaaagtccaagctcgtggtgggtggaaaagtgttcgccgaggtgtgcatggtttcccagccacgtccctgttttcaaagatagtttcactttggtctctgaattgaaatgctgtctactgaaagggtttcaggagcgtttatgtaaggggctgtgatgaaattgcattccccatagataaaagaaaaatcatttctatccagagatctgagcagaaggattggcttgttagtttaacacagccgtatttttggacattcagtgttacttgctgagtctgacagcctctgggcccggccaggggccctgttaacaaactgctttcacatcccaacagggtctgcttggccactcagtgcagctgcgattaaccctaaaggctttaaggaacgggccacctgtaacagagacaccagccttcctgtatagacactaaattgttagcaagagtgttgagctagttcctggtgaagtgtttccacagaagacatgtggagcagttgtggggatattaagggaaactttcctctgccttgacccctttgttaaataaaatgactttgggagccattcattgtacagttgcaggaatgagagtgattttatgatgtggtacattgggaccatgttctaaaaccttgggtttctgagtctgctttttgagtaggtgattttgaggttgaaaaaccaggggccttcatctaggaaatacagcattttccagaagcttctttgaaagggaatcctggttttgttgccaaaatgaaacgcccggggttggcgctgaatcccacaactgtgtgannnnnnnnnnnnnnnnnnnnnnnnnnnnnnnnnnnnnnnnnnnnnnnntaccaataagaatgagcctgaatgttggtggtttttgaaatcctgacttggaggtaaacctggaggaaggaaaaaaagtaaatatgcaggcttttaggactgagtagccttgaaaataaacctcatttctaaaaaggaa

SEQ ID NO: 68873 - DNA, 833 bp, Homo Sapiens
cagtcgacggtaccggacatatgcccgggaattcggccattacggccgggggacggacgcttcggccgtaacgatgatcggagacatcctgctgttcgggacgttgctgatgaatgccggggcggtgctgaactttaagctgaaaaagaaggacacgcagggctttggggaggagtccagggagcccagcacaggtgacaacatccgggaattcttgctgagcctcagatactttcgaatcttcatcgccctgtggaacatcttcatgatgttctgcatgattgtgctgttcggctcttgaatcccagcgatgaaaccaggaactcactttcccgggatgccgagtctccattcctccattcctgatgacttcaagaatgtttttgaccagaaaaccgacaaccttcccagaaagtccaagctcgtggtgggtggaaaagtgttcgccgagggtctgcttggccactcagtgcagctgcgattaaccctaaaggctttaaggaacgggccacctgtaacagagacaccagccttcctgtatagacactaaattgttagcaagagtgttgagctagttcctggtgaagtgtttccacagaagacatgtggagcagttgtggggatattaagggaaactttcctctgccttgacccctttgttaaataaaatgactttgggagcccatcccattgtacagttgcaggaatgagagtgatttccatgatgtggtcactcgggacctgttcttaaaaccttgggttacctgagtctggctttgagtaagtcgaatctcgaaggttgaaaaaccagggcttcatctaggaaataaagc

SEQ ID NO: 68874 - DNA, 1090 bp, Homo Sapiens
  misc_feature (125)..(125): n is a, c, g, or t
  misc_feature (671)..(738): n is a, c, g, or t
cggacgcttcggccgtaacgatgatcggagacatcctgctgtcgggacgtgctgatgaatgccggggcggtgctgaactttaagctgaaaaagaaggacacgcaggtctttggggaggagtccanggagcccagcacaggtgacaacatccgggaattcttgctgagcctcagatactttcgaatcttcatcgccctgtggaacatcttcatgatgttctgcatgattgtgctgttcggctcttgaatcccagcgatgaaaccaggaactcactttcccgggatgccgagtctccattcctccattcctgatgacttcaagaatgtttttgaccagaaaaccgacaaccttcccagaaagtccaagctcgtggggcttgcttctgacatgtctgatgagcgcattcctgctgttgctcctggctattacaaggtgtcgctgtggaagactattcctgtacagctgtgtgaacctgcctcgtcacggcttcctctgcagtgctcttgaatatcccggttcctgcttaggccacagcagtgagtccagggagaagcatccttctactccctcactgtccaggttggctgaagatgctctgcacttgacctcctgacactaacttccttgccttttcccatggcaagagcaagtcatggactctgaactacttnnnnnnnnnnnnnnnnnnnnnnnnnnnnnnnnnnnnnnnnnnnnnnnnnnnnnnnnnnnnnnnnnnnncccttcctctccctttctctttggggttcccttcacaaacaggtgaggcagctttttcaagggcattccaagcacaaaagaccttgttgtacctaaatactataagggacctgtcattgaggacgaaccatcacagcaagaggaattatctcgtgccgcatcttcgcataactgacaggatccctggcaaggatgtctcaatgcagaaagttggctaagtgaactgcagtatctaccctggacctaaaagaacttgctaatgttttcaagactacaattcagaggctgtctgatttaatctttgcatttacaaaaacacccttttacgtacattaaatgtggaataaaacta

SEQ ID NO: 68875 - DNA, 853 bp, Homo Sapiens
ggggcttccggttctgacggacgcttcggccgtaacgatgatcggagacatcctgctgttcgggacgttgctgatgaatgccggggcggtgctgaactttaagctgaaaaagaaggacacgcagggctttggggaggagtccagggagcccagcacaggtgacaacatccgggaattcttgctgagcctcagatactttcgaatcttcatcgccctgtggaacatcttcatgatgttctgcatgattgtgctgttcggctcttgaatcccagcgatgaaaccaggaactcactttcccgggatgccgagtctccattcctccattcctgatgacttcaagaatgtttttgaccagaaaaccgacaaccttcccagaaagtccaagctcgtggtgggtggaaaagtgttcgccgaggtgtgcatggtttcccagccacgtccctgttttcaaagatagtttcactttggtctctgaattgaaatgctgtctactgaaagggtttcaggagcgtttatgtaaggcgctgtgatgaaattgcattccccatagataaaagaaaaatcatttctatccagagatctgagcagaaggattggcttgctagttaaacacagccgtaattttttggacattcagtggttactttgctgaagtctgaaagccctctggggccccggcccaggggccctggtaacaaactggctttcacatcccaacaagggcctgccttggccacctcatggcccgctgccaattaacccttaaaggcttttaagggaacggggccaccctggtaaacgagagacaccccgccctttcccggtaataacaccctaaaattggtctaatcca

SEQ ID NO: 68876 - DNA, 939 bp, Homo Sapiens
  misc_feature (216)..(225): n is a, c, g, or t
  misc_feature (514)..(522): n is a, c, g, or t
ccgggatatcgtcgacccacgcgtccgctcccaggaacagccttatagagagagggagtatgtattgggaagaaaatgttactgaagctattgactgaaagtaaatttagataaaatacagacttttttccttatgggcatttgtttgtttcaagtcatcataaactaggtattgcattgctatccgtggatacagacgcttagctcttaaaagannnnnnnnnnatgtaaactgttgaatatttgaaatagtccacttcaccttaatgggtcttgtctatcttcattagtcttcaaagaaaaaccatttgctaccaaagtaaatcagtattttgaatgtgcttctctatgtttttggtttattagctagttcctgtaagcatttccaccagaacttgaggcaaatcgtaaggaagctgtttcttttaaaacacaaaccaccaccaaaaatttaaatgtacatattgcttaagtatttggctgtttcttattttttaaacaggtataaacaccnnnnnnnnntttaacattgtttgacgatggaaaataagaagatgcactttctgtaaccttggtctaaggatttaaattactaaccttatgaactccaatttgaattgaaccttaactatcggctttcttactggtaaaacttatatggttcattttaaatgcgtactttttgaccaatggcctctgaaaaagcacattttagatactgaacattgacaggaaccgacattgcttcttcaaacatttcttgggaatctcaccacattatacttggtcagcatcggggtactcgacaggcgttcgcaggaatcagcgatccgtactattgaacttttttccacattgtgacagttaaacacattctttaaaaggcttatgtcacagacaaaagcttaccgtataacaatttcccttgaaaactcctaa

SEQ ID NO: 68877 - DNA, 376 bp, Homo Sapiens
aaaagattgagtggtacactaataaatgagagtttgaaattagaggtaatttatgttttatatacagatttcaagacatttgctaattttgtagtttcatgtgattagtttccaaaggttacagataataaagaaatcagaaatggtacctttttaagaattgcatatttttttagacacaactattagcacattaagagggaagcaaagttactgtctatttaaaactgcaagcagttaactctcttaactcccttattacctaaacttgtctggctcccaggaacagccttatagagagagggagtattgtattgggaagaaaatgttactgaactattgactgaaagtaaatttagataaaatacaaaaaaaa

SEQ ID NO: 68878 - DNA, 1292 bp, Homo Sapiens
ggagacgccgcgctcagcttccatcgctgggcggtcaacaagtgcgggcctggctcagcgcgggggggcgcggagaccgcgaggcgaccgggagcggctgggttcccggctgcgcgcccttcggccaggccgggagccgcgccagtcggagcccccggcccagcgtggtccgcctccctctcggcgtccacctgcccggagtactgccagcgggcatgaccgacccaccaggggcgccgccgccggcgctcgcaggccgcggatgaagaagaaaacccggcgccgctcgacccggagcgaggagttgacccggagcgaggagttgaccctgagtgaggaagcgacctggagtgaagaggcgacccagagtgaggaggcgacccagggcgaagagatgaatcggagccaggaggtgacccgggacgaggagtcgacccggagcgaggaggtgaccagggaggaaatggcggcagctgggctcaccgtgactgtcacccacagcaatgagaagcacgaccttcatgttacctcccagcagggcagcagtgaaccagttgtccaagacctggcccaggttgttgaagaggtcataggggttccacagtcttttcagaaactcatatttaagggaaaatctctgaaggaaatggaaacaccgttgtcagcacttggaatacaagatggttgccgggtcatgttaattgggaaaaagaacagtccacaggaagaggttgaactaaagaagttgaaacatttggagaagtctgtggagaagatagctgaccagctggaagagttgaataaagagcttactggaatccagcagggttttctgcccaaggatttgcaagctgaagctctctgcaaacttgataggagagtaaaagccacaatagagcagtttatgaagatcttggaggagattgacacactgatcctgccagaaaatttcaaagacagtagattgaaaaggaaaggcttggtaaaaaaggttcaggcattcctagccgagtgtgacacagtggagcagaacatctgccaggagactgagcggctgcagtctacaaactttgccctggccgagtgaggtgtagcagaaaaaggctgtgctgccctgaagaatggcgccaccagctctgccgtctctggagcggaatttacctgatttcttcagggctgctgggggcaactggccatttgccaattttcctactctcacactggttctcaatgaaaaatagtgtctttgtgattttgagtaaagctcctatctgttttctccttcaaaaaaa

SEQ ID NO: 68879 - DNA, 800 bp, Homo Sapiens
  misc_feature (87)..(121): n is a, c, g, or t
caaagaacatgtatagactactatagggcgctcactcgtcgcagccgaacgacgagcgcagcgaagtagtgagcgaggaagcggcgnnnnnnnnnnnnnnnnnnnnnnnnnnnnnnnnnnncagtcgacggtaccggacatatgcccgggaattcggccattacggccggggggccaggccggagcgaggcagcgcgcccggctcccgcgccatggggcggctggtggctgtgggcttgctggggatcgcgctggcgcatcctgggcgagaggcttctggcactcagaaatcgacttaaagcctccagagaagtagaatctgtagaccttccacactgccacctgattaaaggaattgaagctggctctgaagatattgacatacttcccaagtggtctggctttttttagtgtggtgagtgtcttcttccttccccaaattcagcagaggagatacaagggtattctgagtgagggctgctagaacaggtctaacaattcccaggactccacagctttgcaccagataagcctggaggaatactaatgatggatctaaaagaagaaaaaccaagggcacgggaattaagaatcagtcgtgggtttgatttggcctcattcaatgccacatggcatcagcactttcatagacaacgatgacacagtttatctctttgtgtgtaaatccacccagaattcaagaatacgaggggaaatttttaacatttgaacgaagcagaacaattctctgttgcatctgaaaacagtcaaacatgaggcttcttccaaagtgtgaatga

SEQ ID NO: 68880 - DNA, 1240 bp, Homo Sapiens
gctggccaggccggagcgaggcagcgcgcccggctcccgcgccatggggcggctggtggctgtgggcttgctggggatcgcgctggcgctcctgggcgagaggcttctggcactcagaaatcgacttaaagcctccagagaagtagaatctgtagaccttccacactgccacctgattaaaggaattgaagctggctctgaagatattgacatacttcccaatggtctggctttttttagtgtgggtctaaaattcccaggactccacagctttgcaccagataagcctggaggaatactaatgatggatctaaaagaagaaaaaccaagggcacgggaattaagaatcagtcgtgggtttgatttggcctcattcaatccacatggcatcagcactttcatagacaacgatgacacagtttatctctttgttgtaaaccacccagaattcaagaatacagtggaaatttttaaatttgaagaagcagaaaattctctgttgcatctgaaaacagtcaaacatgagcttcttccaagtgtgaatgacatcacagctgttggaccggcacatttctatgccacaaatgaccactacttctctgatcctttcttaaagtatttagaaacatacttgaacttacactgggcaaatgttgtttactacagtccaaatgaagttaaagtggtagcagaaggatttgattcagcaaatgggatcaatatttcacctgatgataagtatatctatgttgctgacatattggctcatgaaattcatgtttgggaaaaacacactaatatgaatttaactcagttgaaggtacttgagctggatacactggtggataatttatctattgatccttcctcgggggacatctgggtaggctgtcatcctaatggccagaagctcttcgtgtatgacccgaacaatcctccctcgtcagaggttctccgcatccagaacattctatctgagaagcctacagtgactacagtttatgccaacaatgggtctgttctccaaggaagttctgtagcctcagtgtatgatgggaaggtgtcattacgcactttatacaagagcttgtgtggggactctaattgactttggtggaaggcgataattacattaatttatgaattgtattgggggattaacgcattgccaaagtgggggtgtaaatcaaagaagggtgtttaggttaaaagaagaggttagcagggaaaaaggaaaaaa

SEQ ID NO: 68881 - DNA, 1318 bp, Homo Sapiens
cagtcgacggtaccggacatatgcccgggaattcggccattacggccgggagaaaattctctgttgcatctgaaaacagtcaaacatgagcttcttccaagtgtgaatgacatcacagctgtaggaccggcacatttctatgccacaaatgaccactacttctctgatcctttcttaaagtatttagaaacatacttgaacttacactgggcaaatgttgtttactacagtccaaatgaagttaaagtggtagcagaaggatttgattcagcaaatgggatcaatatttcacctgatgataagtatatctatgttgctgacatattggctcatgaaattcatgttttggaaaaacacactaatatgaatttaactcagttgaagattttgacaatttctcatttggaaggtacttgagctggatacactggtggataatttatctattgatccttcctcgggggacatctgggtaggctgtcatcctaatggccagaagctcttcgtgtatgacccgaacaatcctccctcgtcagaggttctccgcatccagaacattctatctgagaagcctacagtgactacagtttatgccaacaatgggtctgttctccaaggaagttctgtagcctcagtgtatgatgggaagctgctcataggcactttataccacagagccttgtattgtgaactctaaattgtacttttggcatgaaagtgcgataacttaacaattaattttctatgaattgctaattctgagggaatttaaccagcaacattgacccagaaatgtatggcatgtgtagttaattttattccagtaaggaacggcccttttagttcttagagcacttttaacaaaaaaggaaaatgaacaggttctttaaaatgccaagcaagggacagaaaagaaagctgctttcgaataaagtgaatacattttgcacaaagtaagcctcacctttgccttccaactgccagaacatggattccactgaaatagagtgaattatatttccttaaaatgtgagtgacctcacttctggcactgtgactactatggctgtttagaactactgataacgtattttgatgttttgtacttacatctttgtttaccattaaaaagttggagttatattaaagactaactaaaatcccaaaagaatacaccacacgacggcaacagcacaccgccagacgcgccagcacgcgctctgcgcaacgcgcgctccgcccactccgtgcgacgtcgcgggctggctcactgtggcaccgaccccaggtccccctcaccacaggcgcccctcaccgg

SEQ ID NO: 68882 - DNA, 467 bp, Homo Sapiens
cagaggcgaggaaggggaaggtcgtttccttggcaggccctcatcaaatacccttgtatctcctctgctgaatttggggaaggaagaagacactcaccacactaaaaaaagccagaccattgggaagtatgtcaatatcttcagagccagcttctagtgaagactattggaggctttggaaaagttaagcaattgctcaaggtcacaaactgggaagctgggactcaaagcctttgctctgacttaaaggcaaacagaaaatattcaagttagaatttaatgaatttcctctctcagaaacatcccctgattcctctgtaaagccacttcacttgtaaattcaattgtggtcaattccatatgttgtctttttcccctgaagttttgcttccaagcctctcaccaacatctttaccaatgaatatcctgcacttttctttaaaacctctttcaaaaccttttctgtc

SEQ ID NO: 68883 - DNA, 651 bp, Homo Sapiens
  misc_feature (153)..(175): n is a, c, g, or t
  misc_feature (248)..(283): n is a, c, g, or t
aaggggtgctttaatagaggctagcttctgcttttctgccctggctgctgcccccaccccggggaccctgtgacatggtgcctgagaggcaggcatagaggcttctccgccagcctcctctggacggcaggctcactgccaggccagcctccnnnnnnnnnnnnnnnnnnnnnnngacagcttgagccgggcccctgggcttggcctgctgtgattccactacacctggctgaggttcctctgcctgnnnnnnnnnnnnnnnnnnnnnnnnnnnnnnnnnnnngggtgagtccattctcccaggtaccagctgcgcttgcttttctgtattttatttagacaagagatgggaatgaggtgggaggtggaagaagggagaagaaaggtgagtttgagctgccttccctagctttagaccctgggtgggctctgtgcagtcactggaggttgaagccaagtggggtgctgggaggagggagagggaggtcactggaaaggggagagcctgctggcacccaccgtggaggaggaaggcaagagggggtggaggggtgtggcagtggttttggcaaacgctaaagagcccttgcctccccatttcccatctgcaccccttctctcctccccaaaatcaatacactagttgtttct

SEQ ID NO: 68884 - DNA, 494 bp, Homo Sapiens
tctgcttgccccgcccccagtcccaacccttgcccccagccccggggtgagtccattctcccaggtacccaagtgcgcttgcttttctgtattttatttagacaagagatgggaatgaggtgggaggtggaagaagggagaagaaaggtgagtttgagctgccttccctagctttagaccctgggtgggctctgtgcagtcactggaggttgaagccaagtggggtgctgggaggagggagagggaggtcactggaaaggggagagcctgctggcacccaccgtggaggaggaaggcaagagggggtggaggggtgtggcagtggttttggcaaacgctaaagagcccttgcctccccatttcccatctgcaccccttctctcctccccaaatcaatacactagttgtttctacccctggctgctgtggtgtctttgttggtggacgtcgctgtgtgtactgaggtgcagactctgtgggcatgcgcgcgctgt

SEQ ID NO: 68885 - DNA, 829 bp, Homo Sapiens
  misc_feature (369)..(403): n is a, c, g, or t
  misc_feature (476)..(498): n is a, c, g, or t
  misc_feature (764)..(777): n is a, c, g, or t
agaaacaactagtgtattgatttggggaggagagaaggggtgcagatgggaaatggggaggcaagggctctttagcgtttgccaaaaccactgccacacccctccaccccctcttgccttcctcctccacggtgggtgccagcaggctctcccctttccagtgacctccctctccctcctcccagcaccccacttggcttcaacctccagtgactgcacagagcccacccagggtctaaagctagggaaggcagctcaaactcacctttcttctcccttcttccacctcccacctcattcccatctcttgtctaaataaaatacagaaaagcaagcgcagctggtacctgggagaatggactcaccccnnnnnnnnnnnnnnnnnnnnnnnnnnnnnnnnnnncaggcagaggaacctcagccaggtgtagtggaatcacagcaggccaagcccaggggcccggctcaagctgtcnnnnnnnnnnnnnnnnnnnnnnnggaggctggcctggcagtgagcctgccgtccagaggaggctggcggagaagcctctatgcctgcctctcaggcaccatgtcacagggtccccggggtgggggcagcagccagggcagaaaagcagaagctagcctctataaaagcacccctttcccttggcttctagaggaagccctctttggttttaaggcagatgtggagtttcctggaagcagggaaaaggaagggaggagaaattaggattgagatagatgagatagatgcnnnnnnnnnnnnnngcttgtgtttttccttcagtataaaaccactgtagaaaataacttctcttag

SEQ ID NO: 68886 - DNA, 917 bp, Homo Sapiens
  misc_feature (61)..(83): n is a, c, g, or t
  misc_feature (559)..(581): n is a, c, g, or t
  misc_feature (847)..(865): n is a, c, g, or t
gtgccaagctaaaattaaccctcactacaagggaataagcttgcggccgcatacgcggtcnnnnnnnnnnnnnnnnnnnnnnnagaaacaactagtgtattgatttggggaggagagaaggggtgcagatgggaaatggggaggcaagggctctttagcgtttgccaaaaccactgccacacccctccaccccctcttgccttcctcctccacggtgggtgccagcaggctctcccctttccagtgacctccctctccctcctcccagcaccccacttggcttcaacctccagtgactgcacagagcccacccagggtctaaagctagggaaggcagctcaaactcacctttcttctcccttcttccacctcccacctcattcccatctcttgtctaaataaaatacagaaaagcaagcgcagctggtacctgggagaatggactcacccccggctggggcacgggttgcagactgcctggcggggcaggcagaggaacctcagccaggtgtagtggaatcacagcaggccaagcccaggggcccggctcaagctgtcnnnnnnnnnnnnnnnnnnnnnnnggaggctggcctggcagtgagcctgccgtccagaggaggctggcggagaagcctctatgcctgcctctcaggcaccatgtcacagggtccccggggtgggggcagcagccagggcagaaaagcagaagctagcctctataaaagcacccctttcccttggcttctagaggaagccctctttggttttaaggcagatgtggagtttcctggaagcagggaaaaggaagggaggagaaattaggattgagatagatgagatagatgcnnnnnnnnnnnnnnnnnnngcttgtgtttttccttcagtataaaaccactgtagaaaataacttctcttag

SEQ ID NO: 68887 - DNA, 708 bp, Homo Sapiens
acttccaaaaataacagtaatcagcatcatatgtacatgtccgtgtcctcatatgtagtaattaagattacatgagccactgtattaagtatcacccacttgaggaaatacaaagcaagagaagaaaacctatttaagaattgggtttatataacagtggtgttgtcatttttgtaaactgctctccattcatgccaaattatagagcagcttcggaacaattatatcattaaatttacgttttgtgtgatttcagtactgaatgcccttttcttaactttcagagcccactgaaagtttcggggctcacgtggcccaccattgtcccagtcactcagcaaacacatcagtgccctcatgtggagggctccacgccagcttctgtgatgacagaggtgaatactaccggctgcttgtcctcgagcacgtacaatgtaacaaacttgtaaataaaataagcacattataatacagcatgttaagtgttacaacagaaacacaagagaccagaaaatcagcacctctgtagggaatctgatgaagtcatggagaggtgccatctgaactgggctttgaggaatgaataggagttttccaggtgaagggaccagggggaggaatcatgatgggcagacgctccagatgaaagcaggtgtgcctggggttagcgagctgcttcctgtgcaagcagcataggatatggaagat

SEQ ID NO: 68888 - DNA, 825 bp, Homo Sapiens
  misc_feature (47)..(94): n is a, c, g, or t
  misc_feature (560)..(560): n is a, c, g, or t
  misc_feature (562)..(563): n is a, c, g, or t
  misc_feature (569)..(569): n is a, c, g, or t
  misc_feature (572)..(578): n is a, c, g, or t
  misc_feature (581)..(584): n is a, c, g, or t
  misc_feature (590)..(591): n is a, c, g, or t
  misc_feature (594)..(677): n is a, c, g, or t
  misc_feature (689)..(689): n is a, c, g, or t
ggattcatatcgaagaggacccctagaaagtagatttgtatgtgtgnnnnnnnnnnnnnnnnnnnnnnnnnnnnnnnnnnnnnnnnnnnnnnnntaataaatgtaatggatgtgaaaaaaactgtaataatttagccctcattaggtatttaattccatggataaacctcagctatataatagatatgaggaaagtgtttgtgcctgtcagacacttaaaaaaataacctgagatgaagaatttacaattgaagacattgactttagccatttgtgaaatgggtttgctttttcccttttcctacagacgtatatgctagatgtcacgtgatcatcagaaacagatatccgagtgggtggggaggtgtgctttagatttctcattagaagaccaccaaactggtaatatttttatagcattttaatagcttgatcaaattgtacctttttagagaaaaggaccaaaataaaagaaaaatgaattatgaactacctctcagtctctggggtttgtccttttcctacccctgatgtcaaacttatgcatggatttccttaanannggaaangannnnnnncannnnacaaannaannnnnnnnnnnnnnnnnnnnnnnnnnnnnnnnnnnnnnnnnnnnnnnnnnnnnnnnnnnnnnnnnnnnnnnnnnnnnnnnnnnngcgaaaagaaanaggaaaaaatggtggggggcccctcgggcccccgcgaaaatttttttaaaacctttttgttgggggccgccgggcccccctaggggaagggagaacgggggccaaaagtgggttttccccggaaaaaccccggcgc

SEQ ID NO: 68889 - DNA, 535 bp, Homo Sapiens
  misc_feature (51)..(94): n is a, c, g, or t
  misc_feature (467)..(493): n is a, c, g, or t
tttttacagacatggtctcgctatgttgcccagaatggttttgcactgggnnnnnnnnnnnnnnnnnnnnnnnnnnnnnnnnnnnnnnnnnnnngggtgaggcaccttgctggcccctgttttgattagggtgcagtgctggtgaagccggtgcacgaggccagtgatgcatcctaatgaggggtggagttggcgggacttcctgggccagtttggggacttttacaaaagacccccatgactcagggttttgagttcttaactgatcgaatgaaggattcaaaattaaccactccaaggggggattgaaggaagaaccactcttaatggacaaaaagaaagaaaggggagggagtaacagggatatgagctctagccgcccaagctagcaatggcaacccttctgggtccccttccagcatgtggaagctttcctttcgcttcattcaataaacagctgctgctcnnnnnnnnnnnnnnnnnnnnnnnnnnngcctacagccgcggccgcaagcttattccctttagttgaggg

SEQ ID NO: 68890 - DNA, 1168 bp, Homo Sapiens
  misc_feature (48)..(80): n is a, c, g, or t
agtcagattttactgaatattttacccacaatagctgcctattttgtnnnnnnnnnnnnnnnnnnnnnnnnnnnnnnnnnctttctgtaaactgtaactatgggaattattttctttacatagttgcgcacacacacaaacatatatatatatttaaaatatattttgtttcttgtgccacctactcctaactttttgtttggtttttaaattaaatattaattgaatagacttatcttccttaatcatgtgaactgaaaatgggggcatggtggtcatgaggaggaaacatttagggaaattagattataagtaaaagtgtgggcatattctcctcttttctacaaaggttttcaaatggttcctgaggttttttgttgttgtccgtgttgttactgttgttcttgtcatcaggtttgattttggtccttgccctttccttctagttctccttttattaataggaaggcaggcaaaagccccatttatgtgtgtgttttcccctcagacagctttcatccactgctctgcactagaattgcacaaatcttcatggtgagcaattttaagaaatgttagtgaaaggtagaaattatttcacaaatcagtttctctgctccttcatattaataataatatttggcttcccattgctctttggagttgtttattaaatatgtgtttttgacaacctcctcattagtttcttaaatgagtactggtttgtaaagaattatcaacattatccattccatttatgaagaagaggagaacagctaataaactgtattgtaaaatccacatgttaagtgtgtcttgaattttgaaagaaaaaaatatattttgcaagctaacattttcttgaaacaatttgaggcatcatgtaacttataaccgaatccaagagccgttaggcagcagagtgtgttaccacattgaaatacacagtgctgctgttagactaaatgtcgtaggttgttaaccacatagaaacacactagtatgaagaaaactgttgtaaaatctcaagagcttcagaaactgccttacaagaccgcagcataagctattttgaagtatttaccaaatagtcacatgttgtaaaatatcaagtggttataaaaggatgccatttatatattaaaatttacataacattgttttctgg

SEQ ID NO: 68891 - DNA, 1407 bp, Homo Sapiens
  misc_feature (606)..(638): n is a, c, g, or t
gtcaaaaacacatatttaataaacaactccaaagagcaatgggaagccaaatattattattaatatgaaggagcagagaaactgatttgtgaaataatttctacctttcactaacatttcttaaaattgctcaccatgaagatttgtgcaattctagtgcagagcagtggatgaaagctgtctgaggggaaaacacacacataaatggggcttttgcctgccttcctattaataaaaggagaactagaaggaaagggcaaggaccaaaatcaaacctgatgacaagaacaacagtaacaacacggacaacaacaaaaaacctcaggaaccatttgaaaacctttgtagaaaagaggagaatatgcccacacttttacttataatctaatttccctaaatgtttcctcctcatgaccaccatgcccccattttcagttcacatgattaagataagtctattcaattaatatttaatttaaaaaccaaacaaaaagttaggagtaggtggcaaaagaaacaaaatatattttaaatatatatatatgtttgtgtgtgtgcgcaactatgtaaagaaaataattcccatagttacagtttacagaaagnnnnnnnnnnnnnnnnnnnnnnnnnnnnnnnnnacacaataggcagctattgtgggtaaaatattcagtaaaatctgactcctaagaatacatttgaagttttaggctatgaattggactcctttccattgccatgatggttactacgtcaccactgtaacgtctgatttatctgtatttatatctaggaaattttctcaatcttctgtgtaaaaggcgaacttccttagcacctgaacatggcctcaattcacgaaatgtgatgatcatttacatatgaacaacttttgtaagacacgatagtgttgctcaagtagattaaaaacattgaaacgttgttattcctagcaaatgtcctgggaaaaaagaaccgtcaaatactaaaaggctttaagaatgttgaggaaaaaatgaaatcccttatgaaagtcaactcagacatgaatttttaaattaaaaaatgtccttatttatctataatgaaacaattgctttgatgatagaagttgattgagaaaaggacttgagagtaatacactggccaaaccatgctattaaactgaagcgtgcacagttgctcaaagtctactaaatcactgattaaaaccactttttcatttgtactgaaatttgaaaagaatgtatataaagcttttccaaaaatctcttaaagttactttcccttaaacattaaggaattttaccacaatttctgcgtctccccacattcttaatagctgctcaggccattccatcttcagttctgaaaaatggccactaaccaatagtgacattaaataat

SEQ ID NO: 68892 - DNA, 821 bp, Homo Sapiens
ccgacggtactataacggtcctaaggtagcgaggcctgggtggcgaattcggcacgagggcgagcttgctgtggtttttgctctgggtcctctgggatggcgcctggctgtggccgcgtggtctctcacgcaggggcgccgggcgggggaacgcggccaccctgagtctggtgagtcgactgcggcggcctgtgtccgaagtgtccggggccgtgaacaagggcagcggcctggcctcaggcctgcgttcccacgtttggaaacggggagcttcgtcgatttgtgtttacatcatcgactatgccagggagttctccagataagcctggttttattttcgtcagtgaaaaggccttaccgtataactgactttatgcttgccctgcccccgtataaaataacttaaaagcagcgtgcctggttacagctgtttccacgtgcggtgctcgtcgggagtgatcacctaccctacaggtggaagatggatgcctgaagtgtagactgctgctagctgaataccatctgggagcataaaggtgacctgaaggatgtccttggtgaggattttgaaaatttgatcttcacaagagttgcctggatcatttgaaatttctgggagtctgaggagtactgacataattacctgctggagtctgtaaatacacatttaagacagtgaggatgtgaataaatatattaatgcactttggcattagtgttctaacgtgattaactgccagaaacaggctatttcctaacacaagttataacgggaggaggggtaccctccctgcatcaggtattcacatgctgtcccccaa

SEQ ID NO: 68893 - DNA, 322 bp, Homo Sapiens
tttgaaaaacaaaacaaactattgattgtagataatgaaaagctagggtttgccctcttcatgtctactctccttccaaatagttatatccaaaactgtttttccctctcccctaccttgtcccccctattaaaatagaaacagggattgattaatgtcccgctcctgaatacatgtaaaatttgtacaaaaatatcttctatgaaaatgatttgtaatctgtagacttattacctgggagatgtcttgatgtaaaatcccatcctttgggttgtgggttttttgttttctccaaataaatctgatctttaaagttcaaaaa

SEQ ID NO: 68894 - DNA, 1150 bp, Homo Sapiens
ggactgatctttttctaaatcagaaagtgattaaagtatgcacaaccaaaggcaggtttttctttttcatttattcagcaactatttattaagcatcaactctgtgccaggcacgttactagctgctacatactgtctgaacatgacatacggttaagtaactttacaattattatcaaatacttcaatgtagatatttcttcagttgaaatagcattaactaggataatgctttcatgttattttattgtcttgtgatagaaattcaacttgtaccatctaaaactaggttgctataaaaataggaggatgaagtcaataaagtttatgccagtttaaaaactggaaggaaaaggtaagagctctccattataaaatagttgcattcggttaatttttacacattagtgcattgcgtatatcaactggccctcaatgaagcatttaagtgcttggaattttactaaactgacttttttgcaactttgggagatttttgaggggagtgttgaaaattgccaaacactcacctcttactcaaaacttcaaataaaatacacattttcaagagggagcaccttttatatttgataagttttcattataaaccttataataccagtcacaaagaggttgtctgtctatggtttagcaaacatttgcttttctttttggaagtgtgattgcaattgcagaacagaaagtgagaaaacactgccagcggtgattgctacttgaggtagttttttacaactaccatttcccctccatgaaattatgtgaaatttattttatctttgggaaaagttgagaagatagtaaaagaattaggaatttaaaattacagggaaaaatatgtaagtgaaaagcaataaatattttgttcactttgctatcaagatgttcactatcagatatttattatatggcagcaatttatatttttaatcattgcccattaatagacgcagtaaaatatttttgaatcagacatttggggtttgtatgtgcattaaaattgtcttttgtactgtaagttactgttaatttgaatattttattgaactgtctccctgtgcctttataatataaagttgtttctacaacttttaatgatcttaataaagaatactttaagaatcaaaaaaaa

SEQ ID NO: 68895 - DNA, 603 bp, Homo Sapiens
ctgtttcatgattatatgttatgtcctaccagctagattgccaactcttgactactgactggaagtttattgtttattcagcaaataatgaattaagtcagtgaagtgagagatttcgtgtgtaaggattgttaacttgaacatttcaccagttacacacagttcagccctacttaaattttaaaaatcattgttggcacttgacattgttatgaggagttttgtattttcaacttgtattttgagagtgtcctcatgtgactgaagtatgtgctactcttcttaattgaataaccccagaatctccagaattgataattggaggaaattctactgttggaaagaagggatggattatacagccctgttttttgaccgttcattttgtccttggagtcactaccacttggcctcaaagtgtgaacatgtaaccctttccttaatactttgctacacagctgagcagaaactgtaaatttggatcctttgtcagtacaacttaaaatggaacaatttcaatggcttagggtaagataagtatgtaaagatacttttgtaatagaagaaaaaacattggatattaaaatcacacagtagtaaaaa

SEQ ID NO: 68896 - DNA, 1322 bp, Homo Sapiens
aaactgcaggccaccttcctggtccagactgtactgtgtgaaccccactgactaaattagtgagaaccataggcgttggaatttctcaccttttacaatgatagacttttgcattgggaccaatgaatctggtgtgaaaaaccctgctgtagtagtgaaagagcatcaggagatactgactgtacctgagggccaaaacaggagcaggtaacgaaccgtaaaaaaaggagcaggtaatgaatcgtaaccaaaactacagttgatcctccgcaaaggaaagctctttacccagaatgtccttccagagtcattcaggaaggacaagggaacacccttgggaaattgggctagtggagggctgttgactgcagttgacacctggggtgctccggaggtatctgttctgttgacctgtaaggaagcagtcgatcctagagtgtcagaacagagccattctctcctcctgagtaggaacgtttctgttcagtttccctcacagcagtctgtgttagcatgcagttgaaaatactgccgtctaggagaacctgtggtcactgggaacgtgccccacagtgactggccatgcaaccaggtgatttttaggaatagatgtctctagactctgtctcctttcctacaaggcctcacacagatgcttgaggctaatggcccccattctgaggtcatttttgtgtagaactcctttccccaggagagagccttatctctgccctcctttaccctgaaggcttcaaacggaagacaggacctagatctaaacctagatactagcattttgtgggattgtctagaatttggggaagatttgggttcctaagatgcacaagcgttttacaccagtggtgattaactcaactaaaacccactgtaggaagttagcttccccagacagctaatgccgagatcttctaccagcgtagagttgacagaagcaggccagcgaggaggtgtgggacataatagcctgagtgcttgggttaccatggagactggagtgtgtgaggccacagcctgtgctaaagagccatggagccctcccctggccatgtctggggacagatagaacctgttgggggaaatattccctcaccccagggttctttctgcagagcaagggttgcctttgtcctatccctgagcttgctcaacaagagaaacaaggtttcttaagtgttttggttaaagttttcattcttatttgactatgtatatgtaattgtaaagaaacgatcctatgcattgtctttcttttatattcttgtaatattctgaaattaaaattgttttgtttcatatccaaa

SEQ ID NO: 68897 - DNA, 967 bp, Homo Sapiens
  misc_feature (45)..(79): n is a, c, g, or t
  misc_feature (349)..(368): n is a, c, g, or t
ccgaacgacgagcgcagcgaagtcagtgagcgaggaagcggccgnnnnnnnnnnnnnnnnnnnnnnnnnnnnnnnnnnncagtcgacggtaccggacatatgcccgggaattcggccattacggccgggggggctgaaggtgtcaaaacctcctcagtaggataacccctttctcccctttggaccatctgccatctttcatgagtgtttcccatggtgtttttgcatccagagttgacaacaactcaatttgccttgaatttactcagtcttataaattaaaaatgtgcattttatataaagatgcattttatataaaaatgcacacctttaatctctatatggcagnnnnnnnnnnnnnnnnnnnnaaatgcacacttttaatctctatatggcagcatttttgaggctttatatctgcccgtgtaccctcaactgcctcctttttgcagagaacgatccccacaggaactggtctaagaacactgtctgcacatgattgatgcttaaaatccaatataccaccacatatcaaaggttgggattttcagagtccttcttgatttctgagctgaaaccttaacaaatagggaatttggcagggaagacacctgggtttttaattcagaaccctatttatatactgttaaaatttgaggtactatagtttatataaaagtcggatgttaagatattatatttcagtactaggagcttctttgcagtcattaacatgacaaattaagtaataaatataaaagtgattgtccataaattatcattgaattttttgtttattttgtagtgttctgtatttatctgcactttgtgtatatatacacacatacatatgccaacatgtaaataacctcatgtttattcctaatctaaattgccccaatatttttaatgtatggttacactgtgttttaaattactttaaaaataaactttgtaagcagatttt

SEQ ID NO: 68898 - DNA, 763 bp, Homo Sapiens
caaaccactatgcttaatgttaacatgattctgtttgttaatattttgacagattaaggtgttgtataaataatattcttttggggggaggggaactatattgaattttatatttctgagcaaagcgttgacaaatcagatgatcagctttatccaagaaagaagactagtaaattgtctgcctcctatagcagaaaggtgaatgtacaaactgttggtggccctgaatccatctgaccagctgctggtatctgccaggactggcagttctgatttagttaggagagagccgctgataggttaggtctcatttggagtgttggtggaaaggaaactgaaggtaattgaatagaatacgcctgcatttaccagccccagcaacacaaagaatttttaatcacacggatctcaaattcacaaatgttaacatggataagtgatcatggtgtgcgagtggtcaattgagtagtacagtggaaactgttaaatgcataacctaattttcctgggactgccatattttcttttaactggaaatttttatgtgagttttccttttggtgcatggaactgtggttgccaaggtatttaaaagggctttcctgcctccttctctttgatttatttaatttgatttgggctataaaatatcatttttcaggtttattcttttagcaggtgtagttaaacgacctccactgaactgggtttgacctctgttgtactgatgtgttgtgactaaataaaaaagaaagaacaaagt

SEQ ID NO: 68899 - DNA, 396 bp, Homo Sapiens; identical to SEQ ID NO: 9460

SEQ ID NO: 68900 - DNA, 732 bp, Homo Sapiens
  misc_feature (503)..(503): n is a, c, g, or t
cgtcttctatcattccgctgatcttagatattctctgcattaaatattaaatatcacttctaggctgaaaaatccccctaaaaatatttctagctcagatttttcctccaaattctgcaatagaagatcacaatgtgaactctgcatctccatgttaaagtctaatggacattcacacttagcatgtctcaaagaaatctcatgtaaaccatggccatcctgttctaccttaactttctgagtctatggaatgataatttcacatctcataaacttgactgatgtaagtgtcaagaaaagattgacattttgttaaaagttagtagtgaagtgtgtaacgcttaagcaaactttcatatttcaaatctctttagcaagtgtaactcttttttcaagatgtgaaataatcattaggtcagtcatttgtaaatagtacatctgctatggactttttccagttcttcaccatccatttttataaaactcttattgttaaaaaaaangttactcagaatttcataaagccaaacacctgatttcaggaacacttgagatgtaagaaaattttatagggacctccaatcactaattttcctattttttctctcaaagaaatgctgaagggaggaattcaggttgaatgaaaggaaatagtaacttacagccatatagagttataaagacttcttgtaaatgtgaacatatggtaaaatataaaaacatgtatttttg

SEQ ID NO: 68901 - DNA, 1129 bp, Homo Sapiens
  misc_feature (18)..(18): n is a, c, g, or t
  misc_feature (32)..(32): n is a, c, g, or t
  misc_feature (101)..(101): n is a, c, g, or t
  misc_feature (287)..(287): n is a, c, g, or t
  misc_feature (790)..(800): n is a, c, g, or t
  misc_feature (1030)..(1049): n is a, c, g, or t
  misc_feature (1100)..(1100): n is a, c, g, or t
caacttacaagcatattnttactattcaggantatcatcagtatctgagactgttcgttagaaacattttgaactggatattctgtctatgatcaagcatntagaagacatgtttaccttggcacatttctacacattactcccatagtcgtatgtgtagcatgtaccccatcgagatcttctcagcatgtctcgagtgatagcatccagcagtttcagctcacaatttctgtaagtactattctataaaatggaagagccataaacttggaggccctagaccaatnttttgattatttctggtctactctcattccgttgatgatcttagatattctctgcattaaatatcacctctaggctgagaaatccaccaaaaatatttctagctcagcgttttcctccaaatcttcaatggaagatcataatgtgaactctgcatctccatgttaaagtttaatggacattcacacttagcatgtctcaaagaaatctcatgtaaaccatggccatcctgttctaccttaactttctgagtctatggaatgataatttcacatctcataaacttgactgatgtaagtgtcaagaaaagattgacattttgttaaaacttcgtagccaagtgtgtaacgcttaagcagactttcatatttcaaatctctatagcacgtgtaactcttttttcaagatgtgaaataatcattaggtcagtcatttgtaaatagtacggctgctgtgggctttttccagttcttcaccatccatttttataaaactcttattgttnnnnnnnnnnngttactcagaatttcataaagccaaacacctgatttcaggaacacttgagatgtaagaaaattttatagggacctccaatcactaattttcctattttttctctcaaagaaatgctgaagggaggaattcaggttgaatgaaaggaaatagtaacttacagccatatagagttataaagacttcttgtaaatgtgaacatatggtaaaatataaaaacatgtatttttgnnnnnnnnnnnnnnnnnnnncctgagcaggcggccgcaagctttttccctttagtgagggttaatttcggncatggacactggcccgttcgttaccaacc

SEQ ID NO: 68902 - DNA, 690 bp, Homo Sapiens
aaggattctatcatggacattaaagtaccgatatttaaaggacctggagagatgcctgaatccgaatcctacatggaagagttccaattcccatactatatcattcttcgagatgtaaacgcacttcctgagacactcagcgatgccctcagacagtggtttgagttggtgacagcctctgaccacccatagaacagaaagaagagtccaaagtgagacttaactgtggtcagaaggtcacattgcttacccagtcaaggggaagagtgattcctcacactgctttcaagctggactgagccagtctcattctgggaaagaaacgctgtgtccagaactcagcagctccatctattttttccagtcgaaagaaactgatctttaggcagtttttacttggccagaaagcagtgctgaatacttgaaactgtgtgctctgttctacttaatgttctgtcagaatgttcttttgtaggcagtatgtcatgatgtaatcatctatctccttgtctgtttccaagttacactgtgaagtctgcgacccttttgaggtggtcatcaaagacacagattccttgtttaaccaagtgtcccaaagcatgtacctgaagttatatcattttttattctaaaaagctatgcagcttatattctgaaaactattaaaacatataccactgttgttgatgt

SEQ ID NO: 68903 - DNA, 1265 bp, Homo Sapiens
  misc_feature (1158)..(1158): n is a, c, g, or t
  misc_feature (1167)..(1167): n is a, c, g, or t
  misc_feature (1179)..(1179): n is a, c, g, or t
  misc_feature (1199)..(1199): n is a, c, g, or t
  misc_feature (1211)..(1211): n is a, c, g, or t
  misc_feature (1223)..(1223): n is a, c, g, or t
  misc_feature (1239)..(1239): n is a, c, g, or t
  misc_feature (1249)..(1249): n is a, c, g, or t
aggtcgggctcaaatcggcacgagggctgaaaggagactatcgaactgggaaacgactaacatacggaaagtcattccatacattgctagtcaatttcggaaagacaagatttggcttcgaaggaccaagcccagtaaacgccagtatcagattgtttggctatcgatgactcttctagtatggtagacaatcataccaagcagcttgcatttgaatctttggctgtgattggaaatgctctaaccctcctggaagtgggtcagattgcagtgtgtagttttggagaatctgtaaagctgttacacccatttcatgagcagttcagtgattactctgggtcccagattctacgtctctgcaaattccaacaaaagaaaaccaagattgctcagtttctagagtctgttgcaaacatgtttgcagctgatcagcagctctcgcagaacatcagttcagaaactgcacaactcctcctggtagtctctgatgggcgaggccttttccttgagggcaaagaaagagtcccggcagcagttcaggctgcccggaatgcaaatatctttgtcatctttgttgtattggacaatcccagttcacgggattctatcttggacattaaagtaccgatatttaaaggacctggagagatgcctgaaatccgatcctacatggaagagttaccattcccatactatatcattcttcgagatgtaaacgcacttcctgagacactcagcgatgccctcagacagtggtttgagttggtgacagcctctgaccacccatagaacagaaagaagagtccaaagtgagacttaactgtggtcagaaggtcacattgcttacccaggtgctcccttttggacaactacaaaaaattttattgtaatatttttattttacaacgtgatcttacagcctacagaatgctctctggctcccggctttgcctgggctgaggtttttataccaaacctggaagcagcagcaggtgcctgaactcgtaactagagaagagttatccttcttccctgccttggaagccctggcctggggaggaggtcataccccaccgttggagcccagcttgcctgttttatttttgcaggggatcttggggcacctgttctttgagggagatgctgccagggagcatngggactttntacagtcctttntataaaggattaaaaggganctgccttttgancctgttctaagntcttcctttgccaagnccatagtgtntgcccaaaagcttttt

SEQ ID NO: 68904 - DNA, 875 bp, Homo Sapiens
  misc_feature (746)..(746): n is a, c, g, or t
  misc_feature (751)..(751): n is a, c, g, or t
  misc_feature (754)..(754): n is a, c, g, or t
  misc_feature (757)..(757): n is a, c, g, or t
  misc_feature (765)..(765): n is a, c, g, or t
  misc_feature (772)..(772): n is a, c, g, or t
  misc_feature (775)..(775): n is a, c, g, or t
  misc_feature (778)..(778): n is a, c, g, or t
cagtcgacggtaccggacatatgcccgggaattcggccattacggccgggggaggctgcgggaagatggcggcggccatggcagcatcttccctgacggtcaccttagggcggctggcgtccgcgtgcagccacagcatcctgagaccttcggggcccggagcagcctccctttggtctgcttctcgaaggttcaattcacagagcacttcatatctaccaggatatgttcctaaaacatccctgagttcaccaccttggccagaagttgttctgccagacccagttgaggagaccagacaccatgcagaggtcgtgaagaaggtgaatgagatgatcgtcacggggcagtatggcaggctctttgccgtggtgcactttgccagccgccagtggaaggtgacctctgaagacctgatcttaattggaaatgaactagaccttgcgtgtggagagagaattcgactggagaaggtcctgctggttggggcagacaacttcacgctgcttggcaagccactcctcggaaaggatcttgttcgagtagaagccacagtcattgaaaagacagaatcatggccaagaatcattatgagattcaggaaaaggaaaaacttcaagaagaaaagaatcgtcacgaccccgcagactgtcctccggataaacagcattgagattgctccgtgtttgttgtgattaccgagttaatacttacaaaaggataaaaataaactcctgccttccccngaaanaanaanaaaaaacnacaaaanaanaanaccttgtgcgggccggccttcggccctttcgagaaggctttttctaaaaaccaattcccgtttggggggcgccgggggcccccaaataggggtaaat

SEQ ID NO: 68905 - DNA, 756 bp, Homo Sapiens
caggctggtctcaaactcttgggctcaggtgatcccccacgcacggcagctttgacacttacttgaccctttcctcctaagctctaccctgacgctggctgtgtgtcccagagacttaatcagaagctggaagaagggctgtgacgtgtgtgacagcaggaactgctggtcaacccacagccggccagcctgccgggacgccatcttggccccaatcttggcagggagaggggagtgtatcggactctggggagagcagctgcctgcacgggcagggtcctcccgtctcaggattaacgttctcaactgtatttgatttctcctcagccagagggggtaaggtggccttcccagaagcacaggtgggccgcgtgtcagaggccctggacagcctgtgcctctcccaggcctcccagcaggggtggctctcgcccctctggaggggagaccccaggaaccggcccccgccctcagccatagcctcacagggtccttgtttctcggggcctggctctgtgggtgcacaaggcatggtcgggctcccgtccttctggaagtctccagagtggcatgtgggcagctgtgtgaagcggccccccagatcttcatccagcctggcctgcagcaactccctacgccctctgctacctcccctgcctacctttgggtagacgttctcttgacccttccttctgtgataaagcaaaagcgtgtgatctcttttctcaccaaggaataaaacgtctctgaatacca

SEQ ID NO: 68906 - DNA, 500 bp, Homo Sapiens
  misc_feature (243)..(274): n is a, c, g, or t
ctgttttgtttttttaatgttgtgttattttgctccagattttcatctataaacaaaggagcatttgttttgattttactctttttggtataaaaaattttgctagcttagtaaaacgaattggaaaacttgactatgatctggaacagataatgcaagaaggaacacataagtaagttgctttggtgccaagaaaataaaaaagctattatcaggtctcctaactaccccagtttgtaaggnnnnnnnnnnnnnnnnnnnnnnnnnnnnnnnntaattgcctatatccttattatgttaacctattttatttttctatatttcgtacatatataagtattattcatggttccaagcaatgagtgtaatgtattttctcccaatagtaattgtttatattcataattattcagctctgctgctaaacacgtagttccacttcgtttttttcttcttgctactgtagttattacaataaatactgtatttttgaagcactt

SEQ ID NO: 68907 - DNA, 2319 bp, Homo Sapiens
  misc_feature (1861)..(1871): n is a, c, g, or t
  misc_feature (1983)..(1983): n is a, c, g, or t
ctccagtacggaggactgggtgttgaattcggcacgaggcagctcagtgctatgaaggtgacagcgtgaggtgacccatctggcccgccgcgatgctggcaacacggcggctgctcggctggtcgcttcccgcgcgggtatctgtgcgtttcagcggcgacacgacagcacccaagaaaacctcatttggctcgctgaaggatgaagaccggattttcaccaacctgtacggccgccatgactggaggctgaaaggttccctgagtcgaggtgactggtacaagacaaaggagatcctgctgaaggggcccgactggatcctgggcgagatcaagacatcgggtttgaggggccgtggaggcgctggcttccccactggcctcaagtggagcttcatgaataagccctcagatggcaggcccaagtatctggtggtgaacgcagacgagggggagccgggcacctgcaaggaccgggagatcttacgccatgatcctcacaagctgctggaaggctgcctggtggggggccgggccatgggcgcccgcgctgcctatatctacatccgaggggaattctacaatgaggcctccaatctgcaggtggccatccgagaggcctatgaggcaggtctgattggcaagaatgcttgtggctctggctatgattttgacgtgtttgtggtgcgcggggctggggcctacatctgtggagaggagacagcgctcatcgagtccattgagggcaagcagggcaagccccgcctgaagccccccttccccgcagacgtgggagtgtttggctgccccacaactgtggccaacgtggagacagtggcagtgtcccccacaatctgccgccgtggaggtacctggtttgctggctttggcagagaacgcaactcaggcaccaaactattcaacatctctggccatgtcaaccacccttgcactgtggaggaggagatgtctgtgcccttgaaagaactgattgagaagcatgctgggggtgtcacgggcggctgggacaacctccttgctgtgatccctggcggctcgtctaccccactgatccccaagtctgtgtgtgagacggtgctgatggacttcgatgcgctggtgcaggcacagacaggcctgggcacagctgcggtgatcgtcatggaccgctcgacggacatcgtgaaagccatcgcccgcctcattgagttctataagcacgagagctgtggccagtgtaccccatgccgtgagggtgtggactggatgaacaaggtgatggcacgtttcgtgaggggggatgcccggccggccgagatcgactccctgtgggagatcagcaagcagatagaaggccatacgatttgtgctctgggtgacggggccgcctggcctgtgcagggtctgatccgccactttcggccggagctcgaggagcggatgcagcggtttgcccagcagcatcaggcccggcaggctgcctcttagcccaccaccctggcctgctgtcctgcgtctatccatgtggaatgctggacaataaagcgagtgctgcccaccctccaaaaaaaacaccccaccctttaccctctcacccctatcctattctactcattatcctaatacatctcacaacctcataattaccacacggggggcgcccgttcttaaagttatcccttcgaggggccccaaggtttacgccataccccacttttttgtgtaaaaaggggccccctaatgtggagtccgcattatacacctagcgccctgggccgcccgttttttaaaaccgtcggggcagtgggaaaaacctggttaaccttgggcacctttttgtggaaggaaacctttcctttctnnnnnnnnnnnactttacctgtggaacacaccctcccctaccagaagattttagaaggcctttcaaggggaaaatataataaaatctttttagaggggtataaaggtgggctcaaaacttcantcccgccattattgttctcggcccggtctttgaaaaaatttctcggctctcctcgggggacatgtgactctctcggaacaaatactcttctcaccaccggggcaccccgcgggacctctcacattctggtttggggggacttttttataaacactcaccccctcccacgaggcgtgtcacttttttggggcgccctctctatttttctctcccaccgcgcgggtgttcttgtgaacgcattatttcacccccccttttccccaccttttctctttacacagccgctttttctctcccgcgcctcttacacagaaaaccactcctcccccactctct

SEQ ID NO: 68908 - DNA, 1100 bp, Homo Sapiens
cggcgctggcgtcgggcgcgtgacgtctttcctgcgcgccacctagcgtctctatcgcgccagttcctcagcctcagtgctatgaaggtgacagcgtgaggtgacccatctggcccgccgcgatgctggcaacacggcggctgctcggctggtcgcttcccgcgcgggtatctgtgcgtttcagcggcgacacgacagcacccaagaaaacctcatttggctcgctgaaggatgaagaccggattttcaccaacctgtacggccgccatgactggaggctgaaaggttccctgagtcgaggtgactggtacaagacaaaggagatcctgctgaaggggcccgactggatcctgggcgagatcaagacatcgggtttgaggggccgtggaggcgctggcttccccactggcctcaagtggagcttcatgaataagccctcagatggcaggcccaagtatctggtggtgaacgcagacgagggggagccgggcacctgcaaggaccgggagatcttacgccatgatcctcacaagctgctggaaggctgcctggtggggggccgggccatgggcgcccgcgctgcctatatctacatccgaggggaattctacaatgaggcctccaatctgcaggtggccatccgagaggcctatgaggcaggtctgattggcaagaatgcttgtggctctggctatgattttgacgtgttgtggtgcgcggggctggggcctacatctgtggagaggagacagcgctcatcgagtccattgagggcaagcagggcaagccccgctgaagcccccttcccgcagacgtgggagtggttgggtggcccacaactgtgggcacgtggagacagtggcagtgtccccaatctgcgccgggaggtactggttgtggctgggagggacgcatcaggccatatccatttctgggctgtacacctgctgtgggggttttggccttcaatgttggcagtgcgggttcgggggcaccctgtgatccgggcttaccttccactgttacggtgtctgcgggacagcgctggttggcgttgacgtttagcgtctcggtggtggctcctgtggttgtgtgctctc

SEQ ID NO: 68909 - DNA, 974 bp, Homo Sapiens
ataggctagtacgaggctggtgtaaattcggccgaggctcagtgctatgaaggtgacagcgtgaggtgacccatctggcccgccgcgatgctggcaacacggcggctgctcggctggtcgcttcccgcgcgggtatctgtgcgtttcagcggcgacacgacagcacccaagaaaacctcatttggctcgctgaaggatgaagaccggattttcaccaacctgtacggccgtccatgactggaggctgaaaggttccctgagtcgaggtgactggtacaagacaaaggagatcctgctgaaggggcccgactggatcctgggcgagatcaagacatcgggtttgaggggccgtggaggcgctggcttccccactggcctcaagtggagcttcatgaataagccctcagatggcaggcccaagtatctggtggtgaacgcagacgagggggagccgggcacctgcaaggaccgggagatcttacgccatgatcctcacaagctgctggaaggctgcctggtggggggccgggccatgggcgcccgcgctgcctatatctacatccgaggggaattctacaatgaggcctccaatctgcaggtggccatccgagaggcctatgaggcaggtctgattggcaagaatgcttgtggctctggctatgatttgacgtgttgtggtgcgcggggctggggcctacatctggggagaggagaccagcgctcatcgagtccatgaggcaagcaggcaagcccgctgaagccccttcccgcagacgtggagtgttggtgcccaaatgtggcacgtgggacgggggggtcccaattgcgccggggacggtgtgctgggaaagaccggccacattcaattgtcggaccctgtgggaggatggctaaaagtgaacggggcgcgcggacctggcgctccaccgggagtgtggggaggcgccgggaacctaacaagggggggagagtcg

SEQ ID NO: 68910 - DNA, 1068 bp, Homo Sapiens
gattccccgccaaggggtgggccccaggccctgttttgtgccctggcccccagtgcattggaagtttccatcagcccccgtttccccaccccagactgggggtatcagtgggggagaaccgagccccccagggattccccggcaaggagggttttcccagcccgcccgtgacccccccaaccatgtttttccaatcagttttttcaaaggccacagacatttcctcctccccagtgcaagggtggttgacagggcccagagatggttgaatagtttggtgcctgaggttgcgttctctgccaaagccagcaacccaggtacctccacggcggcagattgtggggggacactgccactgtctccacgttggccacagttgtggggcagccaaacactccttcagggaaatgggaagagaactggtggctgctagggggtggggcaagtttcctggcagggaggtgtgtcccagggtcctgcacccatggcagagcccctgctctaatatccccttatcattcttatccctgctggaccccaaactccagagatgcccattgccttgttcaccccatgcccttagcctcagaacaggcactgtgaaggtggagccacagagcagcactggtgcggcggggaccgaggcaggaggagggacagcaggcggccctgggggagcctgtgtgttgttgccagcctactctctatctggccccagccgggaagccactcagaaatccctaagaacaatccaaagggagcctagccagatcccgggtgtcacaggacacagtctgacccagggttacgccaggccttacccacgtctgcggggaaggggggcttcaggcggggcttgccctgcttgccctcaatggactcgatgagcgctgtctcctctccacagatgtaggccccagccccgcgcaccacaaacacgtcaaaatcatagccagaaccacaagcattcttgccaatcagacctgcctcataggcctctcggatggccacctgcagattggaggcctcattgtagaattcccctcggatgtagatataggcagcgcg

SEQ ID NO: 68911 - DNA, 360 bp, Homo Sapiens
cgtcgaaatcatagccagagccacaagcattcttgccaatcagacctgcctcataggcctctcggatggccacctgcaggacaaaggtgtgagtttcccagaccacccccagcccaggagtcagcctataacttcaggagtcatgaagcccttgaaaggcactcccacgggtgaagcatcctaatgctcctgggtataaaaaatgtttgctagctctagtaaaacgaattggaaaacttgactatgatctggaacagataagcaagaaggaacacataagtaaactgctttgctgccaggaaaataaaaacgaagtagctactatcagtctccacactacccgtagtctgtaaaatgtcc

SEQ ID NO: 68912 - DNA, 736 bp, Homo Sapiens
  misc_feature (24)..(24): n is a, c, g, or t
  misc_feature (126)..(200): n is a, c, g, or t
taggccgtgcagccatggttcccntgagaactgctgctgttgctgacatgtccctcaactagagagcagagggtgagcccctagttgtaaaaggccctctggtctcagatgtgcagctgtcaccgnnnnnnnnnnnnnnnnnnnnnnnnnnnnnnnnnnnnnnnnnnnnnnnnnnnnnnnnnnnnnnnnnnnnnnnnnnnactgaccatggggctgagggcaagtcccaagtgtgcagactgtgcgttcatggcgccctcacctgcagcctcctggcacagtggagcaccctcgtgcaggagctggaggctgccctgcagctggctttctacccggatgccgtggaggagtggctggaggaaaacgtgcaccccagcctgcagcggctgcaagctctgctgcaggacctcagcgaggtgtctgcccccccgctgccacccaccagccctggcagggacgttgctcaggacccctgaggggagagctcatgccagggggctcctgctggaggctgggggggctctgcactgccaaatggcctgggcaatacgggcccacgtgggcgtcgtgccctctggcccagcagtgtcttgcccacactcagttcctgagggccctgggcagcccctgggggagagactagaaaacacagaaggaagcagcacagggagacccgctttgtgatctgcatgtgtgacactgattctttggaaataaagagtggaagctgcaggtg

SEQ ID NO: 68913 - DNA, 1362 bp, Homo Sapiens
  misc_feature (269)..(281): n is a, c, g, or t
  misc_feature (1257)..(1314): n is a, c, g, or t
aaaattaaatgggatgtttttcattctagaataaaagaatgtgaattctctttgctgctcttgtttaagctaaaagtagtgtttacttgataaggctctctgaccatttaatttttatcagaaaatgtggggatgtcaggaaagtggcttcctgaacgttggggcgggataattgtcctcaaaagtatgatggttaatacatgaaaggaagactttgttggacagtttcgaagatgggcttttaaggagttgggtttttgtggggtacnnnnnnnnnnnnnaagccacaaaatccccaatatgtttgttttaggatggaagtgaggatttgtatgagactgtcagctattaattttaaggaaatcttaaaatttacatttacatcagtaaatgaagatgacagtgtgtatatatgtgataaatagtgaaacagaaaagacagttctggtattcataacgtgaaagaaaggggttttattctttctgtgtctgtgatttaaaactccgtgaccatgctctgacttttgtatttcaacctgagtttaaacaaataaacaagatattttttaaagaaagcataacatagtgtgtcttagcaaggacatgattcatatggaagcagaatgtgagaagttgtaaggtccttggtactcactgtaaaatcacagacagagaattggtaggggttgtgaatacactagtaccacttaaagttcagtgatacagttcagaaatagggtccttaagtattttgaaagagtttactcttcagtcagcttagatgagagctctctccctgctcccctctaccctctcaaaagttgagagtaaatagaatttggtttgattccagggaggggaaaataagcagagaataggacttttatactttccaataccaggaataaaatgtttgtgatatatatgggtccagcaaacctatcgagataatgtgaatacgataaacttcctaatggcaggatattcactctcaatcctgaagttaccggttcctgcagaattgagcttcagctgttactgttttgaagccgctgtaaattactgctttccccagttcccccactattttttttaagtgggcgggggcgcctgttaagatctaaaatagatatgttggattgatattctcacgtgttcggtgtggaaaacaaaacaagtacatgctttagaagcaacaacaatgaaatccttttgaaatgtgtgttaatatcgtttaataaaataactagtttgaannnnnnnnnnnnnnnnnnnnnnnnnnnnnnnnnnnnnnnnnnnnnnnnnnnnnnnnnnccgcgccccgcaccaacaggcggggcacaacaccggggcaaccaccgg

SEQ ID NO: 68914 - DNA, 1572 bp, Homo Sapiens
  misc_feature (214)..(214): n is a, c, g, or t
  misc_feature (1331)..(1406): n is a, c, g, or t
ccagcttaatcgccataagaacattcacacaggtgagaaggcatcttgaatgtaaggaatgtggaaagtcctttaatcgtgtctcaaaccatgttcaacatcagagtattcgtgctggtgtaaaaccatgtgaatgtaaggggtgtgggaaaggcttcatttgtggttcaaacgttattcagcatcagaaaattcattccagtgagaaactctntgtatgcaaggagtggaggacgacctttagatatcattaccacttatttaacattaccaaattcacactggtaaaaaaccctttgaatgtaaagaatgtggaaaggccttcagttttctgacacagcttgctggacttcaggtcattcatactggcgagaagccatttgaatttgagaaatgtgggaaggccttcaatagtggctcaaaccttgttcaacatcagagtattcatactggtgagaaactctatgaatgtaaggagtgtgggaaaactttcagatttagtttggtcctgactgcacatcaaagaattcatactggtatgaaaccctgtgaatgtacagaatgtgggaagacctttagttgtagctcaaacattgttcaacatgttaaaattcatactggtgagaaacgctataatgtaaggaatatgggaaagcatttgctgtggatgatcagctgtctcaacatcagaaaattcagaatagttagaaattttgtgacaataaggagtgtggacaagccttcactgtgtacgaaaaatttactcaacaccagagagctcatattgatgagaaatcttgtgaacataaaagaatgtgtgaagaactttcatcatggcctgggatttgctcaacttctgagtattcatacttctgagaaatctttgagtgtaaggaatgtggggcgttttatagccacactaaataccttagagttcggagaagataattcttgtgagaaagtctttgaatgaggaatatagggtagttgtcatgttcacaatatactccctatgaaataatttaccagatacaggcatacctcgctgaattgtgcattgcagttattgtgttttatacaaactgaaggtttgtggcaaccctgtggtgagcaagaccatcaggtccattttcccaacgtcaggtgtgcatttcatgtctttatgtcacattttggtaattctcagaatatttcaaactatttcattgttatatatctatcatggtgatcaatgaccagtgatttttgatgttgctattgtaattgctttgggataccacaaattctgcccataaaagatggtaaacctagttgatacttgttgtgggttnnnnnnnnnnnnnnnnnnnnnnnnnnnnnnnnnnnnnnnnnnnnnnnnnnnnnnnnnnnnnnnnnnnnnnnnnnnnttgtatatttgttgtaccattgagaataagttttagacatcatgacactttaccctttatttaatcaacgtgtgtatcaaccaaacatgaagacaatatagacaatatcatatagccattgtaccataattaccgttaaggaaagtattcataattctgtaatatc

SEQ ID NO: 68915 - DNA, 1077 bp, Homo Sapiens
  misc_feature (498)..(515): n is a, c, g, or t
  misc_feature (545)..(940): n is a, c, g, or t
gcatctccttacaggcactaatatagtagattttaaagcccaaatttttcttttcctgatttttttaaacataagctaaatcatattagtattaatactacccatagaaaacttgacatgtagcttcttctgaaagaattatttgccttctgaaatgtgacccccaagtcctatcctaaataaaaaaagacaaattcggatgtatgatctctctagctttgtcatagttatgtgattttcctttgtagctacttttgcaggataataattttatagaaaaggaacagttgcatttagcttctttcccttagtgactcttgaagtacttaacatacacgttaactgcagagtaaattgctctgttcccagtagttataaagtccttggactgttttgaaaagtttcctaggatgtcatgtctgcttgtcaaaagaaataatccctgtaatatttagctgtaaactgaatataaagcttaataaaaacaaccttgcatgnnnnnnnnnnnnnnnnnngcctacagccgccctcgtgccgaattcttnnnnnnnnnnnnnnnnnnnnnnnnnnnnnnnnnnnnnnnnnnnnnnnnnnnnnnnnnnnnnnnnnnnnnnnnnnnnnnnnnnnnnnnnnnnnnnnnnnnnnnnnnnnnnnnnnnnnnnnnnnnnnnnnnnnnnnnnnnnnnnnnnnnnnnnnnnnnnnnnnnnnnnnnnnnnnnnnnnnnnnnnnnnnnnnnnnnnnnnnnnnnnnnnnnnnnnnnnnnnnnnnnnnnnnnnnnnnnnnnnnnnnnnnnnnnnnnnnnnnnnnnnnnnnnnnnnnnnnnnnnnnnnnnnnnnnnnnnnnnnnnnnnnnnnnnnnnnnnnnnnnnnnnnnnnnnnnnnnnnnnnnnnnnnnnnnnnnnnnnnnnnnnnnnnnnnnnnnnnnnnnnnnnnnnnnnnnnggcataggccaccaaaggccagtatcctaaaaaggccgcgtgctggggttttcaaagggtcgccccctgacagcatacaaatcgacgtcattcaaggtgggaaccgaaggaaataagaacaggcgttccctggaacc

SEQ ID NO: 68916 - DNA, 2759 bp, Homo Sapiens
  misc_feature (2134)..(2158): n is a, c, g, or t
  misc_feature (2172)..(2172): n is a, c, g, or t
  misc_feature (2214)..(2614): n is a, c, g, or t
  misc_feature (2617)..(2617): n is a, c, g, or t
  misc_feature (2626)..(2627): n is a, c, g, or t
ggtaccggtccggaattcccgggatatcgtcgacccacgcgtccgaattgctgagccagtcacctgtgttccaggagccgaatcagaaatgtcatcctcaggcacgccagacttacctgtcctactcaccgatttgaagattcaatatactaagatcttcataaacaatgaatggcatgattcagtgagtggcaagaaatttcctgtctttaatcctgcaactgaggaggagctctgccaggtagaagaaggagataaggaggatgttgacaaggcagtgaaggccgcaagacaggcttttcagattggatccccgtggcgtactatggatgcttccgagagggggcgactattatacaagttggctgatttaatcgaaagagatcgtctgctgctggcgacaatggagtcaatgaatggtggaaaactctattccaatgcatatctgaatgatttagcaggctgcatcaaaacattgcgctactgtgcaggttgggctgacaagatccagggccgtacaataccaattgatggaaatttttttacatatacaagacatgaacctattggtgtatgtggccaaatcattccttggaatttcccgttggttatgctcatttggaagatagggcctgcactgagctgtggaaacacagtggttgtcaaaccagcagagcaaactcctctcactgctctccacgtggcatctttaataaaagaggcagggtttcctcctggagtagtgaatattgttcctggttatgggcctacagcaggggcagccatttcttctcacatggatatagacaaagtagccttcacaggatcaacagaggttggcaagttgatcaaagaagctgccgggaaaagcaatctgaagagggtgaccctggagcttggaggaaagagcccttgcattgtgttagctgatgccgacttggacaatgctgttgaatttgcacaccatggggtattctaccaccagggccagtgttgtatagccgcatccaggatttttgtggaagaatcaatttatgatgagtttgttcgaaggagtgttgagcgggctaagaagtatatccttggaaatcctctgaccccaggagtcactcaaggccctcagattgacaaggaacaatatgataaaatacttgacctcattgagagtgggaagaaagaaggggccaaactggaatgtggaggaggcccgtgggggaataaaggctactttgtccagcccacagtgttctctaatgttacagatgagatgcgcattgccaaagaggagatttttggaccagtgcagcaaatcatgaagtttaaatctttagatgacgtgatcaaaagagcaaacaatactttctatggcttatcagcaggagtgtttaccaaagacattgataaagccataacaatctcctctgctctgcaggcaggaacagtgtgggtgaattgctatggcgtggtaagtgcccagtgcccctttggtggattcaagatgtctggaaatggaagagaactgggagagtacggtttccatgaatatacagaggtcaaaacagtcacagtgaaaatctctcagaagaactcataaagaaaatacaagagtggagagaagctcttcaatagctaagcatctccttacagtcactaatatagtagattttaaagacaaaatttttcttttcttgatttttttaaacataagctaaatcatattagtattaatactacccatagaaaacttgacatgtagcttcttctgaaagaattatttgccttctgaaatgtgacccccaagtcctatcctaaataaaaaaagacaaattcggatgtatgatctctctagctttgtcatagttatgtgattttcctttgtagctacttttgcaggataataattttatagaaaaggaacagttgcatttagcttctttcccttagtgactcttgaagtacttaacatacacgttaactgcagagtaaattgctctgttcccagtagttataaagtccttggactgttttgaaaagtttcctaggatgtcatgtctgcttgtcaaaagaaataatccctgtaatatttagctgtaaactgaatataaagcttaataaaaacaaccttgcatgattnnnnnnnnnnnnnnnnnnnnnnnnngcctacaagccgcnggccgctccaacatcagaatggtacctcgtgccgaattcttnnnnnnnnnnnnnnnnnnnnnnnnnnnnnnnnnnnnnnnnnnnnnnnnnnnnnnnnnnnnnnnnnnnnnnnnnnnnnnnnnnnnnnnnnnnnnnnnnnnnnnnnnnnnnnnnnnnnnnnnnnnnnnnnnnnnnnnnnnnnnnnnnnnnnnnnnnnnnnnnnnnnnnnnnnnnnnnnnnnnnnnnnnnnnnnnnnnnnnnnnnnnnnnnnnnnnnnnnnnnnnnnnnnnnnnnnnnnnnnnnnnnnnnnnnnnnnnnnnnnnnnnnnnnnnnnnnnnnnnnnnnnnnnnnnnnnnnnnnnnnnnnnnnnnnnnnnnnnnnnnnnnnnnnnnnnnnnnnnnnnnnnnnnnnnnnnnnnnnnnnnnnnnnnnnnnnnnnnnnnnnnnnnnnnnnnnnnnnnnnncancaaaagcanngacgtaaaaggcgcgtgtggggtttttcataagtcgcccccggagagcacaaaaatcgagctaatcaaaggtgggacccacaggacatagatcaaggttccctggagtcctcctggtctccgttgactgcgg

SEQ ID NO: 68917 - DNA, 960 bp, Homo Sapiens
  misc_feature (77)..(111): n is a, c, g, or t
aaaatgatagatcatataggggccggttgatagcgaacgacgagcgcagcgagtctagtgagcgaggaagcggccgnnnnnnnnnnnnnnnnnnnnnnnnnnnnnnnnnnncagtcgacggtaccggacatatgcccgggaattcggccattacggccggggatcagaaccaaatagctgagccagtcacctgtgttccaggagccgaatcagaaatgtcatcctcaggcacgccagacttacctgtcctactcaccgatttgaagattcaatatactaagatcttcataaacaattgaatggcatgattcagtgagtggcaagaaatttcctgtctttaatcctgcaactgaggaggagctctgccaggtagaagaaggagataaggaggatgttgacaaggcagtgaaggccgcaagacaggcttttcagattggatccccgtggcgtactatggatgcttccgagagggggcgactattatacaagtcggctgactttcaatcgacaagcagatcgtctgctgctggcgacaatggagtcaatgaatggtggaaaactctattccaatgcatatctcgaatgatttagcaggctgcatcaaaacattgcgctactgtgcaggtggcctgacaagatccaggccgtacaataccaattgatggaaaatttttacatatacaagacatgaacctatcggtgtactgtggccaaatcattccttggaatttcccgtcggttatgctcatttggaagatagggcctgcactgagctgtggaaacacagtggtgtcaaaccagcagagcaaactcctctcactgctctccacgtggcatctttacatcaaaagagggcagggtttcctcctggagtagtggaatatggaccgggttaatggcctacagcaggggcagacattctgcctcacatggatatagacacagtagccttcacaggaa

SEQ ID NO: 68918 - DNA, 959 bp, Homo Sapiens
attctcgggatatcgtcgacccacgcgtccgaattgctgagccagtcacctgtgttccaggagccgaatcagaaatgtcatcctcaggcacgccagacttacctgtcctactcaccgatttgaagattcaatatactaagatcttcataaacaatgaatggcatgattcagtgagtggcaagaaatttcctgtctttaatcctgcaactgaggaggagctctgccaggtagaagaaggagataaggaggatgttgacaaggcagtgaaggccgcaagacaggcttttcagattggatccccgtggcgtactatggatgcttccgagagggggcgactattatacaagttggctgatttaatcgaaagagatcgtctgctgctggcgacaatggagtcaatgaatggtggaaaactctattccaatgcatatctgaatgatttagcaggctgcatcaaaacattgcgctactgtgcaggttgggctgacaagatccagggccgtacaataccaattgatggaaatttttttacatatacaagacatgaacctattggtgtatgtggccaaatcattccttggaatttcccgttggttatgctcatttggaagatagggcctgcactgagctgtggaaacacagtggttgtcaaaccagcagagcaaactcctctcactgctctccacgtggcatccttaataaaagaagcaaggttttcctccctggagtagcggaatattggtcccgggcttatggggccctaacagcaggagccaccccattttccttcttcccctggggaatattaaaacaaaggtaagccctttcacccggaatccaccaagaaggtgctggcaaaagttttaatccaaaagaaaaacctggcccggggataaaaaaccaaatcctttaaaagaaaggggttggaaccccctttggaaacccttttgggccagggg

SEQ ID NO: 68919 - DNA, 1313 bp, Homo Sapiens
ggatgaacttaggagctattcatcactaatgaaagttgaaaatatgtcttcaaatcaggatggcaatgattcagatgaattcatgtaaaaggagaaaaggagaaaaggacctttgaaagatgtgaatgtagagacaattgcagaccttttggtttcatctgtgttctgaagtataaaatacaaccaaaattctaccttcatcctacccagaaattattgattttcaagttttaaaaaaattgtaccttttttgctgacagaaaaggatcagatatgtataaaatagttgaacttgacagcatataacttaaagtgaaaatgtttttgccagaacatgtcttggtaccttgtgaaagcaggctgcccttgttcttgagatagactttaaaatgaaccagctctgaaaagtacttctgctgctctggtctatccctgaaaacagatgtcttgaaacacttttcatattcttaaaataatcttcacttctgttaagaagaacatgttggtgggtaattatgcgaatgtttccctgtccctgatttctcgattaggcgtatgggttttgaaaaagagatttttcagaagattgtcagcttcagtattcacgttccatcgtgtcatctgggtctgttagtgtagtgaccctcagtgcagtctgtcccagcgtttacgtccttgcttcctctgagcagaggcctccatcttagtatcaacatatttaaagaaattgatggtgttcatcaagctggggcctgtggcagttgttgcctgagcaccaagtaacccaagccacctatgtgacaacttctgggcccaggagtaatttctcagcattgagggtaaaataggatggagtgctctgttgatcatttgggagatgtaggttacctgatttgtgccttaggatgcagcgtgaagcagaagtccatattgcaattatgattttagaaggaactaagcattttactcacacccacagcagcaagaatgacctcctgcagcagatattccacctgtaatagcactttggaactgtgggcaaaaccaaaaggctagtgtttccatttattccatgttggtgtatggggttgaactggaaaattccctgaggcaaaactcactggccaaattttgagagggtatagaaaatgactttagagatgagtggttttgtgtatgtgtctgatgatattcagtctgatgttccgcaattttaaaagttataataaaataccatttttttaatctggaaggacattgatatatgaattcttagaatttgctattaaaaagggtagcccccattccagatt

SEQ ID NO: 68920 - DNA, 807 bp, Homo Sapiens
  misc_feature (605)..(608): n is a, c, g, or t
  misc_feature (611)..(612): n is a, c, g, or t
  misc_feature (615)..(617): n is a, c, g, or t
  misc_feature (620)..(620): n is a, c, g, or t
  misc_feature (624)..(626): n is a, c, g, or t
  misc_feature (628)..(633): n is a, c, g, or t
ggagtgcacggaggagttctgggggccaggcggccgccgcgagtctggtatcctgagcttcgtgagttgagcgctgctgctccgcggtggagtcaccgcaccgctcccgggatcatggtgttctacttcaccagcagcagcgttaattcatctgcctacactatttacatgggaaaagataaatatgaaaatgaagatctgatcaagcatggctggcctgaagatatctggtttcatgtggacaaactctcttcggctcatgtataccttcgattacataagggagagaatatagaagacatcccaaaggaagtgctgatggactgtgcccaccttgtgaaggccaatagcattcaaggctgcaagatgaacaacgttaatgtggtatatacgccggggtctaacctgaagaaaacagctgacatggatgtggggcagataggctttcacaggcagaaggatgtaaaaattgtgacagtggagaagaaagtaaatgagatcctgaaccgattagaaaagacccaaagtccgagcgggttcccaggacctagcagcagagaaagaatgcagagatcgtgaagagaagaatgagaaaaaaagccccnnnnccnncannnccncaannnannnnnnacatgtcgggccgccctcggcccctccaggaagcttttctaggaccatttccttttgggcgccgcgggcccccagtagggaaagtggaaccatgggccaataactgttttccctaagaaaatcccggggccattgaactagggggcttgggaattctcaccccaataaaaaaag

SEQ ID NO: 68921 - DNA, 983 bp, Homo Sapiens
  misc_feature (882)..(913): n is a, c, g, or t
atcaatgaaccaccaaaggcagctcccagacaagtttccctgccagttaccaaatctactgacaatgcatttgagaaccctttctttaaagattcttttggttcatcacaagcctctgtggcttcttctcaacctgtatcttctgagatgtatagggatccatttggaaatccttttgcctaaattctgaacttggtctgcagaccatccagaggaataaaaaggttggccttagtagtcaaaaacaaagctgatagccagacacgttctgatttctgcccttgttccagctttgacgtattatctgttgccttatttctcattgcctcttctacttgtaaaatgcttttcactttctgtctaggttaaagctaaactgaatctatggctttaaataaattaagatcctaaactctctagcttaagtgtaaatgaagtacagtagtttccctactgaaccctgcctcttgtgtccctggaaccttctagaacacctgccttctaccctctggttgggagatgcagccaccacatcccttcatatcatactgttttgaataaattttcaaatccttattgttcagagttgtttgggggttctgtttcagagcataaaacctaaaggttatagtagaacaaggcaccttcttaaaagaaatcttgcttcagaccatcagttacagagaatttctaaagtaaaattgaagcaactacaacttctccttagacactttggaatctaaccacttaaggacctttttaaagagatagcttctcttctttctgaagatcaatttctcccaaggccaagattgtccttttctcccatttcttgctagctattgcaaatgagggaagaacattattcatctctcctccccnnnnnnnnnnnnnnnnnnnnnnnnnnnnnnnngctcctgggttcaagtagtagtaccacccctttcacaagtaacagaccgtcaggatcctctagatcacca

SEQ ID NO: 68922 - DNA, 1386 bp, Homo Sapiens
  misc_feature (933)..(942): n is a, c, g, or t
  misc_feature (1249)..(1258): n is a, c, g, or t
  misc_feature (1280)..(1341): n is a, c, g, or t
tttattcaacaaacatttattaaacattcatatgccaaaaactatgctatggagatgcaaaaaataaaaaggttccttttcctgcccttaaggagctcacattctagtaaagacttttgaaaaataaaacaatacagtacgatttaagtgacatacaatagaggtaggttgtaattacagtggtgacacgaaagtggaagttagatgactctccttgagtggagcaaaggaggtttcacagaggaaatgcttatgtcaggcctgcaagatgcataggaattttccaagtggggaaggatgactagcacacttgatgcaaagagtacagcatttaccaaggcgggaggcctggccaaatgtggcttctgaagaagtgtaagtctgtttcaccagaacattcggtggaggaaacacatcagaagaccttgtacaccaaacagaggagtttggctttctcctgaaagttcctgaagtcactgaaggatattagggagtaacactgtcagagtgcttctagaaagcctgctgtggtaacattgagcaacagagaggagaccagctaggtataggaggcaggttagtactgtaggtatttattaataatagcaatgaagatgaaagagtgatgtatcagagaggtggagataaaatcagtaaaacttagacactaaatgataggggaaggtggaggagaggaatgagcctagaaaacttagaatataatggttctaaaattaaccaaagtaagggacacaggcattagagtaggttttgcagagaatgaatgttttaagacacacacaggtgtctctgggacaaccaagaaaagtgcaacaggcagatggattgaggagtctggctaaagataaggatttaggaactgctgaattaaaattacccaagcgtgagaagtggtgttgtgattaagagagnnnnnnnnnntggaggtctgaggaataacatttaaggaataaatgaagaggccaaaaggtggggggtggttcaggagtgagcaaaatgtaagaagtcaagggaataaatctttaaagtaggggttgtcaaaaatgtcaaatacagaaaaaaagtcaagtactagcttgtgaattaaactgtggatttagaattaagattttagactttacaggaagggactgttaaccagagagccaaatggcagattttagttaaggagccagtagaaggtgacaaagtagaggtaagaatattccttcaaaaagattggcagctnnnnnnnnnngaggccgggcgtggtggctcannnnnnnnnnnnnnnnnnnnnnnnnnnnnnnnnnnnnnnnnnnnnnnnnnnnnnnnnnnnnnaccatcctggctaacacggtgaaacactgcctctactaaaaatac

SEQ ID NO: 68923 - DNA, 1244 bp, Homo Sapiens
  misc_feature (117)..(130): n is a, c, g, or t
  misc_feature (428)..(436): n is a, c, g, or t
  misc_feature (921)..(954): n is a, c, g, or t
tcaggggtttccattcaatccccggttttgtggaaggggctttgccaatgttccgccaaagaaatgtctttaattgaaattttccaccccggtttcttgggatagaaggtgggccannnnnnnnnnnnnnttaaatttgaatattggaagcttgggccttgggacttcctgttgattaggatccaggttaatggccttcaggaaactcccattttgggatttggttcagaaaccgctcgggtttgccccgccgggccgtttttttatttggggaggaattccaaagccctaagttcatgccccaggatttccttagggaaaccagctaagggccaattttcactttccttactggggcccgcgcggccaaacgaaatggtttagaaagtttctggagggccggaggcggcccgacaagattaaaagannnnnnnnnagaggtcgggttcgggtaccaacatttttatttattcaaacattaagctaagaaaaattgttgtatgaaataatttataacacttctccccttcccttcagaatcttaaacaggaatccatttatctaccttataatcctaggaaggtattatttgattattcaagaaattcctcaatgatgctgccttttcccatgaaagaagttcctttttttccccgaatagacccctttcatgacccaccaaaaaccacaccaaatcttgaatacaatttcagctttattgaccccctaaagtctacaaatccttgggactctactgacccttgctgtaaagtgaagggagtgaaagtatttggaatataggtaggacctctaatataataaagatgtcactttaaaatcaatttattcaacaaacatttattaaacattcatatgccaaaaactatgctatggagatgcaaaaaataaaaaggttccttnnnnnnnnnnnnnnnnnnnnnnnnnnnnnnnnnnacttttgaaaaataaaacaatacagtacgatttaagtgacatacaatagaggtaggttgtaattacagtggtgacacgaaagtggaagttagatgactctccttgagtggagcaaaggaggtttcacagaggaaatgcttatgtcaggcctgcaagatgcataggaattttccaagtggggaaggatgactagcatacttgatgcaaagagtacagcatttaccaaggcgggaggcctggccaaatgtggcttctgaagaagtgtaagtctgtttcaccagaacattccc

SEQ ID NO: 68924 - DNA, 672 bp, Homo Sapiens
  misc_feature (92)..(92): n is a, c, g, or t
cggcacgaggagatataagaactcaaggtcccatactctgtattcgggatccatctgagatgcatgctaagctatgtgtatgtttttaattntgcactgctctttcctggcaatttgttttaatggttattgcagaatattaaggtacatgtctctctgttttaagtaatattgcactttataaaaaagtatgaataaagcaaactattttataaagtgcactgtttaaagcatttgcactgtatttttgccatttattttcattttctactttaaatttgtcctcacattcctcttctactttgtatgcaacaagtagaatggggcatgttgtgtcatgtagtcagccacttatgcaccaatgtgaggaaaacctaaagggaaattaaactaaacactgtgcttcatatttgtacactgtgttgtactacagtgaggaatttcctcctgtagtcatatattatgtacataatattttagaatcatacctatgacttgtttggaaatttttctgttaaattttaaatccagaaagcatattttataaacttatgcagagcacttttattgctcaaaagttctgaattcatacagaaaacaagtactatgtgatgaaaacatttcattaaaagattgctgcatttaaaaatacaattaattcgttccctatgc

SEQ ID NO: 68925 - DNA, 2559 bp, Homo Sapiens
ggcggccctctttggacaaccgcctttcaagaacgtaattgtgaatgggcttgtcctggcaagtgatggccaaaaaatgagcaaacggaaaaagaattatccagatccagtttccatcatccagaagtatggtgctgatgccctcagattatatctgattaactcccctgtggtgagagcagaaaacctccgctttaaagaagagggtgtgcgggacgtccttaaggatgtactgctcccatggtacaatgcctatcgcttcttaatccagaacgttttgtttttccagaaggaggaagaaatagaatttctctacaatgagaacacggttagagaaagccccaacattacagaccggtggatcctgtccttcatgcagtctctcattggcttctttgagactgaaatggcagcttataggctttatactgtggtgcctcgcctggtcaagtttgtagatattctgaccaattggtatgttagaatgaaccgcagaagattaaagggtgaaaatgggatggaggattgtgtcatggccctagaaaccttgtttagtgttctgctttctctttgcagacttatggctccctacacaccttttctcactgaattgatgtaccagaatctaaaggtgctgattgaccctgtttctgttcaggacaacgacacactcagcattcactacctcatgctgccccgtgttcgagaagaattgattgacaagaaaacagagagtgcagtatctcagatgcagtctgtgattgaacttggaagagtgatcagagaccgaaaaactattcccataaagtatcctttgaaaggaaattgtggttatccatcaagatccagaagctcttaaagatatcaagtctttggagaagtatatcattgaggaactcaatgttcgaaaagttacactgtctacagataaaaacaagtatggcattcggctaagggcagaaccagatcacatggtcctggggaagcgtctgaagggagcctttaaggcagtgatgacgtccatcaagcagttgagcagtgaggagctggagcagttccagaagactgggaccattgttgtggaaggccatgaattgcacgatgaagacatccgcctcatgtacacctttgatcaggccacaggtgggactgcgcaatttgaagcacactcagatgctcaggctttggtcctcttagatgtcactcctgaccagtcaatggtagatgaaggaatggctcgggaagtcatcaatcgcatacagaaacttcgcaaaaagtgcaatctggttccaactgatgaaatcacagtgtactataaagcaaagtctgaaggaacatatctgaatagtgttattgaaagccacacagagttcatatttaccaccataaaggctcccttgaaaccatatccagtttctccatcggataaagtccttattcaagaaaaaacacagttgaagggatctgaactggaaattacactcaccagaggatcttcccttcctggtcctgcttgtgcatatgtcaatcttaacatttgtgcaaatggcagtgaacaaggtggagtattgctcctggaaaatccaaaaggtgacaataggttggaccttttaaagctgaagagtgttgtcactagcatttttggtgtgaaaaatacagagctggctgtcttccatgatgaaacagaaatacaaaaccaaactgacttactgagtcttagtggaaaaacactttgtgtgactgcaggatcggctccctctctgatcaacagttctagtactcttctttgtcagtatatcaacctacagctcctgaatgcaaagccacaagagtgtttaatggggacagtgggcactctcctgcttgaaaacccacttgggcagaatggactcacccaccaaggtcttctgtatgaagcagccaaggtgtttggccttcggagcaggaagctaaagctgtttctgaatgagacccaaacgcaggaaattacagaagacatccccgtgaagactttgaatatgaagactgtgtatgtttctgtgttaccaacaacagcagacttctagcatgtacttatcaatgttgttcggtcagcccttccctaattacacctatcccctacacatacatgcacatagacacacacatgaacacactgaagatatttccttcaggtgtgtgtaaaatatgctgcttggattgaaattcaaatgggattgattagtcaagtaacttgagacctcacagtaatcttcacacttaaccttagacacctatgcagtcatgttgggagcaggttacaatgttacttcagcccacagtttatttctatacttgagttcttaagtacagaagatagaagtgatttaaatggcatagtatatatatcattttctggccttttaaaatttatttgagacctcttgatgaaatggacatattatatatttctgccacctggattttcctggataatttgatggaatattttaagtttcagtaaatcagaacaataaacaaactcagatataaagaaaaaacaccaccaaacacaaaaac

SEQ ID NO: 68926 - DNA, 859 bp, Homo Sapiens
  misc_feature (42)..(76): n is a, c, g, or t
ggaacgacgagcgcagcgagttagtgagcgaggaagcggcgnnnnnnnnnnnnnnnnnnnnnnnnnnnnnnnnnnncagtcgacggtaccggacatatgcccgggaattcggccattacggccggggatatttgagtgggcggtggcgatggtgttggcggtctggctcagctgggcagggggtaactttactgatttgggggtggttttttagtttaatttttcttttctagcttcccatcgacggtcagtgcgcacgttgtaatcagctgaggccatgtcaggagacggagccacggagcaggcagctgagtatgtcccagagaaggtgaagaaagcggaaaagaaattagaagagaatccatatgaccttgatgcttggagcattctcattcgagaggcacaggtttagtgatataggattacatttccttctctatgggtccaatcacactacttggttctgcagtgaataatattttcataatcctaacattgtaaatgctgtttattggttttcaattttagaatcaacctatagacaaagcacggaagacttatgaacgccttgttgcccagttccccagttctggcagattctggaaactgtacattgaagcagaggttactattttattttattttttcttatatcagtattgcagcattcactgtagtgatagaaaacaagttaggaacatagccaattaggacaaggaggatttaaatgtgtcttacctttattttgtaaaataggtataaaggagtaattaaaatgaatttttgaaatttgggtcttttacaagctgatgattgttgcattttggagttgcaacaacattaaaacagtttcaatggt

SEQ ID NO: 68927 - DNA, 727 bp, Homo Sapiens
  misc_feature (118)..(118): n is a, c, g, or t
  misc_feature (128)..(128): n is a, c, g, or t
tgccagggtggaaatgcacagagggtagaatgtatttagctatcacaacagtttcctgatagctgataggaatgaagcctggattctggagactgcagggaagtactgggcagcaganaaaagtacanagagggagttcgtaatatttctaatcaactttccataacaaccaagattgcccgggaacacccagacatgagaaactatgctaagcggaaaggttggtgggatggtaaaaaggagtttgattttgctgcagcatattcctatcttgacacagccaagatgatgacttcatcaggcagatactgtgagggctacaagcttctaaataagcacaaaggaaatataacttttgaaacaatgatggaaattcttcgagataaaccaagtggcattaatatggagggagaattcctgaccactgcaagcatggtttctattttacctcaagactccagccttccttgcattcacttctttacagggactcctgatcctgagagatctgtttttaagcctttcatatttgtgccacatatttcacaactattggataccagttcaccaacatttgaacttgaagatctagttaaaaagaaatcacattttaagcctgacagaagacacccactctaccaaaaacatcaacaggcattggaagtagtaaataataatgaggaaaaagccaaaataatgttggacaacatgaggaaactggagaaag

SEQ ID NO: 68928 - DNA, 1431 bp, Homo Sapiens
  misc_feature (132)..(236): n is a, c, g, or t
  misc_feature (260)..(279): n is a, c, g, or t
ggtagttctcattgccattttcttactgagttgtagtaccagattgagtcccaagtcatattcttactgatttttaggctgtagtatacaaaatttaaaactttaatgaacagccaagcacggtcactcatnnnnnnnnnnnnnnnnnnnnnnnnnnnnnnnnnnnnnnnnnnnnnnnnnnnnnnnnnnnnnnnnnnnnnnnnnnnnnnnnnnnnnnnnnnnnnnnnnnnnnnnnntgaaagagctagaccttgtctccnnnnnnnnnnnnnnnnnnnntcaaagctttaatgaacatccttaattagatatggcaataatatcctttggtcattgagtaaaactctttatttttatatacttaaaagtgttctttttattttaaaacatctgtataatttttagttaaaaaaaatggaacctttttcctgtgacactttcgtggcattacctccagcaacagtcgataacaggattatttttggaaaaaattcagatagactctatgatgaagtacaagaggtggtttattttcctgctgtagttcatgataacctgggagaacgtcttaagtgtacatatatagaaattgatcaagttcctgaaacatatgctgttgtcctgagtcgcccagcgtggttgtggggggcagaaatgggagccaatgagcatggagtttgcattgggaatgaagctgtatggggaagagaagaagtttgtgatgaagaagcactattaggaatggaccttgtcagacttggccttgaaagagctgatacagctgaaaaagccctcaatgtcattgttgacttactagaaaaatatggccagggtggaaattgcacagagggtagaatggtatttagctatcacaacagtttcctgatagctgataggaatgaagcctggattctggagactgcagggaagtactgggcagcagaaaaagtacaagagggagttcgtaatatttctaatcaactttccataacaaccaagattgcccgggaacacccagacatgagaaactatgctaagcggaaaggttggtgggatggtaaaaaggagtttgattttgctgcagcatattcctatcttgacacagccaagatgatgacttcatcaggcagatactgtgagggctacaagcttctaaataagcacaaagacgccaaattccagcgaaacagctgatgccagccagcttgaagacccctgccacagaagaagggaatcagcatgagaatacagcttcttcatctcgctgtcccatgacttcgccctgtactcttcagccaattaatgatctccacacttgggaccactctaaaacccttaagaacctgagactcaaagtcctcctggagacgaatttgaggtttcctcctatctgtgtttggtggccctatgattaaacctctttctcttctg

SEQ ID NO: 68929 - DNA, 743 bp, Homo Sapiens
  misc_feature (31)..(31): n is a, c, g, or t
  misc_feature (655)..(667): n is a, c, g, or t
acatgaactatgcctatgtagtgtctttatntgctcagctggctgagacactgaagaagtcactgaacaaaacctacacacgtaccttcatgtgattcactgccttcctctctctaccagtctatttccactgaacaaaacctacacacataccttcatgtggttcagtgccttcctctctctaccagtctatttccactgaacaaaacctacgcacataccttcatgtggctcagtgccttcctctctctaccagtctatttccattctttcagctgtgtctgacatgtttgtgctctgttccattttaacaactgctcttacttttccagtctgtacagaatgctatttcacttgagcaagatgatgtaatggaaagggtgttggcactggtgtctggagacctggatttgagtcttggtgctatcaatcaccgtctgtgtttgagcaaggcatttggctgctgtaagcttattgcttcatctgtaagcggtggtttgtaattcctgatcttcccacctcacagtgatgttgtggggatccagtgagatagaatacatgtaagtgtggttttgtaatttaaaaagtgctatactaagggaaagaattgaggaattaactgcatacgttttggtgttgcttttcaaatgtttgnnnnnnnnnnnnntgttaagaaatgggtttcttgccttaaccagtctctcaagtgatgagacagtgaagtaaaattgagtgcactaaac

SEQ ID NO: 68930 - DNA, 625 bp, Homo Sapiens
  misc_feature (58)..(70): n is a, c, g, or t
ctcccacgagaaagaaagtagttttaaggtccagcttcttagtctacttgaagcaaannnnnnnnnnnnnatatttctgaatataaatatactcttatatgggctaaaaagaccccatgaataaatagcaggttcagtagttgaggagtggagtttagtaggtttgttttcagtataaattagataacatgtggaggtcacagcattttggaaattgagtgtccccaagtgagctttgtttataaactttcaaaatgtcggaagtggacaggtttgttaaatcttgtctgccagcacccttttcttcctttgttccttttcctctctgtgttattgcctgcggcagccagtccttcatactagatagagttcagataaagcaaacgtttggcaaaaacatactgtttgacctcctccccctctgcttatgaaggggtagcatgattctgtgttttaaagcagtgatgtttcagctgtgaaatgcactcgctgtaagctctaggctgagtgcatggaaactgttacgcttctcattttatgtgatctcctaattggtatgtagcaaaaattttctaaaactgttttgtggcttgttttgtaataaaaccatgtgaaatactgaaaa

SEQ ID NO: 68931 - DNA, 722 bp, Homo Sapiens
  misc_feature (89)..(89): n is a, c, g, or t
tgaaataaaagttaaaacactggtgtatttcaggtgtacttgtgtttatgtactcctgacgtataaaaatggaataatactaatcttgntaaaagcaatagacctcaaactattgaaggaatatgatatatgcaatttaattttaattccttttaagatatttggacttcctgcatggatatacttaccatttgaataaaaggaccacaacttggataatttaattttagggtttgaaatatatttggtaatcttaactattcgtgtactcatttatgcatagacgactcgtttatgaatgggtagagccacagaacgtatagagttaaccaaagtgctcttctctagaatctttacacctcctgtgtggttacaagttaactttgtaagtagcgtaccttccttccttaaaatatctagcttcctgtgccctttcatagatattcgattaatttttacattttaaacaagttgactatttcctttaggggttttgtttcaaacttttctgtcatctgtctctactacctcagaaactgcagcttggttctgatgatagaaattgaatttttccttgtagttattgtgataaagtatgaatatttttagaaagtctataccatgttctttcgttaaagatttgctttatacaagattgttgcagtacctttttctggtaaattttgtagcagaaataaaatgacaattcctaagagccaaaa

SEQ ID NO: 68932 - DNA, 439 bp, Homo Sapiens
  misc_feature (60)..(70): n is a, c, g, or t
ggtgcgctatgattaaaaccattcatatagagttagtctttacaactactattctgttannnnnnnnnnnaatctgacaacatttgtcctaagtaagataagcaaaaaaattcttcaactccttttggcaagaaaactgtaacagaaaataaattttgaatgtgtacttaagtctttattatatttgaagcaattttttttcaattttaaaagctgaatgaagacaacttaggttgctaacctagttcaaaatgaaattatttagataccaatttttaaaatactggagagaatttatatgtctttttccagagttctgatgataagcatttggagtgcatttattcctccagataataaatgtgtgttcagaactttttgtgttttttaaggcattaataaagccttcgataatattaaatacaaaatgagaccaaaa

SEQ ID NO: 68933 - DNA, 724 bp, Homo Sapiens
  misc_feature (66)..(66): n is a, c, g, or t
  misc_feature (101)..(102): n is a, c, g, or t
  misc_feature (104)..(106): n is a, c, g, or t
  misc_feature (108)..(108): n is a, c, g, or t
  misc_feature (165)..(165): n is a, c, g, or t
  misc_feature (170)..(186): n is a, c, g, or t
  misc_feature (189)..(334): n is a, c, g, or t
  misc_feature (339)..(352): n is a, c, g, or t
gtgttagtcctttgatttttgggtgtatcgtgttattgtagggatccggcgcgaggatctgagggnacacgactggtgcagtagggcccgggcggtgaggnngnnngncgctccttcccccagtcagacgagaccattctggttaacacggtgaaaccctgtttntactnnnnnnnnnnnnnnnnnttnnnnnnnnnnnnnnnnnnnnnnnnnnnnnnnnnnnnnnnnnnnnnnnnnnnnnnnnnnnnnnnnnnnnnnnnnnnnnnnnnnnnnnnnnnnnnnnnnnnnnnnnnnnnnnnnnnnnnnnnnnnnnnnnnnnnnnnnnnnnnnnnnngaggnnnnnnnnnnnnnngacgcgtgcctgcggtgaggaagctgggcgctgttttcgagttcaggtgaattagcctcaatcccccgtgttcacttggctcccatagccctcttgatggatcacgtaaaactgaaaggcagcggggagcagacaaagatgaggtctacactgtccttcatggggattaaagctatggttatattagcaccaaacttctacaaaccaagctcagggccccaaccctagaagggcccaaatgagagaatggtacttagggatggaaaacgggcctggctagagcttcgggtgtgtgtgtctgtctgtgtgtatgcatacatatgtgcgtatatatggttttgtcaggtgtgtaaatttgcaaattgtttcctt

SEQ ID NO: 68934 - DNA, 1176 bp, Homo Sapiens
  misc_feature (1007)..(1007): n is a, c, g, or t
cgatccgtatgagaagtacgcgatgggagatcagggcagaggagaacgacgggaatagtggagaaggggaggagccatacaaaggagtatcggggatgacagaagttagggattcgaaagattccaagtgaaaggaccgtagaggaacaaattatgtaagaggcagccttagccccaaaactcccgtgttatccgagagaatttgtgtaatgttggcggtgccaattaaccagggaaaaaggatggcatgataccaaagtaaaaggaatcgatctagggaatgtggcccttggggcccagaatttcagcccgggcgttggagcccccgcggacttaagactttcacggtgagaagaaggtgaacactaagatggttaccttctcattcatgtcaagtatgtggttcattcttagaaccaagggaaatactgctccccccatttgctgacgtagtgctctcatgggctcacctgggcccaaggcacagccagggcacagttaggcctggatgtttgcctggtccgtgagatgccgcgggtcctgtttccttactggggatttcagggctgggggttcagggagcatttccttttcctgggagttatgaccgcgaagttgtcatgtgccgtgcccttttctgtttctgtgtatcctattgctggtgactctgtgtgaactggcctttgggaaagatcagagagggcagaggtggcacaggacagtaaaggagatgctgtgctggccttcagcctggacagggtctctgctgactgccaggggcgggggctctgcatagccaggatgacggctttcatgtcccagagacctgttgtgctgtgtattttgatttcctgtgtatgcaaatgtgtgtatttaccattgtgtagggggctgtgtctgatcttggtgttcaaaacagaactgtatttttgcctttaaaattaaataatataacgtgaataaatgaccctatctttgcgcccacccacccgtagcgttagtgcggnggccgtggtgggccggcctcgggcccttcaagaaagtttctaagaccttttcgttttggcccgggggggccccagtagggtaacgggaaacccggggccactaacctggtttccttaaggggaaatccccgggccaatgaccaaggggctttggaattccccccccaac

SEQ ID NO: 68935 - DNA, 1047 bp, Homo Sapiens
  misc_feature (788)..(815): n is a, c, g, or t
  misc_feature (1004)..(1004): n is a, c, g, or t
  misc_feature (1023)..(1023): n is a, c, g, or t
  misc_feature (1025)..(1025): n is a, c, g, or t
cctcttgcctgccccctaaaacttgactgtggcactcagggtcaaacagactatccattccccagcatgaatgtgccttttaattagtgatctagaaagaagttcagccgaacccacaccccaactccctcccaagaacttcggtgcctaaagcctcctgttccacctcaggttttcacaggtgctcccaccccagttgaggctcccacccacagggctgtctgtcacaaacccacctctgttgggagctattgagccacctgggatgagatgacacaaggcactcctaccactgagcgcctttgccaggtccagcctgggctcaggttccaagactcagctgcctaatcccagggttgagccttgtgctcgtggcggaccccaaaccactgccctcctgggtaccagccctcagtgtggaggctgagctggtgcctggccccagtcttatctgtgcctttactgctttgcgcatctcagatgctaacttggttctttttccagaagcctttgtattggttaaaaattattttccattgcagaagcagctggactatgcaaaaagtatttctctgtcagttccccactctataccaaggatattattaaaactagaaatgactgcattgagagggagttgtgggaaataagaagaatgaaagcctctctttctgtccgcagatcctgacttttccaaagtgccttaaaagaaatcagacaaatgccctgagtggtaacttctgtgttattttactccttaaaacccaaactctaccttttcttgttgnnnnnnnnnnnnnnnnnnnnnnnnnnnnggttaccttctcattcatgtcaagtatgtggttcattcttagaaccaagggaaatactgctccccccatttgctgacgtagtgctctcatgggctcacctgggcccaaggcacagccagggcacagttaggcctggatgtttgcctggtccgtgagatgccgcgggtcctgtttccttactggggattnagggctgggggtcagggananttcttttctgggagttatgacc

SEQ ID NO: 68936 - DNA, 625 bp, Homo Sapiens
caacaaacaggtttgtgagtgttcccaatctaagtgccctggaatctggtggagtgggcaatggacatcctaaccgcctggatcccattcctaatcccccagtccacgatattgagttcaacagcagcaaaccacttccacagccagtgccacctaaagggcccaagacatttttgaggtatcagtaagatgcatgtgcatgagctcaaggaacatgactactggagtttccattacacattgttgcgtgccttgtaattttccccaaagacgtcctgctcagagtgaagcttctccagtggcttctccagatccccagcgccaggagtggtttgccccgtacttcacattctgaaagaattgtgttggcacagctctgtatagactgttactaagagcatgactttatacagattgttatgtaaataggctttcctatgtcaaacactgtgaatgagaaagtatttgtctctccaacttgaaaatgcactgtatttcctgtgatatttattggaatcattctataaggtactatattatgtgtgtaattataactgttatttttatttgagatggaagagtctttaacctttgtaattactgcataataaattttgttagaatc

SEQ ID NO: 68937 - DNA, 699 bp, Homo Sapiens
  misc_feature (28)..(28): n is a, c, g, or t
  misc_feature (69)..(69): n is a, c, g, or t
  misc_feature (99)..(99): n is a, c, g, or t
  misc_feature (147)..(147): n is a, c, g, or t
aaaagtgctgaaagagaggaccattatntattctctcgtttcccacaattcttactgaattttttatcnaaagaaggtgacatttttgcagttgttttntgttctttgtgattgttgtgatgtggctcctccttaactgacttcatntgagctgctgatgcactcttatgctctcatggagtggagaaccgattctagtatagagggggtagcaaatctttaaaacacgacttacaacatggggaacccgttgtggtaatctatgctgatgttttatgtgcttttgccttcattttgcaaaatgacttaatgctgggttacatgtctctctttttatgaattcagtcctgctcagagtgaagcttctccagtggcttctccagatccccagcgccaggagtggtttgcccggtacttcacattctgaaagaattgtgttggcacagctctgtatagactgttactaagagcatgactttatacagattgttatgtaaataggctttcctatgtcaaacactgtgaatgagaaagtatttgtctctccaacttgaaaatgcactgtatttcctgtgatatttattggaatcattctataaggtactatattatgtgtgtaattataactgttatttttatttgagatggaagagtctttaacctttgtaattactgcataataaattttgttagaatcaa

SEQ ID NO: 68938 - DNA, 573 bp, Homo Sapiens
  misc_feature (11)..(11): n is a, c, g, or t
gcacgaggctnaagcaaaagaagaagaatgataaatcaccaacaaacaggtttgtgagtgttcccaatctaagtgctctggaatctggtggagtgggcaatggacatcctaaccgcctggatcccattcctaattctccagtccacgatattgagttcaacagcagcaaaccacttccacagccagtgccacctaaagggcccaagacatttttgagtcctgctcagagtgaagcttctccagtggcttctccagatccccagcgccaggagtggtttgcccggtacttcacattctgaaagaattgtgttggcacagctctgtatagactgttactaagagcatgactttatacagattgttatgtaaataggctttcctatgtcaaacactgtgaatgagaaagtatttgtctctccaacttgaaaatgcactgtatttcctgtgatatttattggaatcattctataaggtactatattatgtgtgtaattataactgttatttttatttgagatggaagagtctttaacctttgtaattactgcataataaattttgttagaatcaaaa

SEQ ID NO: 68939 - DNA, 1718 bp, Homo Sapiens
  misc_feature (74)..(108): n is a, c, g, or t
aatgataatactatgggcgctaggtcggtttatcgaacgacgagcgcaacgagtagtgagcgaggaagcggcgnnnnnnnnnnnnnnnnnnnnnnnnnnnnnnnnnnncagtcgacggtacggacatatgcccgggaattcggcattacgggcggggaggcgggcggcctaccagccggcagctccggagctgcccgcgccatgtccgcgcacaatcggggcaccgagctcgaccttagctggatctccaaaatacaagtgaatcacccggcagttctgaggcgtgcggaacaaatccaggctcgcagaaccgtgaaaaaggagtggcaggctgcttggctcctgaaagctgttacctttatagatcttactacactttcaggtgatgatacatcttccaacattcaaaggctctgttataaagccaaatacccaatccgggaagatctcttaaaagctttaaatatgcatgataaaggcattactacagccgccgtttgtgtttatcccgcccgggtgtgtgatgctgtaaaagcactcaaggctgcaggctgtaatatccctgtggcatcagtggccgctggatttccagctggacagactcatttgaagacacgattagaagagatcagattggctgtggaagatggagctacagaaatcgacgtggtaattaacagaagcttggtgctgacaggccagtgggaagccctgtatgatgagattcgtcagtttcgcaaggcctgtggggaggctcatcttaaaactatattagcgacaggagaacttggaactcttactaatgtctataaagccagtatgatagcaatgatggcaggatcagattttattaagacctctactggaaaagaaacagtaaatgccaccttcccggtagctatagtaatgctgcgggccattagagatttcttctggaaaactggaaacaagatagggtttaaaccagcaggaggcatccgcagtgcaaaggattcccttgcttggctctctcttgtaaaggaggagcttggagatgagtggctgaagccagaactctttcgaataggtgccagtactctgctctcggacattgagaggcagatttaccatcatgtgactggaagatatgcagcttatcatgatcttccaatgtcttaaatcagtcaccagttccagaaaagttctttacgacaatgtttaaaaattatttttctacgtaattgctaaaattatttaattaaaaaattgggcagtaggtaactggcattcctctctttaaaatttctaccgaacttaatggaatggaaaaagcaaactcatccacatgtggtactcatttcaggcacatctgaaatgatcttaattactagaagatctgcactattaactttgtgaagagtttctcctaaaaactttaagtaaaatgttaatggtagctttgataacatcaaattctaagggagaaaaaaacaatattaaaccgcccaagcagtgtgccctagcagaggaaaatgcaacatctcgcaagcgctgctgtaacgacttcaggagtcactgattcagcactaatttcctgctgtgaaaactcatctttcatttttgccgtggataggcgcttttattaattgttgtcctaatgaaatttctgacattgtcatatacaacgatgaatatcattaaaatttttaaaataataaagttcctatagtttatttttt

SEQ ID NO: 68940 - DNA, 454 bp, Homo Sapiens
gcatattagtaaatgtgtgttggcatgtgtgtgttggggagtgtatgtgatctgggtgtttgtttatctctgttattattcccctttagctttattttagtcaactctacattatgatgaatttcaaaatgaagctgtattaaaataattgtaatataacaattcaatctcacatgttactgcagatagttaacttttgctgcaatctattgtacatttgcaattttctgtgttagtaaacttagcagaatctggttatttatttttgtgtaggcttaatgttcactgaaagataagtcaattactgttagtaaaaaattaaggtactctcactgcagagatttaaggcctgggcctaatgtgctgtattatgaagccttgtgactgaaaaatatgtttacatatgttgtctatttttttaataaacttttatagctggtctatttgctcagta

SEQ ID NO: 68941 - DNA, 621 bp, Homo Sapiens
taaaagaaggaatgataagaataaatttaatttaccaaatattgttaattaaaattttagatacttaacatttatttaacttaaataaaagataactgtcagataaaactttattttactaatgagcagtgattttcttaggaattgatgaaggcttattggtatcaagaatttaaaccaaattaaaactgacagaggacatttagatacataataaaattcgagctacataagtatatggaaactaatgtaccttgattattatgaaatagagcatcttgaaattcagttttactctaaatgtacttttaatacttgcagattctaagattacattgtaaaattccaggttttcataatgttaaaataggaaagtagaatataaagtatcaacaagtgtagttatacattttgttttggatatttaatccttacttgggaaaaaatcagcatctaggtaaattattattttaataagaactcttaaattgccaacctctgagaggtgaaaagctatgtaaatagaaggaatggccagttcaaaagaatagtagatgtgatagtgccgtgaatgtattctactggaaatgaatgtaataatacattaaatttttaaaatct

SEQ ID NO: 68942 - DNA, 1027 bp, Homo Sapiens
  misc_feature (48)..(48): n is a, c, g, or t
  misc_feature (66)..(66): n is a, c, g, or t
  misc_feature (73)..(73): n is a, c, g, or t
  misc_feature (105)..(105): n is a, c, g, or t
taggattgccctcgagccaagatcggcacgagtatatgaaaaaacttntgacatcccagacatcangggaatntataaaaatgcagtactgtctgagcagatcgnaatgccgatgagtggatgcattcctttgtgcagcccagtgcacggtgcccccccctcgggtgtccgtgctgtgccttagcttccccaggtgccgggactcacacctgctaggggctgggcaaggccccggctctgctttctctgaagggcttgtccaagttcattgccctgttacaggtggtcaagacgtccggccgccttgacccaggctacccttagccaatatcctctgcccctgggtggctggtggctgggcctcagggtgggcaacgttaggggtttggcgaaagcccgccccatgggattgagggacggggctgcactccaaccgtctgcacctgctcttcccccacccctgtgggacctcatcttcacgtgccatgtgtgctgaaggcccagggcccagcagggggcagtggcacctgttgacggaaaaggccgaggtgcttaccagtggaccttctggcccgcccctcccctgtcacttgtcgggcatccagggccccgacctgtgcctagccgccagggtgacagaaggcagaactgaagcggggtctgggccacgggccaggccactgccttttgtcctcagtgaccatacattcctgctctcggacttgaactctactgtaactgttttcttgaaatgaagctgtacaggacgattcactgccatgccagtcaggcgggcttgccatgttctgtgaatctcgagtgagcggtgccacccgcccccatacctccgccaccggccgctgtcggggatgccacagcctgccacggtcgcagccagacgtgagcttggcattgaagttgcaaagcggcccctggccgggctcgccgtcgctgtccagggccgtgtccggtgctgtggctgtaaagctgtaggaccctttttaataaatagagaattattaataaa

SEQ ID NO: 68943 - DNA, 942 bp, Homo Sapiens
ttcccgacggttaatatgtaggacagtcctttaccctatgggccctcgtggacccggtgtttcccggcacccctccaagggaaggttccccagaagcgtttcttccccgcccgggaactgggccggccgggcccgtcccacctatagacagagggaccatacctgcctcactctgcgccgcgcctgctgctggtgcaacacagcactctgcttcgcacagcatgtgctcattgtggtcgatttctgtgtagggactgagctgttgatgttgtggtgcactcttcttgcttactgctttcttcagctttgatcattgcatgcaggtttgattttgtaataagacttccagcaacaatggtattctggtatccttcaagatcctcaagttctttaggtttgggcccagcgagattcttttgtttgagaattataatagtaaggctttccagaatctgatttgtattccttccaggggcatttagataagagttgctcagcaggtgttttaagatcatctggtttctcccaggtagactgtttggtttcagtgttgtagtagtaagtccttccatcaggtgatttatgttcagtccacattgattttgcaccagatgctgtacctgctgctacatccatactatttactcctggcggtaaggcaggctgcatggaagcctgagacatatgagacatcatcattccaggcattactgacgacatcattccaggcatttgtcccattggtggccctcccatagggggcatcatctgcggcatcattccatgaggtacaggaggcatattcgctctctgacccatagggtgcattcccattggggcataatgcatgccagggtgccccatcatgaggcctccacgctcagctcccgtccccgatctgattgaggggctcagactgctccgccggcggccattgccgtt

SEQ ID NO: 68944 - DNA, 1035 bp, Homo Sapiens
  misc_feature (513)..(569): n is a, c, g, or t
gggatgatgccccctatgggagggccaccaatgggacaaatgcctggaatgatgtcgtcagtaatgcctggaatgatgatgtctcatatgtctcaggcttccatgcagcctgccttaccgccaggagtaaatagtatggatgtagcagcaggtacagcatctggtgcaaaatcaatgtggactgaacataaatcacctgatggaaggacttactactacaacactgaaaccaaacagtctacctgggagaaaccagatgatcttaaaacacctgctgagcaactcttatctaaatgcccctggaaggaatacaaatcagattctggaaagccttactattataattctcaaacaaaagaatctcgctgggccaaacctaaagaacttgaggatcttgaagcaatgatcaaagctgaagaaagcagtaagcaagaagagtgcaccacaacatcaacagccccagtccctacaacagaaattccgaccacaatgagcaccatggctgctgccgannnnnnnnnnnnnnnnnnnnnnnnnnnnnnnnnnnnnnnnnnnnnnnnnnnnnnnnncaatgctaatgcttccacttctgcttctaatactgtcagtggaactgttccagttgttcctgagcctgaagttacttccattgttgctactgttgtagataatgagaatacagtaactatttcaactgaggaacaagcacaacttactagtacccctgctattcaggatcaaagtgtggaagtatccagtaatactggagaagaaacatctaagcaagaaactgtagctgattttactcccaaaaaagaagaggaggagagccaaccagcaaagaaaacatacacttggaatacaaaggaagaggcaaagcaagcttttaaagaattattgaaagaaaagcgggtaccatcgaatgcttcatgggagcaggctatgaaaatgattattaatgatccacgatacagtgctttggcaaagttaagtgaaaaaaagcaagcctttaatgcctataaagtccagacggaa

SEQ ID NO: 68945 - DNA, 487 bp, Homo Sapiens
tcatcttcttccacaataggccaaccttgtgcattcatccgcaaattttgattggctccaggattaacaaccacttgaggagcagcattctgattggcaggctggttttcagctggaaactgttgttgaataggggctggagcaggtgcagagaccacaggtatctcttgtgcacttggtggtggaacaaaagcccctgatgcagcagtggctgctaaatattgcatgtagtactgtcgtgcatatatctgctggaaccaggaaagctgaagccacccatagggtgtgtaaccggagaaaccaggacccaggccttggaatgcctgctggacagccttcaggcctatacatagatttgaaaaaaacactcattttgagtgggttgagtatgaacaaatgaaaactaagtttaaattaaaatcaagaattcaaatcgacccggccgtaatggccgaattcccgggcatatgtccggtaccgtcgactg

SEQ ID NO: 68946 - DNA, 1010 bp, Homo Sapiens
gctggtaccggtccggaattcccgggatatcgtcgacccacgcgtccgcgtgaacggtcgttgcagagattgcgggcggctgagacgccgcctgcctggcacctaggagcgcagcggagccccgacaccgccgccgccgccatggagtccgagaccgaacccgagcccgtcacgctcctggtgaagagccccaaccagcgccaccgcgacttggagctgagtggcgaccgcggctggagtgtgggccacctcaaggcccacctgagccgcgtctaccccgagcgtccgcgtccagaggaccagaggttaatttattctgggaagctgttgttggatcaccaatgtctcagggacttgcttccaaagcaggaaaaacggcatgttttgcatctggtgtgcaatgtgaagagtccttcaaaaatgccagaaatcaacgccaaggtggctgaatccacagaggagcctgctggttctaatcggggacagtatcctgaggattcctcaagtgatggtttaaggcaaagggaagttcttcggaacctttcttcccctggatgggaaaacatctcaaggcctgaagctgcccagcaggcattccaaggcctgggtcctggtttctccggttacacaccctatgggtggcttcagctttcctggttccagcagatatatgcacgacagtactacatgcaatatttagcagccactgctgcatcaggggcttttgttccaccaccaagtgcacaagagatacctgtggtctctgcacctgctccagcccctattcacaaccagttttccagctgaaaaccaagcctgccaatcagaaatgctgcctccctcaagggggttggttaatccctggaagcccaatccaaaattttgccgggatgaaatggcacaaagggggggccccctaattggtggagaagaaagatggatggaaaataaaactccaagattggggttgggaattttggaaccttattttccggcgcggcttacatttt

SEQ ID NO: 68947 - DNA, 1926 bp, Homo Sapiens
ggcagtaactactccacggtctttaggtagcgaggcctgggtggcgaattcggcacgagggtgaactgtcgttgcagagattgcgggcggctgagacgccgcctgcctggcacctaggagcgcagcggagccccgacaccgccgccgccgccatggagtccgagaccgaacccgagcccgtcacgctcctggtgaagagccccaaccagcgccaccgcgacttggagctgagtggcgaccgcggctggagtgtgggccacctcaaggcccacctgagccgcgtctaccccgagcgtccgcgtccagaggaccagaggttaatttattctgggaagctgttgttggatcaccaatgtctcagggacttgcttccaaagcaggaaaaacggcatgttttgcatctggtgtgcaatgtgaagagtccttcaaaaatgccagaaatcaacgccaaggtggctgaatccacagaggagcctgctggttctaatcggggacagtatcctgaggattcctcaagtgatggtttaaggcaaagggaagttcttcggaacctttcttcccctggatgggaaaacatctcaaggcctgaagctgcccagcaggcattccaaggcctgggtcctggtttctccggttacacaccctatgggtggcttcagctttcctggttccagcagatatatgcacgacagtactacatgcaatatttagcagccactgctgcatcaggggcttttgttccaccaccaagtgcacaagagatacctgtggtctctgcacctgctccagcccctattcacaaccagtttccagctgaaaaccagcctgccaatcagaatgctgctccctcaagtggttgttaatcctggagccaatcaaaatttgcggatgaatgcacaaggtggcccctattgtgggaagaagatgatgaaataaatcgagaatgggttggattggacctattcagcagctacattttctgtttttctcagtatcctctacttctactcctccctgagcagattcctcatggtcatgggggccaccgttgttatgtacctgcatcacgttgggtggtttccatttagaccgaggccggttcagaacttcccaaatgatggtcctcctcctgacgttgtaaatcaggaccccaacaataacttacaggaaggcactgatcctgaaactgaagaccccaaccacctccctccagacagggatgtactagatggcgagcagaccagcccctcctttatgagcacagcatggcttgtcttcaagactttctttgcctctcttcttccagaaggccccccagccatcgcaaactgatggtgtttgtgctgtagctgttggaggctttgacaggaatggactggatcacctgactccagctagattgcctctcctggacatggcaatgatgagtttttaaaaaacagtgtggatgatgatatgcttttgtgagcaagcaaaagcagaaacgtgaagccgtgatacaaattggtgaacaaaaaatgcccaaggcttctcatgtctttattctgaagagctttaatatatactctatgtagtttaataagcactgtacgtagaaggccttaggtgttgcatgtctatgcttgaggaacttttccaaatgtgtgtgtctgcatgtgtgtttgtacatagaagtcatagatgcagaagtggttctgctggtacgatttgattcctgttggaatgtttaaattacactaagtgtactactttatataatcaatgaaattgctagacatgttttagcaggacttttctaggaaagacttatgtataattgctttttaaaatgcagtgctttactttaaactaaggggaactttgcggaggtgaaaacctttgctgggttttctgttcaataaagttttactatgaatgaccctgaaa

SEQ ID NO: 68948 - DNA, 943 bp, Homo Sapiens
  misc_feature (771)..(771): n is a, c, g, or t
taggtagcgaggcctgggtggcgaattcggcacgagggagattgcgggcggctgagacgccgcctgcctggcacctaggagcgcagcggagccccgacaccgccgccgccgccatggagtccgagaccgaacccgagcccgtcacgctcctggtgaagagccccaaccagcgccaccgcgacttggagctgagtggcgaccgcggctggagtgtgggccacctcaaggcccacctgagccgcgtctaccccgagcgtccgcgtccagaggaccagaggttaatttattctgggaagctgttgttggatcaccaatgtctcagggacttgcttccaaagcaggaaaaacggcatgttttgcatctggtgtgcaatgtgaagagtccttcaaaaatgccagaaatcaacgccaaggtggctgaatccacagaggagcctgctggttctaatcggggacagtatcctgaggattcctcaagtgatggtttaaggcaaagggaagttcttcggaacctttcttcccctggatgggaaaacatctcaaggcctgaagctgcccagcaggcattccaaggcctgggtcctggtttctccggttacacacccctatgggtggcttcagctttcctggttccagcagatatatgcacgacagtactaaatgcaatatttagccagccactgccgcatcagggacttttgttccaccaccaagtgcacaagagatacctgtggtctctgcacctgctccagcccctattcacaaccagtnttccagctgaaaaccagcctgccaatcagaatgctgctcctccagggggtggtaatccctggagccaattcaaaattgcggaagaatggcacaagggggccctattggtgggaagaagatgatggaaataacccgcaaattgggtgggattgggacacctatcccggcagct

SEQ ID NO: 68949 - DNA, 1005 bp, Homo Sapiens
  misc_feature (592)..(592): n is a, c, g, or t
tgggtggcgaattcggcacgagggggaactgtcgaggcagagattgcgggcggctgagacgccgcctgcctggcaacgaggagcgcagcagagccccgacaccgccgccgccgccatggagtccgagaccgaacccgagcccgtcacgctcctggtgaagagccccaaccagcgccaccgcgacttggagctgagtggcgaccgcggctggagtgtgggccacctcaaggcccacctgagccgcgtctaccccgagcgtccgcgtccagaggaccagaggttaattcattctgagaagctgttgttggatcaccaaggtctcagggacttgcttccaaagcaggaaaaacggcactgttttgcatctggtgtgcaatgtgaagagtccttcaaaaatgccagaaatcaacgccaaggtggctgaatccacagaggagcctgctggttctaatcggggacagtatcctgaggattcctcaagtgatggtttaaggcaaagggaagttcttcggaacctttcttcccctggatgggaaaacatctcaaggcctgaagctgcccagcaggcattccaaggccctggggtcctggntttctccggttacacacccctatgggtggcttcagctttccctggttcccgcagatatatgcacgacaggactacatgcaatatttagcagccactgccggatcaaggggcttttgggtcccccccaacgggcaccaagagatacctggggggcctctggcccctggctccaggtccgtattgaaaaaccaggtttccgggctgaaaaacacgccctgggccaattccgaaaggagaggtctcctgcgagggtgtgttgtgtaaatccccgggaggccctaactcacaaactttgggggggccttgacatggcaaaaggcgggggcccccttattgtgtgggggaaacaaacaagcgattgcagaacacaaccccgggaaggatctgggcttcggagatcagcgggatccctt

SEQ ID NO: 68950 - DNA, 2575 bp, Homo Sapiens
  misc_feature (783)..(783): n is a, c, g, or t
  misc_feature (1374)..(1384): n is a, c, g, or t
tggaccggtccggaattctccggatatcgtcgacccacgcgtccgcacgcattttccaggataactgtgactccaggcccgcaatggatgccctgcaactagcaaattcggcttttgccgttgatctgttcaaacaactatgtgaaaaggagccactgggcaatgtcctcttctctccaatctgtctctccacctctctgtcacttgctcaagtgggtgctaaaggtgacactgcaaatgaaattggacaggttcttcattttgaaaatgtcaaagatgtaccctttggatttcaaacagtaacatcggatgtaaacaaacttagttccttttactcactgaaactaatcaagcggctctacgtagacaaatctctgaatctttctacagagttcatcagctctacgaagagaccctatgcaaaggaattggaaactgttgacttcaaagataaattggaagaaacgaaaggtcagatcaacaactcaattaaggatctcacagatggccactttgagaacattttagctgacaacagtgtgaacgaccagaccaaaatccttgtggttaatgctgcctactttgttgcaaagtggatgaagaaatttcctgaatcagaaacaaaagaatgtcctttcagagtcaacaagacagacaccaaaccagtgcagatgatgaacatggaggccacgttctgtatgggaaacattgacagtatcaattgtaagatcatagagcttccttttcaaaataagcatctcagcatgttcatcctactacccnaaggatgtggaggatgagtccacaggcttggagaagattgaaaaacaactcaactcagagtcactgtcacagtggactaatcccagcaccatggccaatgccaaggtcaaactctccattccaaaatttaaggtggaaaagatgattgatcccaaggcttgtctggaaaatctagggctgaaacatatcttcagcgaagacacatctgatttctctggaatgtcagagaccaagggagtggccctatcaaatgttatccacaaagtgtgcttagaaataactgaagatggtggggattccatagaggtgccaggagcacggatcctgcagcacaaggatgaattgaatgctgaccatccctttatttacatcatcaggcacaacaaaactcgaaacatcattttctttggcaaattctgttctccttaagtggcatagcccatgttaagtcctccctgacttttctgtggatgccgatttctgtaaactctgcatccagagattcattttctagatacaataaattgctaatgttgctggatcaggaagccgccagtacttgtcatatgtagccttcacacagatagaccnnnnnnnnnnnccaattctatcttttgtttccttttttcccataagacaatgacatacgcttttaatgaaaaggaatcacgttagaggaaaaatatttattcattatttgtcaaattgtccggggtagttggcagaaatacagtcttccacaaagaaaattcctataaggaagatttggaagctcttcttcccagcactatgctttccttctttgggatagagaatgttccagacattctcgcttccctgaaagactgaagaaagtgtagtgcatgggacccacgaaactgccctggctccagtgaaacttgggcacatgctcaggctactataggtccagaagtccttatgttaagccctggcaggcaggtgtttattaaaattctgaattttggggattttcaaaagataatattttacatacactgtatgttatagaactccatggatcagatctggggcagcaccctataaatcaacaccttaatatgctgcaacaaaatgtagaatattcagacaaaatggatacataaagactaagtagcccataaggggtcaaattttgctgccaaatgcgtatgccaccaacttacaaaaacacttcgttcgcagagcttttcagattgtggaatgttggataaggaattatagacctctagtagctgaaatgcaagaccccaagaggaagttcagatcttaatataaattcactttcatttttgatagctgtcccatctggtcatttggttggcactagactggtggcaggggcttctagctgactcgcacagggattctcacaatagccgatatcagaatttgtgttgaaggaacttgtctcttcatctaatatgatagcgggaaaaggagaggaaactactgcctttagaaaatataagtaaagtgattaaagtgctcacgttaccttgacacatagtttttcagtctatgggtttagttactttagatggcaagcatgtaacttatattaatagtaatttgtaaagttggttggataagctatccatgttgcaggttcatggattacttctctataaaaaatatgtatttaccaaaaaattttgtgacattccttctcccatctcttccttgacatgcattgtaaataggttcttcttgttctgagattcaatattgaatttctcctatgctattgacaataaaatattattgaactccc

SEQ ID NO: 68951 - DNA, 528 bp, Homo Sapiens
aggtgttcctttagagtcaatgagaacacacaaaacctacaaattcatgcaggggacatcctgaagttcttgaaaaagaagaaacctgaagatgccttctgtgttgtgggaataacaatgattgatctttacccaagagacttgtggaattttgtctttggacaggcctctttgacagatggcactggtgaggtggattgatgatgaatcttctggcacacctggagcaactccagaacacagtcgtgaggataatgggaatttactgaaacccgtggaaggaagcctttaaggaatggaaagagtggataataaaatgcctgactgttctccaaaaataaggaccttcaaataggagtgattgaaataaatgactacttgcatgttatgctttcatttgggtggaatacttcatcagaataaactattgatcttgtgctgtgtcaaagtaacagactagaaccttctttcaagtacctgaattgaaatgaaactcattttgaataataaaaactctagaaactctta

SEQ ID NO: 68952 - DNA, 2198 bp, Homo Sapiens
  misc_feature (1982)..(2072): n is a, c, g, or t
  misc_feature (2107)..(2117): n is a, c, g, or t
caggctgtacggctcggagttcgggatgcggttcgcacgtgctgtcagagctgggcggggcagccgggtcgtataggcgggcgccagtcgcggtcggtggagagggatgaggatgtaggagggacgtgacgtgtgcggaagcctgcggggactgcgggggcggagtgcctctggggagccagtggaggcctttccagaggctcctgggggaagaagaggcgaagcgagagtccccggggtaagccctagctccacccccagccggagcctgggttgtgcctgcacggaccagagcccacagtgcgagttgctgtaggcaaccagctagggtggccaacttctcccggttggcccgagatgttctggttttgggaccacagcgtcccaggcctccagcccaccacagtgaccatattgtgcgccccctgcccatcttctcccgcagcttccctagattaggcttgggaggcaaggggaggcctcctgacttttctcactgccttcgttaatataaagatgaaggcacactccacaacttccttctggccaggcccagacatgtctgtccttgtgagataaaagcttccatgggagccttccttcctaatcaagtctcgtggtggaacatctgacccttttcaagaggaaggaccagaaaactccgtacatgtaaggaaaaagatgtcaatggaagacttccaacctaatcaagatgcaaataatacggcactccgaacagacactaaaaacagctctcatctcaaagaacccagtgcttgtatcacagtatgagaaattagatgctggggaacaacgtttaatgaatgaagccttccagccagccagtgatctctttggacccattaccttgcattctccatcagattggatcacctcccaccctgaggctccccaagactttgaacagttcttcagtgatccttacagaaagacaccctctccaaacaaacgcagcatttatatacagtccattggctctctaggaaacaccagaattatcagtgaagaatatattaaatggctcacgggctactgtaaagcatatttctatggcttgagagtaaaactcctagaaccagttcctgtttctgtaacaagatgttcctttagagtcaatgagaacacacacaacctacaaattcatgcaggggacatcctgaagttcttgaaaaagaagaaacctgaagatgccttctgtgttgggggaataacaatgattgatctttacccaagagactcgtggaattttgtctttggacaggcctctttgacagatggtgtggggatattcagctttgccaggtatggcagtgatttttatagcatgcactataaaggcaaagtgaagaagctcaagaaaacatcttcaagtgactattcaattttcgacaactattatattccagaaataactagtgttttactacttcgatcctgtaagactttaacccatgagatcggacacatatttggactgcgacactgccagtggcttgcatgcctcatgcaaggctccaaccacttggaagaagctgaccggcgccctctaaacctttgccctatctgtttgcacaagttgcagtgtgctgttggcttcagcattgtagaaagatacaaagcactggtgaggtggattgatgatgaatcttctgacacacctggagcaactccagaacacagtcacgaggataatgggaatttaccgaaacccgtggaagcctttaaggaatggaaagagtggataataaaatgcctggctgttctccaaaaatgaggaccttcaaataggagtgattgaaataaataactacttgcatgttatgctttcatttgggtggaatacttcattggaataaactactgatcttgtgctgtgtcaaagtaacagactagaaccttctttcaagtacctgaattgaaatgaaactcattttgaataataaaaactctagaaactcttnnnnnnnnnnnnnnnnnnnnnnnnnnnnnnnnnnnnnnnnnnnnnnnnnnnnnnnnnnnnnnnnnnnnnnnnnnnnnnnnnnnnnnnnnnntcaccataacccaacacaaaccaataaccacctgnnnnnnnnnnnacccgccccatccggcctttccctccctattatatcttcccccctctcgccttctcgtggggggcgggcgcccccacgcac

SEQ ID NO: 68953 - DNA, 641 bp, Homo Sapiens
acagttagaatcaaagagtaatgagcatgatcacagtaaaagtaaggaaaaggatagacgcgcacaatccaggagtagagaatgtgatataactaaaggtaaacacagttataatagcagaacaagagaacgaagcagaagtagggacagaagcagaagagtgcgatcaagaacccatgacagagatcgcagcagaagcaaggagtaccatagatacagagaacaggaatacaggagaagaggacggtcacgaagccgagagagaagaacaccaccaggaagatcaagaagtaaagataggaggagaaggaggagagactcacggagctcagagagagaagaaagtcaaagcagaaacaaagacaaatacagaaaccaagagagtaagagctcacacagaaaagaaaattctgagagtgagaaaagaatgtactctaaaagtcgtgatcataatagctcaaataacagcagggaaaaaaaggctgatagagatcaaagtcccttctcaaaaataaaacaaagcagtcaggacaatgaattaaagtcctccatgttgaaaaataaggaggatgagaagatcagatcctcagtggaaaaagaaaaccaaaaatcaaaaggtcaagaaaatgaccatgtacatg

SEQ ID NO: 68954 - DNA, 1287 bp, Homo Sapiens
  misc_feature (84)..(84): n is a, c, g, or t
  misc_feature (108)..(535): n is a, c, g, or t
  misc_feature (964)..(1025): n is a, c, g, or t
  misc_feature (1147)..(1201): n is a, c, g, or t
ggactccaggggaacgctgatctatagtctgtcggtttcccactctgactgagctcgatttgtgatctcgtcagggggcggacntatgaaaacgccagcacgcgcccnnnnnnnnnnnnnnnnnnnnnnnnnnnnnnnnnnnnnnnnnnnnnnnnnnnnnnnnnnnnnnnnnnnnnnnnnnnnnnnnnnnnnnnnnnnnnnnnnnnnnnnnnnnnnnnnnnnnnnnnnnnnnnnnnnnnnnnnnnnnnnnnnnnnnnnnnnnnnnnnnnnnnnnnnnnnnnnnnnnnnnnnnnnnnnnnnnnnnnnnnnnnnnnnnnnnnnnnnnnnnnnnnnnnnnnnnnnnnnnnnnnnnnnnnnnnnnnnnnnnnnnnnnnnnnnnnnnnnnnnnnnnnnnnnnnnnnnnnnnnnnnnnnnnnnnnnnnnnnnnnnnnnnnnnnnnnnnnnnnnnnnnnnnnnnnnnnnnnnnnnnnnnnnnnnnnnnnnnnnnnnnnnnnnnnnnnnnnnnnnnnnnnnnnnnnnnnnnnnnnnnnnnnnnaagaattcggcacgagggagatcgcagcagaagcaaggagtaccatagatacagagaacaggaatacaggagaagaggacggtcacgaagccgagagagaagaacaccaccaggaagatcaagaagtaaagataggaggagaaggaggagagactcacggagctcagagagagaagaaagtcaaagcagaaacaaagacaaatacagaaaccaagagagtaagagctcacacagaaaagaaaattctgagagtgagaaaagaatgtactctaaaagtcgtgatcataatagctcaaataacagcagggaaaaaaaggctgatagagatcaaagtcccttctcaaaaataaaacaaagcagtcaggacaatgaattaaagtcctccatgttgaaaaataaggaggatgagaagatcagatcctcagtggnnnnnnnnnnnnnnnnnnnnnnnnnnnnnnnnnnnnnnnnnnnnnnnnnnnnnnnnnnnnnntttgatcatgaatcaagccctggaacagatgaagacaaaagcggatgagtgagttatataaacttacttccattctgtttcggattttaagtttgagagacttgctaatgaatctcctttannnnnnnnnnnnnnnnnnnnnnnnnnnnnnnnnnnnnnnnnnnnnnnnnnnnnnntaatgtggatttcattgagttgattttttgataatctgcaatctggataatttgtactgctaaagttttaataaactcgacatgag

SEQ ID NO: 68955 - DNA, 529 bp, Homo Sapiens
  misc_feature (412)..(412): n is a, c, g, or t
ctctgggcaatatcagaagtgaccatagggcattttaccactgccccatgtgcaatgcctcgatggcattccaattcattttctgtcactgccatgaagttacactcttcacagcagtagtaccttttatctttttcatgggttttagcatgttgcacaaatgttttagggcaattggtaccaaacacacactgaggacactgtaatcgtgcacttcttccttcatcctgaagttctttcaattcacgaatttcctccatcaacttctgtcttctctcctggtgaataatcatatgttttagaagtgaattgcgatctcgaaatgtccgtccacattctctacaagcatatggccttgggacattaagatggcgaaagtgactattcccatctaaatgatacatcatatgcnctgtggaggtgcttcttctccctaaaattcacattgcactttgtacaggggtagaatgatggctcttcggtactgaaagtagcaggtgactcagaatcactctcttcacatttcttt

SEQ ID NO: 68956 - DNA, 1345 bp, Homo Sapiens
cggctaaggtacgaggcctgggctgttgaattcggcacgaggggaggccgcgccagtgacagcgatggcggcggagtcggcgctccaagttgtggagaagctgcaggcgcgcctggccgcgaacccggaccctaagaagctattgaaatatttgaagaaactctccaccctgcctattacagtagacattcttgcggagactggggttgggaaaacagtaaatagcttgcgaaaacacgagcatgttggaagctttgccagggacctagtggcccagtggaagaagctggttcctgtggaacgaaatgctgagcctgatgaacaggactttgagaagagcaattcccgaaagcgccctcgggatgccctgcagaaggaggaggagatggagggggactaccaagaaacctggaaagccacggggagccgatcctatagccctgaccacaggcagaagaaacataggaaactctcggagctcgagagacctcacaaagtgtctcacggtcatgagaggagagatgagagaaagaggtgtcacagaatgtcaccaacttactcttcagaccctgagtcttctgattatggccatgttcaatcccctccatcttgtaccagtcctcatcagatgtacgtcgaccactacagatccctggaggaggaccaggagcccattgtttcacaccagaagcctgggaaaggccacagcaatgcctttcaggacagactcggggccagccaagaacgacacctgggtgaaccccatgggaaaggggttgtgagtcaaaacaaggagcacaaatcttcccacaaggacaaacgccccgtggatgccaagagtgatgagaaggcctctgtggtgagcagagagaaatcacacaaggccctctccaaagaggagaaccgaaggccaccctcaggggacaatgcaagggagaaaccgccctctagtggcgtaaagaaagagaaggacagagagggcagcagcctgaagaagaagtgtttgcctccctcagaggccgcttcagacaaccacctgaaaaagccaaagcacagagacccagagaaagccaaattggacaaaagcaagcaaggtctggacagctttgacacaggaaaaggagcaggagacctgttgcccaaggtaaaagagaagggttctaacaacctaaagactccagaagggaaagtcaaaactaatttggatagaaagtcactgggctccctccctaaagttgaggagacagatatggaggatgaattcgagcagccaaccatgtcttttgaatcctacctcagctatgaccagccccggaagaaaaagaaaaagattgtgaaaacttca

SEQ ID NO: 68957 - DNA, 996 bp, Homo Sapiens
cagtcgacggtgaccggacatatgcccgggaattcggccattacggccgggggaatattaaagtacttttgaagtaactcatacgttttctcccctcttccatttgtttagctattgagggtttgctttaaaacaaatttatgtagaaatatcagtactataatagtattgtgatactgtgtatttcttaagcatatgccaggaaggagagcattagttaggtgtccaaaaaacagccaacaaaacaaatcagctctgaaaatcgtgaagcagtgaatattttagaattatttttgaaacctctttcagaactgtttttagaccccgtggtaatttgctatgtaattttaatactagtttaggcactccatgtacagttggtatgtttccttttgaaagataataatctatttataataaaagtctgaatatttcaatctcggaattcctctttaaaacttgaatcagttttactattgctttttaaaatgttacctatttatatttgctttgtatatcaatgctacacttcttgttttgttttaggtatttaaaccatgtcagagctgcctcaccacaggaccttgctggaggctatacttcttctcttgcttgtcacagagcactacaggatgcattcagtgggcttttctggcagcccagttaaccatttataagatttggaccttggagctgaaccagggagctagcaaaagtaaagcagacttataaaattatagctatgtgcagctgcacaacacagtccttccactagcagctgtgttaaagtatttataaggagaaaatttcagaactaagttgagtaatataggggatatatatttgtgaaaaataatttttacttatatttttcagaggatttgacacgataagcctcatctgatggaagagaggaataaataattcacctatatgtgtttgaggttgtgacagacttataaaatctttttaaaaaataaagctataatttttttt

SEQ ID NO: 68958 - DNA, 1406 bp, Homo Sapiens
cagtcgacggtaccggacatatgcccgggaattcggccattacggccggggggtaggaacctgcttggtcgcgtctgagggggcttgtaggtggctctggctgaaacaggcgcctgcgagagtctgtaggagggaaaccgccatggacgatcagggttgccctcggtgtaagaccaccaaatatcggaacccctccttgaagctgatggtgaatgtgtgcggacacactctctgtgaaagttgtgtagatttactgtttgtgagaggagctggaaactgccctgagtgtggtactccactcagaaagagcaacttcagggtacaactctttgaagatcccactgttgacaaggaggttgagatcaggaaaaaagtgctaaagatatacaataaaagggaagaagattttcctagtctaagagaatacaatgatttcttggaagaagtggaagaaattgttttcaacttgaccaacaatgtggatttggacaacaccaaaaagaaaatggagatataccaaaaggaaaacaaagatgttattcagaaaaataaattaaagctgactcgagaacaggaagaactggaagaagctttagaagtggaacgacaggaaaatgaacaaagaagattatttatacaaaaagaagaacaactgcagcagattctaaaaaggaagaataagcaggcttttttagatgagctggagagttctgatctccctgttgctctgcttttggctcagcataaagatagatctacccaattagaaatgcaacttgagaaacccaaacctgtaaaaccagtgacgttttccacaggcatcaaaatgggtcaacatatttcactggcacctattcacaagcttgaagaagctctgtatgaataccagccactgcagatagagacatatggaccacatgttcctgagcttgagatgctaggaagacttgggtatttaaaccatgtcagagctgcctcaccacaggaccttgctggaggctatacttcttctcttgcttgtcacagagcactacaggatgcattcagtgggcttttctggcagcccagttaaccatttataagatttggaccttggagctgaaccagggagctagcaaaagtaaagcagacttataaaattatagctatgtgcagctgcacaacacagtccttccactagcagctgtgttaaagtatttataaggagaaaatttcagaactaagttgagtaatataggggatatatatttgtgaaaaataatttttacttatatttttcagaggatttgacacgataagcctcatctgatggaagagaggaataaataattcacctatatgtgtttgaggttgtgacagacttataaaatctttttaaaaaataaagctataatttatattaaaaa

SEQ ID NO: 68959 - DNA, 411 bp, Homo Sapiens
gcctactactactactatacggctgcgagaagacgacagaagggaaaccgccatggacgatcagggttgccctcggtgtaagaccaccaaatatcggaacccctccttgaagctgacggtgaatgtgtgcggacacactctctgtgaaagttgtgtagatttactgtttgtgagaggagctggaaactgccctgagtgtggtactccactcagaaagagcaacttcagggtacaactctttgaagatcccactgttgacaaggaggttgagatcaggaaaaaagtgctaaagatatacaataaaagggaagaagattttcctagtctaagagaatacaatgatttcttggaagaagtggaagaaattgttttcaacttgaccaacaatgtggatttggacaacaccaaaaa

SEQ ID NO: 68960 - DNA, 1375 bp, Homo Sapiens
tttttggagacttcttttttgccttagggattctttatagttcctctccatgtaaacatattgggtaatacttgtggttctgaaataaaatgcaagcaggggggtgtacacaaaaactttaccactgaatcaagggaccagctgtgcagacattatgtaacagtaatattctatagttctgaacatggcacttgtgaatcaataattttagaatattttagaaaggacatttaaaaaaatcacataggaaacaaagttaaaatttagaaaaaagtagaatattttatcccatcttctaagcacctcaagcctaaacaaaacacacagaatgaaattttaatgatgcctgttaagcctatttgaaaacaaattctatctggcccccataaacggatgttcaggtgttcaggcaatcaactccttggttctccaatctgaaatgttcaaaggaaggaggtagaacttgggcaagtttaaagcatgtagctctgttgaatcacttctaaccaccccgcccccagctgatgaccaatttttacactgaccacagctgaaaatgtaaatgcaaataaaaagcttgagatgttattggacgaggtgtattaaaataaaatcaaaaatagaaatattaggtatatacacaacagcataagtgaaacacatcatgtgatacagaagtttccattcaaagcttacaggagaaaaatttagtgaacagaaccgcttgaacctcctgccaccgtggcttattagagccttgtagtcacttatgttccttcatatccttgggtataaatagtctcatacacatgctacacaatttagaaaagattgctgaatcataaaaatagccccgaatgtggcactttagctttctagagtacaactaaaattaatacttgatctttaacataatgttcaaatatttgaagcaacaaaggaaactcttatgttttagaaggccctataaggttcttcagagattagaatcttagttcttccaaactacattgtcaaaacaaatctggatataggaaattgtggaaatgaaaaagctggactcttaaaaatattccttctaaacacagagcagtttctgaggctcttctccctttcctgggaggtccaggtgagcccggtgccttcgggtgagcagacagggcagctgtgcgtgctcacgggctcctcctgctggaagagagagagatgtgcacgccactcctatggcatgtctagcaggtctgagcagtgttcatagaagaaaatgttttaacagtctcagattttgggaggtagggggaaaaaatcattgaaatctgggaaagacatttttaagctgctgacttcacctgcaaaatctaacaggttggattag

SEQ ID NO: 68961 - DNA, 955 bp, Homo Sapiens
aatcaaggaaaataacttcagattccataaagtttcagtttatttttagtttactactaggtgagatagcacattacatacttttactatcaaatattattttagcagcttcccatagtaccaaatgatttgattccctactctcattttttaaagcatataaatatttatgggcttaaaaagggggtttttaaaaactgaggatatcagtaataaattgcagaatattttgcaaagctttcttttggaaagcaaacttttgtgcctgcctatatgcaaagtattttatcagggacttgaacaaagacctcactctttttcacttgtcttatgtcgagagaaaaggttattggcagccacattcctaagactggggaatggtgtgtccttttaaatttgaagataactttaggtaattatggaaactcctcaaagaggagaaagtaatttttttccagacatttttctcattctgtgtctttcacacactagtttccatagttcgagaattctgttttttaccattgggctgtgaatgttcacaatatcagtcctgttgaattcctatgaggtaatcacaatgtgtatatgttcattttctaggtatgataaaagaatgtatggctttttattctgtggaagtaaaatcctgaacgtttacaacttttccttaacttgtaaataaaaaattgtaagctctttctcttcttacagaaaacttagcttgtgtaattctgttagtttcagatttctctcctgtttttgcaaattgtgggaaagattgacaatgcaaatgtgtcaaagacatactgttgggtgcaatattaacaattttaaatgcaaatttctttggataaattatttctatattctgtaaatctgagatttaatgtatattttgtttaaaaaaatgatttagtaaaatctttgaaaagtatgatcttctaaagtcttt

SEQ ID NO: 68962 - DNA, 1962 bp, Homo Sapiens
  misc_feature (1702)..(1739): n is a, c, g, or t
  misc_feature (1825)..(1833): n is a, c, g, or t
ggtccggaattcccgggatatcgtcgacccacgcgtccgcccacgcgtccgcatactcgctgcccgccggctccctcccccgcgtccctgcgaccgccgcggcgaagatggcctcaggagtgcaagtagctgatgaagtatgtcgcattttttatgacatgaaagttcgtaaatgctccacaccagaagaaatcaagaaaagaaagaaggctgtcattttttgtctcagtgcagacaaaaagtgcatcattgtagaagaaggcaaagagatcttggttggagatgttggtgtaaccataactgatcctttcaagcattttgtgggaatgcttcctgaaaaagattgtcgctatgctttgtatgatgcaagctttgaaacaaaagaatccagaaaagaagagttgatgttttttttgtgggcaccagaactagcacctctgaaaagtaaaatgatctatgcaagctccaaggatgcaattaaaaagaaatttcaaggcataaaacatgaatgtcaagcaaatggaccagaagatctcaatcgggcttgtattgctgaaaagttaggtggatccttaattgtagcctttgaaggatgccctgtgtagattattcagtgccacaaattgaaagcttccatgtttaatgttatcctcttgctatataaataaagcaaatatatttaggccagggtctcactgagggggagctgtcttgtcatcttttagagtaaactattctataaacatatgcaaacagccctaaataaatctaaagtctaaagttttattgatgtgaaattaaattcttattggccaaatgcctgttttgatgagttgatttataaagatttttgttaagctcaggattttaaattacacagttcacaaacagtaaaggccatgtgaagagaattattacatctttattaacctcagcatttactttgtttcttttgcttaggaaattgctcataatctggttataattttggtccaaattctttattcttccttgagctaagcagaataatggaatataatatgtcttcataatataacaacactaatacactaatagtaagattaagttaggcagtcttctaccaaatgtgtaatggagattgcctcaaaattgtgtccacataatccacgctcatcttgcaaagcgctatttcaggcacatcattggaatacaggaagtagccctgcacctgccagtgagctcgccattcactgattggaagagtgacctggcatcttggaaatcattgtgtgtcttcaggagaatgtgcagtgtcttgtaacaactaattataatgcaaattagggctacattgtaatctgctttgttaatgaaaatgataaaacagaatattgacaagctaggacacctgtggtatctttaattgtatctccttcagaagtttgcttcttatggtataataaagtatggaagaatattgagtatatgtttactctgggcctgggagaacttaactttctagagcagtttgttgacttgtgtgcaatggggagaggtaccatgatgacactcacagggagccactgttcactgacacttggaagcggtcattgttaatatcacgggcgtaacactttgaacgatatagagatgcacaaacagttgaacttacaagtagcagtattggctttatgtaataaaaggaagcatttttgacttnnnnnnnnnnnnnnnnnnnnnnnnnnnnnnnnnnnnnngggcggggggccccaaagggaagggaacatgggccaaactttttcccaaagaaacccggacaagaaaaagggtgggattccccccnnnnnnnnncccccggggggaaccggggcgttttaacaaatctcaaagggttttcggggttcttttggggctcctccccccgggagtcccaaggaagcctccaatataaattttcccccccgccctgtgccttttttt

SEQ ID NO: 68963 - DNA, 1031 bp, Homo Sapiens
ctcaggtctaggtagcgaggcctgggtgttgaattcggcacgagggcgtcccgtcctgaggcgcgcccgccccggggtaagctcgcgccgccgcgtcagctcagcgctgggtctctcggtcccgcagccgtgaggaggacggtctgcatactcgctgcccgccggctccctcccccgcgtccctgcgaccgccgcggcgaagatggcctcaggagtgcaagtagctgatgaagtatgtcgcattttttatgacatgaaagttcgtaaatgctccacaccagaagaaatcaagaaaagaaagaaggctgtcattttttgtctcagtgcagacaaaaagtgcatcattgtagaagaaggcaaagagatcttggttggagatgttggtgtaaccataactgatcctttcaagcattttgtgggaatgcttcctgaaaaagattgtcgctatgctttgtatgatgcaagctttgaaacaaaagaatccagaaaagaagagttgatgttttttttgtgggcaccagaactagcacctctgaaaagtaaaatgatctatgcaagctccaaggatgcaattaaaaagaaatttcaaggcataaaacatgaatgtcaagcaaatggaccagaagatctcaatcgggcttgtattgctgaaaagttaggtggatccttaattgtagcctttgaaggatgccctgtgtagattattcagtgccacaaattgaaagcttccatgtttaatggtatcctcttgctatataaataaagcaaatatatttaggccagggtctcactgagggggagctgtcttggcatcttttagagtaaacaattctataaacatatgcaaacagcccctaaataaatctaaaggctaaagttttattggatgggaaaattaaattccttatttggcccaatggcctggttttgaatgagtttgattttataaaagattttttggtaaagcctccagggatttttataatttaccccggtttcccacaaaaccggtaaagagggccatgtggaac

SEQ ID NO: 68964 - DNA, 744 bp, Homo Sapiens
  misc_feature (575)..(584): n is a, c, g, or t
gtaaatccgtgcttgtgccaagtctcatatttctttgccatctcagaattatctttttaccaccactgtttataaaatttccttagagactttttgaagggaaaatagagcaacagggaaaaatgaaagaaatgtcttggttactgagctctaaatagacaggttagatggcacttctcatgatacattttagttattcttataaaagcaaacaggcaaacatgagtgtaaattaaagacaaaaagaaaactctggttttatatttgagaacacgtgaaaaatcatgggtcaacataaaatcttgagaaccttctactttctctgggaaagcattatatagtggtgcattagtttagaaagtcagctatgattttgcctatagttctagttattagctttggggttttcttgtactttaagacatacctgtaaattgaacctatttgaattatattccactgtatgtgtattatggctcttttcctattagagcaacttgtgtttccctgataatgtgtacattttttaggcatgtacttaatagttcacaatgttctaaatttggaaggacttnnnnnnnnnncttgtttaaatttccatctgttttgtaatatctagctctatatgtaaatgatgggtttgttggtatttaaaatgaatacaacttgaatgtaattaaagtgctgttttttggaagcgataaactttaaatatacttattaaaatgaaattctattaaaaaa

SEQ ID NO: 68965 - DNA, 1468 bp, Homo Sapiens
tacggctaggtacgaggctgggtggcgaattcggcacgagggtggacacaaaatccgaggattcctatttagctgcagtgatgggcatcgcttcctgttttagtaatgtcttcgtggccagccgtattggagagtgtggtttatgcatcgtggagccgggttcaggctgacctcaactgcatgaaggatctctatgcaatgagtgcaaactggaagtacttgataaactctttgtggtatggattttcccattaaaaccaacctagaaattgtcatggaacgctcaagttgttaatgggagaaaacaacctggaaacggagaggatgccatcccataagacgaagaaacggtgcgaagaacgcggtatgaggtcgcttaatggaaagctgacaagacacagggactgtcaagaatgcttcctccactcgaaacacctctcttttctggcagtgcctacttcgtggtcagtagggagtatgtggggtatgtactacagaatgaaaaaaatccaaaagttgatggagtgggcacaagacacatacagccctgatgagtatctctgggccaccatccaaaggattcctgaagtcccgggctcactccctgccagccataagtatgatctgtctgacatgcaagcagttgccaggtttgtcaagtggcagtactttgagggtgatgtctccaagggtgctccctacccgccctgcgatggagtccatgtgcgctcagtgtgcattttcggagctggtgacttgaactggatgctgcgcaaacaccacttgtttgccaataagtttgacgtggatgttgacctctttgccatccagtgtttggatgagcatttgagacacaaagctttggagacattaaaacactgaccattacgggcaattttatgaacaagaagaaggatacacaaaacgtacccttatctgtttccccttccttgtcagcatcgggaagatggtatgaagtcctctttggggcagggactctagtagatcttcttgtcagagaagctgcatggtttctgcagagcacagttagctagaaaggtgatagcattaaatgttcatctagagttaatagtgggaggagtaaaggtagccttgaggccagagcaggtagcaaggcattgtggaaagaggggaccagggtggctggggaagaggccgatgcataaagtcagcctgttcaaagtgctcagggacttagcaaaatgagaagatgtgacctgtgccaaaactattttgagaattttaaatgtgaccatttttctggtatgaataaacttacagcaacaaataatcaaagatacaattaatctgatattatatttgttgaaatagaaatttgattgtactataaatgatttttgtaaataatttatattctgctctaatactgtactgtgtagtgtgtctccgtatgtcatctccagggagcttaaaatgggcttgattt

SEQ ID NO: 68966 - DNA, 883 bp, Homo Sapiens
  misc_feature (169)..(184): n is a, c, g, or t
gaaagaataaatgaaacatttttctggttacttttttaaaaatttaaaatggaagggaagaataggggcagggcattattaggctatttctgatgcttcagtgttataaattcaacatagaggctgacaacctaaattcatggtgtaacacagctcttttccttttccnnnnnnnnnnnnnnnnggtatctgttcaatgaaaataaggtatgacccaagtttttacctagtctgactagaagtattccacttcaaggtctgaagtaggacttttaccttaaaaaacaacaacaaacaaaactatcacacaggatagataagaagattggttaaacagttttgtgtagatctttttggtgctgaactatgacatgagccttatagattgtaaaatagggatagttggaactaatgtacagaactaaattttttaaactttatttgctgttaaattctgtgaagtttcagttatctaaaataaatatacacaaatatgaaatataatgtttcagattgcaaggtaatatgtaatagtagtgtttgtaagatactcttgtctaatattaactagtagtattttgatttgtacagtcataatttgttaaaatgacttcatttaacattcactgatgtagattaataatgtaagttctgatttaaagaatggtggcaaaatggtgcatgtaatacttttgcaagtgttggggagatcggtatgttttgaaaagagtaatttaacttttgggtgccaggaaatgggttttctcaaagtccattgccggcaatgggcaggcctgcaaatactggcacagagcattaatcatacaccttattaacggtgaggtgaataactttgaaataaagttttagagaaatgtttcag

SEQ ID NO: 68967 - DNA, 1182 bp, Homo Sapiens
cggctaggtacgaggccgggtgttgaatcggcacgagggcctcgcgaaggttcgagatccgtcgcgtgcgggaggcgggccgcgatcttgcgcagggtcggtgtgggcgcaggctgcagcgccgcgactcgtgcgggtaggcgtctgcgctcggtttgagggctcggcgcggggtttcctgttccttcttctgcgcggctgcagctcgggacttcggcctgacccagcccccatggcttcagaagagctacagaaagatctagaagaggtaaaggtgttgctggaaaaggctactaggaaaagagtacgtgatgcccttacagctgaaaaatccaagattgagacagaaatcaagaacaagatgcaacagaaatcacagaagaaagcagaacttcttgataatgaaaaaccagctgctgtggttgctcccattacaacgggctatacggtgaaaatcagtaattatggatgggatcagtcagataagtttgtgaaaatctacattaccttaactggagttcatcaagttcccactgagaatgtgcaggtgcatttcacagagaggtcatttgatcttttggtaaagaatctaaatgggaagagttactccatgattgtgaacaatctcttgaaacccatctctgtggaaggcagttcaaaaaaagtcaagactgatacagttcttatattgtgtagaaagaaagtggaaaacacaaggtgggattacctgacccaggttgaaaaggagtgcaaagaaaaagagaagccctcctatgacactgaaacagatcctagtgagggattgatgaatgttctaaagaaaatttatgaagatggagacgatgatatgaagcgaacccattaataaagccctgggggggaatcaagaagagaagccaggccaaaagaagacccgggaatttttgaagacttttaaagtccttttggggaactgtgaattgtgatgggggaaatacctgatggtttcccggtaaagggaatattgggggagctggcttataaaaattttgacagaatagctttttttccttagcctttccaagtaaaaggcgcatggaattcccacctttcctcacggggagggatttattttaaatataaatatggcttatttaacaccctcctggccagaaagggttttatttatcaacccgtgggcat

SEQ ID NO: 68968 - DNA, 1620 bp, Homo Sapiens
  misc_feature (1520)..(1532): n is a, c, g, or t
  misc_feature (1534)..(1535): n is a, c, g, or t
  misc_feature (1538)..(1540): n is a, c, g, or t
  misc_feature (1543)..(1547): n is a, c, g, or t
ggggactcgtgcgggtaggcgtctgcgctcggtttgagggctcggcgcggggtttcctgttcctccttctgcgcggctgcagctcgggacttcggcctgacccagcccccatggcttcagaagagctacagaaagatctagaagaggtaaaggtgttgctggaaaaggctactaggaaaagagtacgtgatgcccttacagctgaaaaatccaagattgagacagaaatcaagaacaagatgcaacagaaatcacagaagaaagcagaacttcttgataatgaaaaaccagctgctgtggttgctcccattacaacgggctatacggtgaaaatcagtaattatggatgggatcagtcagataagtttgtgaaaatctacattaccttaactggagttcatcaagttcccactgagaatgtgcaggtgcatttcacagagaggtcatttgatcttttggtaaagaatctaaatgggaagagttactccatgattgtgaacaatctcttgaaacccatctctgtggaaggcagttcaaaaaaagtcaagactgatacagttcttatattgtgtagaaagaaagtggaaaacacaaggtgggattacctgacccaggttgaaaaggagtgcaaagaaaaagagaagccctcctatgacactgaaacagatcctagtgagggattgatgaatgttctaaagaaaatttatgaagatggagacgatgatatgaagcgaaccattaataaagcctgggtggaatcaagagagaagcaagccaaaggagacacggaattttgagactttaaagtcgttttgggaactgtgatgtgatgtggaaatactgatgtttccagtaagggaatattggtgagctgcatatataaatttgacagatagctatttacatagccttctaagtaaaggcaatgaattctccatttcctactggaggatttatttaaataaaatatgcttattaaacactcctgcaaagatggttttattagtaccctggtcattttgttcaaggaagggttatattgcattctcacgtgaaatataaaaagcaagtcttgcccaataaaaacgctacattgtgtgtattttttgttcagctaagaattggaaaagtatttgcttgccttttaagttactgacatcagcttccaccagtgtaaaaattgagtaaaacctgaagttttgcataaaatgcaaatcggtgcctgtgcttgaaggttgctgtagagcatctgaccccttattaccaccttaagcaatgtatatgccatgcattaccatgcactaattcaatcacaggtgtttctatctagatttaaatatatttgtcaatgaatgtggaatagaaaatctaaacatgacaataatagacatatctttgtatggtaccagttagttttgccgtggatcagatggtttataaaagtaataaccataaagcaaaaaataatttgaaagcccgtctattcctatgctcaataaagttaagttttttctacaaannnnnnnnnnnnnannaannnaannnnnaacatggtcggccgccttcgggccctcggagaaagctttcttaaacccatttcgttttggccgcgccgggccc

SEQ ID NO: 68969 - DNA, 2824 bp, Homo Sapiens
  misc_feature (665)..(680): n is a, c, g, or t
  misc_feature (2617)..(2623): n is a, c, g, or t
  misc_feature (2626)..(2636): n is a, c, g, or t
  misc_feature (2638)..(2638): n is a, c, g, or t
  misc_feature (2640)..(2642): n is a, c, g, or t
  misc_feature (2782)..(2782): n is a, c, g, or t
cccacagtgggcttctacatgaggaaggtgactaaagctaacgtcactataaagatctgggtcataggaggacaaccccgatttcgaagcatgtggaccggtatgcagaggagtcaatgatattgtttacatgatagatgctgcagatcgtgaagagatagaagcttcccgaaatgagctacataatcttctagataaaccacagttacaaggaattccagtgctagtgcttggaaacaagagagatcttcctaatgccttggatgagaaacagctaattgaaaaaatgaatctgtctgctattcaggatagagaaatttgctgctattcaatttcttgcaaagaaaaggataatatagatatcacacttcagtggcttattcagcattcaaaatctagaagaagctgaagcatctcctgaagtcttccagtccttcttggctataatcctagaattattgtccgttcctctgaagtaattcccagaatacggtccttcctaaaccccagaaattgcctttttcagagtttatttctcatgtgcactgctgaagatgaatatccctaatccttcataaagaatcagctagagttgtcatgataaagtcagcacacacaaaaaggcttcttacacatacctgtcttaaaccatgtgtagagctgtnnnnnnnnnnnnnnnnccccatatacttatgaccatcttaaatcaagaaaattgcatatttccattctggtctttctgggccagatttttatattggttttcagtaaatgtctatctataatatttcattatagagtccagtagcttaatactgacactgacttgatacagcatgaagtttctagtgccacacacagtatttagaaaacctttaggcgtgaatgactcatgtgggatatatgtaaacataatgtttattttatctcacaaatgcatgtgaaatgtataattacatcttaggaatccaaaatggtctgcagagagtgagcggaggcaccagatcaatgttggttctttgcactggtgagattctgcctgatgaatattaaagatatcctgctttctgagaactctatcaccagatggcagttgggatatgggaggaactaaagcatcctgttttgtatctgtccagatcattatttctgtctcttgttttttcttcctggttcaggatacttttttaaggggttgagaattgaagattttccaaaagcgttcatgaatttagagcattccacccaatataataaaacctgttaagaatgtcagtctttgttcaaacatctgtttgttctatctccagtcattaaatcagtgctgctgcatgacactcttaactcctgactttttatatccagtcataaagttgactttcagcacaaaagatacttataaacaaataaaaaatttttatttttctctcttactgatgtaagctttggcactcttttgactggtgccattagacatcttgattattgtgacaactctagacctgcctgctttatctaatgtaatcatgctcaaggtctacaggtggtttaataatcagtcacacagagaactgaggaactgatgctgttggttggcttctatgatacagagatgtctaaaaacttcaaagggacatgtttggtagtttagcgacttccgtatacataaagggacatattaatactggttcatttgtaaattattattcatatagaccactgtagtagataaaactctatggtacacctgcttatgtgttgcctcacactgtgtgtgattttgtttcttttgttaagcagcacttatgtagactgcatttccaaatgtgttgagcactcagagtgtagtcaacagtaagttcttttaatgaatatcagttttaatttatagactgccatggccttaaaaatattctgtacaatatactgcactgtgttgcacagacactacttgcttttctccattcatatttttatgagtagaatctgggcttttaaatttctcttcttattctttgaagcatgttgcatactaccctggtgggatggatggttctgtaaatgaagggatatttaaacttgctactgttgttcaacaccattaatggtcagtgtgaaccattacaaagaatgtggcaacttgcttgtgcctaaaaggaggaattggaactagaatgtgtgactctgtggggactgcataggtttgttaattgacctatagctaaaccttaatgtgtttgtgtgtctatacattgctttccgcatttcaagacatccagacgctattaccaacattttcctgtgcattaacctctgcatgtgaaaacttttaacagttactgaactatgtaaatatgtgaatttttttatttaggtggatgcattttttgtctgtttactgctcttctcagctttattcaataaacttgcattttaagggttgtattggcaattttaacttaaaatgtgcatcatgatggaaggtgcagacttttttggaaggggatagtaagtttccgagaggagggtctatagaccatttgtcagaaatcagatcagccctcaaagaatggggtctgtgggctagttaaaatagaaataaacttttaaaatactnnnnnnnaannnnnnnnnnnanannnaaaaacatgttcggcccgccttccggccctcgaagaaagctttcttaagaccatttcgttttgggcgccgcggggcccccagaagggaaaagtgaaacgtgggcccataacctggtttcccctaggaagaatccctgggnccatgaactaaaggggcttggggaatccttccaccaaattaa

SEQ ID NO: 68970 - DNA, 1906 bp, Homo Sapiens
  misc_feature (1283)..(1293): n is a, c, g, or t
gctatgaaattcgccctggtaaacaccttggagtgtgcatttctgtggcaaacaacagactttttgttggatccattccgaagaataagactaaagaaaacattttggaagaattcagtaaagtcacagagggtttggtggacgttattctctatcatcaacccgatgacaaaaagaagaatcgggggttctgcttccttgaatatgaggatcacaagtcagcagcacaagccagacgccggctgatgagtggaaaagtaaaagtgtggggaaatgtagttacagttgaatgggctgaccctgtggaagaaccagatccagaagtcatggctaaggtaaaagttttgtttgtgagaaacttggctactacggtgacagaagaaatattggaaaagtcattttctgaatttggaaaactcgaaagagtaaagaagttgaaagattatgcatttgttcattttgaagacagaggagcagctgttaaggctatggatgaaatgaatggcaaagaaatagaaggggaagaaattgaaatagtcttagccaagccaccagacaagaaaaggaaagagcgcccaagctgctagacaggcctccagaagcactgcgtatgaagattattactaccaccctcctcctcgcatgccacctccaattagaggtcggggtcgtggtggggggagaggtggatatggctaccctccagattactacggctatgaagattactatgatgattactatggttatgattatcacgactatcgtggaggctatgaagatccctactacggctatgatgatggctatgcagtaagaggaagaggaggaggaaggggagggcgaggtgctccaccaccaccaagggggaggggagcaccacctccaagaggtagagctggctattcacagaggggggcacctttgggaccaccaagaggctctaggggtggcagagggggtcctgctcaacagcagagaggccgtggttcccgtggatctcggggcaatcgtgggggcaatgtaggaggcaagagaaaggcagatgggtacaaccagcctgattccaagcgtcgtcagaccaacaaccaacagaactggggttcccaacccatcgctcagcagccgcttcagcaaggtggtgactattctggtaactatggttacaataatgacaaccaggaattttatcaggatacttatgggcaacagtggaagtagacaagtaagggcttgaaaatgatactggcaagatacgattggctctagatctacattcttcnnnnnnnnnnnttggcttaactgtttcatctttaagtagcattttgctgccatttgtattgggctgaagaaatcactattgtgtatatactcaagtctttttatttttcctcttttcataaatgctcttggacattattgggcttgcagagttcccttattctggggattacaatgcttttatcgtttcaggcttcattttagcttcaaaacaagctgggcacactgttaaatcatgattttgcagaacctttggttttggacagtttcatttttttggatttgggatagattacataggagtatggagtatgctgtaaataaaaatacaagctagtgctttgtcttagtagttttaagaaattaaagcaaacaaatttaagttttcttgtattgaaaataacctatgattgtatgttttgcattcctagaagtaggttaactgtgtttttaaattgttataacttcacacctttttgaaatctgccctacaaaatttgtttggcttaaacgtcaaaagccgtgacaatttgttctttgatgtgattgtatttccaatttcttgttcatgtaagatttcaataaaactaaaaaatctattcaaaacattacctatttcaaattc

SEQ ID NO: 68971 - DNA, 1203 bp, Homo Sapiens
  misc_feature (119)..(119): n is a, c, g, or t
  misc_feature (296)..(297): n is a, c, g, or t
agcaacgagccagtaactataacggttctaaggtagcgaggcctgggtggcgaattcggcacgaggggggtggcctgcccctccacatctgtgggatatctcatcagcctcgatgactntacaagccctcaaggggaagcattttctcctggaccccttgatgccggagctgctggtgtttcccgcccagacagatctgcatgaacacccactgtaccgggccggacacctcattctgcaggacagggccagctgtctcccagccatgctgctggaccccccgccaggctcccatnngtcatcgatgcctgtgccaccccaggcaataaagaccagtcacttggctgctcttctgaagaaccaagggaagatctttgcctttgacctggatgccaagcggctggcatccatgggccacgctgctggcctgggctggcgtctcctgctgtgagctggctgaggaggacttcctggcggtctccccctcggatccacgctaccatgaggtccactacatcctgctggatccttcctgcagtggctcgggtatgccgagcagacagctggaggagcccggggcaggcacacctagcccggtgcgtctgcatgccctggcagggttccagcagcgagccctgtgccacgcgctcactttcccttccctgcagcggctcgtctactccacgtgctccctctgccaggaggagaatgaagacgtggtgcgagatgcgctgcagcagaacccgggcgccttcaggctagctcccgccctgcctgcctggccccaccgaggcctgagcacgttcccgggtgccgagcactgcctccgggcctcccctgagaccacactcagcagtggcttcttcgttgctgtaattgaacgggtcgaggtgccaagctcagcctcacaggccaaagcatcagcaccagaacgcacacccagcccagccccaaagagaaagaagagacagcaaagagccgcagccggtgcttgcacaccgccttgcacatagcagaggctccgggctgactccttcctggtgggaaaggaagatgcctgtcctctccgtggaggaccctgggccctcaccgcaggaagcagtttgggttttgaaaggttattgggtcccttccttgggctgtgttcttgctggtgagcaaagtgttgcctgcaaaaataaaatgcagaacgtactctacgat

SEQ ID NO: 68972 - DNA, 1105 bp, Homo Sapiens
  misc_feature (1069)..(1069): n is a, c, g, or t
tggcggccccccgcgcgcagggggcggggcgcgcccctcccccggagactggagccccggaggcaggcgggccagctcgaccgccggcacaaccccgggtagggcccccgggccctcactgtgcgcgcacaccgccctgcaggagatccaccggatagggacccagtagcgtgaccagggggagcccgccggaatgcctcctcaccagtcacagcagagacgtcagcccggcaacagcgtggccatgaagcaccgctggcatccaggtcagagccaaagatcttcccctggttcttcagaagacagccaaagtgactggtcttaatcgcctggggcggcacaggcatcgatggacacgggagcctggcgggggtccagcagcatggctgggagacagctggccctgtcctgcagaatgaggtgtccggcccggtacagtgggtgttcatgcagatctgtctgggcgggaaacaccagcagctccggcatcaaggggtccaggagaaaatgcttccccttgagggctcgtaagtcatcgaggctggaagcccgaccctgataggagaaaccttgtctcttgaaataatcaactacatcatcggagcaggtcttgagagtgttcacacgcacaaatcgaggcagctgggaggctggaccaggcctggatcccacttccaacaggtcctcattccggctcacaccccgatgaaccttgagccgagccaactcagccttgagcctcgcctggtgccggcccaacagagccttccatcggcccccaccccctcgaaagccctttcccaacaacaactcatacactagcaccttggccaggtgcggccgcagcttcttctccgcacggaggaggccggcgctggcgatcacagcatccagcacggcggagtagcgctgcgtttcgcacaccagcgcgtacagctgcttcacgttctggaagttgctggagtacaccaaccccttgatagagcctggcggctctccacgccggccaacacgcctgcagactgcagcataacagccctcgtgccgatattaaacaccacgccgccangggcctcgctaacccttagcccctgataaatggctt

SEQ ID NO: 68973 - DNA, 1350 bp, Homo Sapiens
  misc_feature (1233)..(1233): n is a, c, g, or t
cggccaagtaactataacggtctctaaggtagcgaggcctgggtggcgaattcggcacgagggcgttttgccacagagccgtaaaggcgcgcgggaacatggggctgtatgctgcagctgcaggcgtgttggccggcgtggagagccgccagggctctatcaaggggttggtgtactccagcaacttccagaacgtgaagcagctgtacgcgctggtgtgcgaaacgcagcgctactccgccgtgctggatgctgtgatcgccagcgccggcctcctccgtgcggagaagaagctgcggccgcacctggccaaggtgctagtgtatgagttgttgttgggaaagggctttcgagggggtgggggccgatggaaggctctgttgggccggcaccaggcgaggctcaaggctgagttggctcggctcaaggttcatcggggtgtgagccggaatgaggacctgttggaagtgggatccaggcctggtccagcctcccagctgcctcgatttgtgcgtgtgaacactctcaagacctgctccgatgatgtagttgattatttcaagagacaaggtttctcctatcagggtcgggcttccagcctcgatgacttacgagccctcaaggggaagcattttctcctggaccccttgatgccggagctgctggtgtttcccgcccagacagatctgcatgaacacccactgtaccgggccggacacctcattctgcaggacagggccagctgtctcccagccatgctgctggaccccccgccaggctcccatgtcatcgatgcctgtgccgccccaggcaataagaccagtcacttggctgctcttctgaagaaccaagggaagatctttgcctttgacctggatgccaagcggctggcatccatggccacgctgctggcccgggctggcgtctcttgctgtgaactggctgaggagagacttcctgccggtctccccctcggatccacgctaccatgagggccactacatccctgctggatccttcctgcagtggctccggtatgccccagcacacggctggaggagcccgggggcaagcccaccctagccccggcgccgcctgccgtcccctgcccagggctccagccgcgccagcccctgggccaacccccctcgactttcgcctctccctgcctacgagctccccgcttactccatcgccgcgtcactttctcgcccgcccggcgcaacccgcgcnactccccgccgacccgcatcgcacccgccgcgcatgccgctcccgcggtccgccttcccgatgctatcacgtccccgcgccctgttccctacgccgctagccccccacacacacgac

SEQ ID NO: 68974 - DNA, 1086 bp, Homo Sapiens
  misc_feature (468)..(611): n is a, c, g, or t
  misc_feature (615)..(629): n is a, c, g, or t
cggtccggaattcccgggatgcgggaaatggggctgtacgctgcggtggcatgcgtgctggccggcgtggagagccgccagggctctatcaaggggctggtgtactccagcaacttccagaacgtgaagcagctgtacgcgctggtgtgcgaaacgcagcgctactccgccgtgctggatgccgtgatctccagcgccggcctcctcagtgcgaagaagctgcagccgcacctggccaagggtaggggcggggcggggaagtgaaccccgacggtcagcgctttgtcatctggtttcagccccgctgccgtgcacggcgggactggagcaagtcgctcacctgaaatgagtatgagcagaccttccctgggttacgaattgagatgggatgaaaatgctttaacttcgagtgttttgaaggattaaataaccgaagtacaaagtagtagtagcggagacagtaaggannnnnnnnnnnnnnnnnnnnnnnnnnnnnnnnnnnnnnnnnnnnnnnnnnnnnnnnnnnnnnnnnnnnnnnnnnnnnnnnnnnnnnnnnnnnnnnnnnnnnnnnnnnnnnnnnnnnnnnnnnnnnnnnnnnnnnnnnnnnnnnntctnnnnnnnnnnnnnnnccccaaacccacacccacgaaagggtaatgttggcaagaagttgggtgcagaggcctactggtgaacatctgtggggaaagggtctaaggttgggaaacgagactccaggtcccgaatcctgctgcgcagttaatccctggcgtgggccttgagcaaggaacccccccctttatctgccacccatctacccccggggatctctttctagccatttcccgcgtgccgggcccccttttacacatcacctcccacggcaattcaataccctctttgccttcaggcgtgtcttccgcgcctttgaatccccttattcccccacgtgggttaaaggcatcgatacccttttcggcaaaatgggctcctcccactagcgggatttgggacgcccatgataccaatcgccccctccttccggttttacacttcctctttcaccccttttgtgcgcttatacca

SEQ ID NO: 68975 - DNA, 1064 bp, Homo Sapiens
  misc_feature (562)..(562): n is a, c, g, or t
  misc_feature (654)..(654): n is a, c, g, or t
  misc_feature (764)..(764): n is a, c, g, or t
  misc_feature (774)..(774): n is a, c, g, or t
  misc_feature (827)..(827): n is a, c, g, or t
  misc_feature (867)..(867): n is a, c, g, or t
tggccggcgtggagagccgccagggctctatcaaggggctggtgtactccagcaacttccagcctcgatgacttacgagccctcaaggggaagcattttctcctggaccccttgatgccggagctgctggtgtttcccgcccagacagatctgcatgaacacccactgtaccgggccggacacctcattctgcaggacagggccagctgtctcccagccatgctgctggacccccgccaggctcccatgtcatggatgcctgtgccaccccaggcaataaagaccagtcacttggctgctcttctgaagaaccaagggaagatctttgcctttgacctggatgccaggcggctggcatccatggccacgctgctggcctgggctggcgtctcctgctgtgagctggctgaggaggacttcctggcggtctcccccttagatccgcgctatcgtgaggtccactatgtcctgctggatccttcctgcagtggctcgggtatgccgagcagacagctggaggagcccggggcagggacacctagcccggtgcgtctgcatgccnctggcagggttccagcagcgagccctgtgccacgcgctcactttcccttccctgcagcggctcgtctactccatgtgctccctctgccaggnaggagaatgaagacatggtacaagatgcgctgcagcagaacccgggcgccttcaggctagctcccgccctgcctgcccggccccaccgaggcctgagcaaccgttcccgngggtgccgangcactgccctcccgggcttcccccagaccaccgcttagcggtggcttcttcgntgctgtaattgaacgggtccagatgcgaaccgtgaatggntggggggcatgctttggaggcccaggatggtactggcacttctaacatctaaatttctctagctcagcctcccagggccaagcatcagcacccaaaacgcccaccccagcccagcccccaaagaaaaaagaagaaagcaaaaagctgccaacccggggccttgcaacccgcccttggcaattagacaaaagcttcga

SEQ ID NO: 68976 - DNA, 960 bp, Homo Sapiens
ccttcctgcagtggctcgggtgagatggtgagaaggcgtggctgagggactcggaggtccacagcagcttagacctggagtcatctgttatggtcttagttctgacactttaatgggcttgggaccctggagcaaaagttctcctctgtgaggcaaggatttcaggagcgaggatttcaggactgaggcagcctgtgaagctgtgtaaccgagacacgcttttccttaggtatgccgagcagacagctggaggatcccggggcagggacacctagcccggtgcgtctgcatgccctggcagggttccagcagcgagccctgtgccacgcgctcactttcccttccctgcagcggctcgtctactccatgtgctccctctgccaggaggagaatgaagacatggtaccagatgcgctgcagcagaacccgggcgccttcaggctagctcccgccctgcctgcccggccccaccgaggcctgagcacgttcccgggtgccgagcactgcctccgggcttcccccaagaccacgcttagcggtggcttcttcgttgctgtaattgaacgggtcgagatgccgacgtgagtgagtgggggcatgcttgggaggcgcaggatggtactggcacatctaacatctacacttctctagctcagcctcacaggccaaagcatcagcaccagaacgcacacccagcccagccccaaagagaaagaagagacagcaaagagccgcagccggtgcttgcacaccgccttgcacatagcagaggctccaggctgactccttcctggtgggaaaggaagatgcctgtcctctccgtggaggaccctgggccctcaccgcaggcagcagtttgcgttttgaaaggttattgggtcccttcctcgggctgtgttcttgctggtgagcaaaagtgttgcctgcagaaataaaatgcagaacgtactctacgataaa

SEQ ID NO: 68977 - DNA, 970 bp, Homo Sapiens
  misc_feature (192)..(230): n is a, c, g, or t
  misc_feature (666)..(710): n is a, c, g, or t
  misc_feature (715)..(737): n is a, c, g, or t
ttgtcagacaaacacattgatttctggaccacagtagaggatggaaacctttcacaaacttatttatttgaaaatacaaatataaaattatactttccacatctgtgatgtgagagactgccatccacatagtaattttttacaacagggctttaagaaagccacacacaaagacctgaaagatgcttgagnnnnnnnnnnnnnnnnnnnnnnnnnnnnnnnnnnnnnnnaaaaaaatactcactaccaaagttctcatcagtttcatactaaagtataaaagtaagggtgaggtcagccacagtgctagggaaagttttatttagatacatttatgtccacatgaaacgcttagacttgcatcctattacatatggaattcggagtttacaatacaccatgaacggcagattggctagcccacgctacttaagaggacactcacagattccacatgggatggtacattatgtacagaatacagtagtagagaaccttcgagggaggctctggaacttttgtctctcagcctccggccccctcccccatcatgcccctgcctcccggaactgaaatcctgtctgagacaatacattctgattatttgatagccaggtgtttggattaaggttgcccccctgcaggtccccgacaagagggatggannnnnnnnnnnnnnnnnnnnnnnnnnnnnnnnnnnnnnnnnnnnngtagnnnnnnnnnnnnnnnnnnnnnnnccaacatattacagtattaaagtattgcttaacttccagcgtctccttgtgtagtgtctgtgcccaggacggggctgagctgacgtctgctagttttctgctttggggtgagggtggggaaacccgccagtgtctttcttcaatgtgcttgcctgcagtcagtccctctgctctcccactgtctgccttccttggaagatagcctggcttgcgaagcacattcaagaaaaaaa

SEQ ID NO: 68978 - DNA, 2812 bp, Homo Sapiens
ggggttgcggtccgcttcggtttctgttgcgggacccggggtgtctcctagcgcaaccggaactagccttctgggggccggcttcctttatctctggcggccttgtagtcgtctccgagactccccacccctccttccctcttgaccccctaggtttgattgccctttccccgaaacaactatcatgagcgcgaggctgccggtgttgtctccacctcggtggccgcggctgttgctgctgtcgctgctcctgctgggggcggttcctggcccgcgccggagcggcgctttctacctgcccggcctggcgcccgtcaacttctgcgacgaagaaaaaaagagcgacgagtgcaaggccgaaatagaactatttgtgaacagacttgattcagtggaatcagttcttccttatgaatacacagcgtttgatttttgccaagcatcagaaggaaagcgcccatctgaaaatcttggtcaggtactattcggggaaagaattgaaccttcaccatataagtttacgtttaataagaaggagacctgtaagcttgtttgtacaaaaacataccatacagagaaagctgaagacaaacaaaagttagaattcttgaaaaaaagcatgttattgaattatcaacatcactggattgtggataatatgcctgtaacgtggtgttacgatgttgaagatggtcagaggttctgtaatcctggatttcctattggctgttacattacagataaaggccatgcaaaagatgcctgtgttattagttcagatttccatgaaagagatacattttacatcttcaaccatgttgacatcaaaatatactatcatgttgttgaaactgggtccatgggagcaagattagtggctgctaaacttgaaccgaaaagcttcaaacatacccatatagataaaccagactgctcagggccccccatggacataagtaacaaggcttctggggagataaaaattgcctatacttactctgttagcttcgaggaagatgataagatcagatgggcgtctagatgggactatattctggagtctatgcctcatacccacattcagtggtttagcattatgaattccctggtcattgttctcttcttatctggaatggtagctatgattatgttacggacactgcacaaagatattgctagatataatcagatggactctacggaagatgcccaggaagaatttggctggaaacttgttcatggtgatatattccgtcctccaagaaaagggatgctgctatcagtctttctaggatccgggacacagattttaattatgacctttgtgactctatttttcgcttgcctgggatttttgtcacctgccaaccgaggagcgctgatgacgtgtgctgtggtcctgtgggtgctgctgggcacccctgcaggctatgttgctgccagattctataagtcctttggaggtgagaagtggaaaacaaatgttttattaacatcatttctttgtcctgggattgtatttgctgacttctttataatgaatctgatcctctggggagaaggatcttcagcagctattccttttgggacactggttgccatattggccctttggttctgcatatctgtgcctctgacgtttattggtgcatactttggttttaagaagaatgccattgaacacccagttcgaaccaatcagattccacgtcagattcctgaacagtcgttctacacgaagcccttgcctggtattatcatgggagggattttgccctttggctgcatctttatacaacttttcttcattctgaatagtatttggtcacaccagatgtattacatgtttggcttcctatttctggtgtttatcattttggttattacctgttctgaagcaactatacttctttgctatttccacctatgtgcagaggattatcattggcaatggcgttcattccttacgagtggctttactgcagtttatttcttaatctatgcagtacactacttcttttcaaaactgcagatcacgggaacagcaagcacaattctgtactttggttataccatgataatggttttgatcttctttctttttacaggaacaattggcttctttgcatgcttttggtttgttaccaaaatatacagtgtggtgaaggttgactgaagaagtccagtgtgtccagttaaaacagaaataaattaaactcttcatcaacaaagacctgtttttgtgactgccttgagttttatcagaattattggcctagtaatccttcagaaacaccgtaattctaaataaacctcttcccatacacctttcccccataagatgtgtcttcaacactataaagcatttgtattgtgatttgattaagtatatatttggttgttctcaatgaagagcaaatttaaatattatgtgcatttgtaaatacagtagctataaaattttccatacttctaatggcagaatagaggaggccatattaaataatactgatgaaaggcaggacactgcattgtaaataggattttctaggctcggtaggcagaaagaattatttttctttgaaggaaataactttttatcatggtaattttgaaggatgattcctatgatgtgttcaccaggggaatgtggcttttaaagaaaatcttctattggttgtaactgttcatatcttcttacttttctgtgttgacttcattattcccatggtattggccttttaaactatgtgcctctgagtctttcaatttataaatttgttatcttaataaatattataaaaatgacaaa

SEQ ID NO: 68979 - DNA, 496 bp, Homo Sapiens
gcacgagggttctaagtaggacacagccctggtgatggctttctgaggatgacacgatggaggcttctccaatagctctaaaactgcggtgtggaaaacattcggcagcctcaaagagcggtcttgttgaccccaactatatcatttttcatcaaaatcattcttgtaaagaatgaccaggcaacactctttgaaaattggaggccatttgcagctgctctctgttgaggaaagtgaataatagggtgccctcaaggaattgcaaaggtatcactcaacagaaactttcggtgtctgaagaaaactagatcattttatcatggtaggcatgctgatatgtttgctttaataaaatgccatatttctgcctttaatctcttgtcaacccgctattaaaaagccccaaagatgcatgtgtgcagcgcatgtaaacacttgtggttttgaggttaccacagaacatactaataaagcatgtaatttgtgttttgtgccc

SEQ ID NO: 68980 - DNA, 840 bp, Homo Sapiens
  misc_feature (714)..(770): n is a, c, g, or t
gggaagaaaactggcagacctcgaaaagaaaacaaattcagtgctaagaggctgcagaccacaagactgggaaaccacttggaagaccgagtgaacaaaattttgcggcgccagaatcaccctgaagccggggaggtttttgtccgagtggtggccagctcagacaagacggtggaggtcaagcccgggatgaagtcacggtttgtggattctggggaaatgtctgaatctttcccatatcgaaccaaagctctgtttgcttttgaggaaattgacggcgtggatgtctgcttttttggaatgcacgtccaagaatacggctctgattgcccccctccaaacacgaggcgtgtgtacatttcttatctggatagtattcatttcttccggccacgttgcctccgcacagccgtttaccatgagatccttattggatatttagagtatgtgaagaaattagggtatgtgacagggcacatctgggcctgtcctccaagtgaaggagatgattacatcttccattgccacccacctgatcaaaaaatacccaagccaaaacgactgcaggagtggtacaaaaagatgctggacaaggcgtttgcagagcggatcatccatgactacaaagatattttcaaacaagcaactgaagacaggctcaccagtgccaaggaactgccctattttgaaggtgatttctggcccaatgtgttnnnnnnnnnnnnnnnnnnnnnnnnnnnnnnnnnnnnnnnnnnnnnnnnnnnnnnnnncactgcagccagtgaaaccactgagggcagtcagggcgacagcaagaatgccaagaagaagaacaacaag

SEQ ID NO: 68981 - DNA, 758 bp, Homo Sapiens
  misc_feature (32)..(32): n is a, c, g, or t
gctgtgtgatttggattgcacgcatcattgtngaaaagtcattcaggagatctgtgtaggaactccagcatacttagcccctgaagttctccggagcaaaggttacaaccgttccctagatatgtggtcagtggaagttatcatctatgtgagccccagtggcacatttccttttaatgaggatgaagatataaatgaccaaatccaaaatgctgcatttatgtacccaccaaatccatggagagaaatttctggtgaagcaattgatctgataaacaatctgcttcaagtgaagatgagaaaacgttacagtgttgacaaatctcttagtcatccctggctacaggactatcagacttggcttgaccttagagaatttgaaactcgcattggagaacgttacattacacatgaaagtgatgatgctcgctgggaaatacatgcatacacacataaccttgtatacccaaagcacttcattatggctcctaatccagatgatatggaagaagatccttaatcactgagctaacctaaataaggaaggatttcattttatggactgatattttgctgtgtaacttgttcttcgtagattgtcatctgcagtgctgcaaagatatgaagaaatatgataacgaataagtgacaccagtactgtagttcataatgagtaggtacaggcgggaaactgaataataagaagtcataatggaatcaaggtgaagctttttataaacttttttagcctaagcaaa

SEQ ID NO: 68982 - DNA, 1317 bp, Homo Sapiens
  misc_feature (80)..(114): n is a, c, g, or t
  misc_feature (194)..(215): n is a, c, g, or t
  misc_feature (555)..(566): n is a, c, g, or t
atgatagatcactatagggcgctagcctcgttgtagccgaacgacgagcgcagcggagtagttgagcgaggaagcggcgnnnnnnnnnnnnnnnnnnnnnnnnnnnnnnnnnnncagtcgacggtaccggacatatgcccgggaattcggccattacggccgggattctagagggccgaggcgggccgacatgnnnnnnnnnnnnnnnnnnnnnnacccagacaactctaaaaatgcggaccaaactacttcattttctcaaagggcataccttgtgcattgtggcttatgatgagccatattaattgcctgttaaatatacactagcttgaacttagatgttaaatgttattattaccagcatttgtccttttgtgaaatcagtatcacgaatacttgcactctttaacacattctttataaacatgtataaattattcagaactatttaaaataaagaggagtgttattgcatgctgataatcattttgagtttgcctcagtagatactaaagcaaattgtttcagtttttttaaatgccctttgatgtttcnnnnnnnnnnnnggaactgtaatttgattgactgattttaagatcagccataagtaatcagcaatcttcaaaagcactttcagtggattggtcatctgggttctaaagggaagagtctgtgctactaaccatttcaaatgcagactcaaaccttcccaacatctttatgactctagaataatcatattgatgaaatcgtaattcatggttgagtttcagaacaaaagatattcattgcacattaaccatttagaggtcatttaaataacaaaatattgtattgtaaaagaactgtacaattttaaaacaataaagatttgaacctgtaaatgtgtgtgccttttaaagaaggatacatttttaatatatttgagtgattgctgggaagtgtgaaaatattgttatgtatcatatcaaagagaaacatgtttattacaaaaatgttctttaactatatactatgtaacagggtaaacagtgttatgtagaatagaattgtgtaaactagatctttagagaagttgccattgagcaaagttatttaaatgagttagttgagttggatgagaattgtttgaggtttgttgctagagaacaataataaaacaattctttttcagaaaatatttaatttcttcataaaaataagttaaataattttttaaatatgtatatctaatagtacaaaatggaataaacatcatagtgtatagaaaactgaatttgacaagtcaatgaataaatgaacaaatgatttcaaaaa

SEQ ID NO: 68983 - DNA, 562 bp, Homo Sapiens
  misc_feature (353)..(377): n is a, c, g, or t
  misc_feature (457)..(491): n is a, c, g, or t
gaaacatcaaagggcatttaaaaaaactgagaacaaatttgctttagtatctactgaggccaactccaaatgattatcagcatgccataaccactcctctttattgttaaatagttctgaataattaatacatttgtataaagaatgtgttaaagagttgcaagtattctgatactgatttcacacaaaggacacaatgcttggtaataataacatgttaacatctaagttcaagctagtgtatatttaaccaggccaattaatatggctcatcataagcccacaatgcacaaggtatgccctttgagaaaatgaatgtagtttggtccgcattttctagagttgtctgggtnnnnnnnnnnnnnnnnnnnnnnnnncatgtcggcccgcctcggccctctagaatcccggccgtaatggccgaattcccgggcatatgtccggtaccgtcgactgnnnnnnnnnnnnnnnnnnnnnnnnnnnnnnnnnnncggccgcttcctcgctcactacttcgccgcgctcgtcgttcgctgaaacacgtacgcccatatagtcagat

SEQ ID NO: 68984 - DNA, 903 bp, Homo Sapiens
  misc_feature (43)..(82): n is a, c, g, or t
  misc_feature (85)..(119): n is a, c, g, or t
aagactgatagactcactataggggcttcgcggctttcttagnnnnnnnnnnnnnnnnnnnnnnnnnnnnnnnnnnnnnnnncgnnnnnnnnnnnnnnnnnnnnnnnnnnnnnnnnnnncagtcgacggtaccggacatatgcccgggaattcggccattacggccgggattctagagggccgaggcgggccgacatgtttactttgtcttgtaggttatgatgtttttacccaggacaactctaaaacagtgcggaccaaactacttcattttctcaacagggcataccttgtgcatggctggcattatgatgagccatcattaatgcgcctgttacaatatacactagctgtgcaacttagatgttaacatgtcattattaccagcattggtcctttaggtgaaatcagtcatcagaatacttgcactctttaaccacattctttataaaatgtatcaattattcagaactatttaaaataaagaggagtgtattggcatgctgataatcatttggagttggcctcagtagatactaaagcaaatcgttccagtttttttaaatgcccttggatgtttcaaaaccaaacaacagggacccggtgaattcggatggccggatttcaagatccggccataagtaatcagaatcttcaaaagcacttccagggtatggctccatcgggcgtcctaaggggacagagtctggggcctatttaaccttttcaattgcagattcaaccttcccagacatctcttatgactctagactaatctttatgggatgacaattcgtactccaggggtggagcttgccagaaccacacagattttcgtgtgcgccatcaacccattcaggaggtcttctcctcaccacacttttggtcttgtcaccacacatc

SEQ ID NO: 68985 - DNA, 653 bp, Homo Sapiens
gcacgaggagagaggagactgtggtgagtccctggacgataccttcagaaatccataagattcttcatgagagtcacaattcccttctacaagacttgtctccaactgaagaggaagagccagagcatccttttggggtgggcggtgtggacagcgtgtctgagagcactggcagcatcctcagcaagctggactggaatgccatcgaagacatggtggccagcgtggaggaccagggcctgtctgtccactgggccctggacctgtaagacctggatatcattgggtttccatgcacaggccagcacctcagtaatgtggttctgaaagattaacaggtttaagggacagaagcaatgaaagaagcaatgtgaattttccatttgctttcatattattacctggattagccattaccagaggaaaaataaacatttctcagtaactttgcctttatggggaaagggttgactattgatgtattatatgtttttgtatttgatgcatcattaggcataatttttaaaatgataagtacctttcaagccaagtttgcataacctactttcaataaaaaccctctatcttgcctcctcctttattaccctctgagttttgagaaacaaccatatacagatgaatctaataggaaa

SEQ ID NO: 68986 - DNA, 665 bp, Homo Sapiens
  misc_feature (104)..(120): n is a, c, g, or t
aaaaaaaacatttcttctgtggcttagaaatgtgccagtgtgttcaaaacatttacaccaatttcaccagatttaggacctattaaaaattcaaacaagtttcnnnnnnnnnnnnnnnnnctgtgtaacagggatttttaaataacggactatatgcattcttttgttatttcacacttcagttaaagtgataacaatggtaaactgtgatcattatcagactgactgaatgctttctgatttccagtgagtgatctagttctacgtattacacaggtgtaatatctgtgagtgtaaataactggaactgtacactgattaacatgacagtttctcttttgttgttcttatctgtactgtattatagtatgtgggtataaatatctacaagtatacacacatatgtacttgtattccactattgtaacctgaaagaaagactatgtattcccttttttaattccgtactggtatttgtgttatttaaaaagcaaaattctgctctatttagttgtataatattagaggatactttgctgtgcacaattccaagtgccttagaacattgtttagctttcctaagtatatataaatgcatatatgtataaaattgggaaaagttacctcaataaaatcattgggaaatccccaaaaaaacctcgtgc

SEQ ID NO: 68987 - DNA, 856 bp, Homo Sapiens
  misc_feature (238)..(265): n is a, c, g, or t
ctaattttttcatattatattgttgcatccctacttcttcagtcaggtttttttgtgcttacaatttgtgataactgtgaataactgcttaaaaatacacccaaatggaggctgaattttttcttcagcaaaagtagttttgattagaactttgtttcagccacagagaatcatgtaaacgtaataggatcatgtagcagaaacttaaatctaaccctttagccttctatttaacacnnnnnnnnnnnnnnnnnnnnnnnnnnnnggagatgtgattatgcttacagctgcaggactctggcaatagggtttttggaagatgtaattttaaaatgtgtttgtatgaactgtttgtttacatttctttaataaaaaaaacactgttttgtgtttgcttgtagaaacttaatcagcattttgaaccaggttagctttttattttgtacttaaaattctggtactgacacttcacaggctaagtataaaatgaagttttgtgtgcacaattcaagtggactgtaaactgttggtatattcagtgatgcagttctgaacttgtatatggcatgatgtatttttatcttacagaataaatcaattgtatatatttttctcttgataaatagctgtatgaaatttgtttcctgaatatttttcttctcttgtacaatatcctgacatcctaccagtatttgtcctaccgggtttttgttgttttctgttctgtataatagtatctaatgttggcaaaaattgaattttttgaagtatacagagtgttatgggttttggaatttgtggacacagatttagaagatcaccatttacaaataaaatattttacatctataaaaaa

SEQ ID NO: 68988 - DNA, 1133 bp, Homo Sapiens
cccctgtgggtgggtttcattgttttggttttctagtctcactaaggagaaacttttactggggcaaagagccgatggctgccctgccccgggcaggggccttcctatgaatgtaagactgaaatcaccagcgagggggacagagagtgctggccacggccttattaaaaaggggcaggccctctaacttcaaaatgtttttaaataaagtagacaccactgaacaaggaatgtactgaaatgacttccttagggatagagctaagggataataacttgcactaaatacatttaaatacttgattccatgagtcagtttattgtagtttttgatttctgtaaaataagagaaacttttgtatttattattgaataagtgaatgaagctatttttaaataaagttagaagaaagccaagctgctgctgttacctgcagaactaacaaaccctgttactttgtacagatatgtaaatattttgagaaaaaatacagtataaaaatagttattgaccaaatgctaccaggctctgcagcagctcgggggcttataaaatgttcatagggatgttacaatataattttgtgttataaaatatgccattataattatgtaataaccaaaatttcaacctagagtgttgggggttttttggaaaccgcagtctattagtactcaatggttttatacaccttacttctgacagagcggggcgtatgctacgactacaacttttatagctgttttggtaatttaaactaattttttcatattatattgttgcatccctacttcttcagtcaggtttttttgtgcttacaatttgtgataactgtgaataactgcttaaaaatacacccaaatggaggctgaattttttcttcagcaaaagtagttttgattagaactttgtttcagccacagagaatcatgtaaacgtaataggatcatgtagcagaaacttaaatctaaccctttagccttctatttaacacaaaaatttgaaaaagttaaaacaaaacaaggagatgtgattatgcttacagctgcaggactctggcaatagggttctcggaagatgtcacttttacaacattgtgttcgtatgacctgtttgtttacatttctttaat

SEQ ID NO: 68989 - DNA, 1083 bp, Homo Sapiens
gataaaatgtttattctcatacaggtcaagtacatttacttctattcacagtgagtacccaataacaacaaaagcgcttacaaatttggggggcgtgattttagtacctttatttgaagtgtaatcatattaaattattattattttaactggggcagttatcagtggtttaaacaggaactttagtggcttcaatttgtttaagaaacatattaagtttgagggaaaaatttcccatgaaatatttggaacgtaagagtagtattgattagagaaaattaaataagaaacatagtatggtagccaaattttttaaaaaatcttgaacttttctgtaggtcagttttagaactgctgtgaaaagtgaaggttgccctgtggagattaaaattagagttgttttcataactgacagcatggtgaatccatttgagtcaaagtgaagaatttcctcatcaagtgactatacatttgtttttgtgtgctcaaaagaaatactcaaacacagactgatattaaccagccaggtaaattgaacgacaatgtggcattaggtatttggctgtttattggtcgttaaatactatggttttgcaatatgattgatggtaaaagagtgatgtcatattgatactagagtagcttgtttttttagtaggtgtgggaccatctcttttacaagtgcaactcagtctaggacagccatggatgcagtgtctggagttggaccctctgagcccgctggctgccccagtagcatctgcattggtgaccaaggacactgcactttgaagaggtcgccactgggttatttagtgtcttcactgcttttgttaaaaattgtaaaattttgtacacaaaaagttgtgtttttgaatatcaattgtttagacacacctacaatgataaataagtgcctttaaaggcccctctttccatgaaatacatctgtggtttagcaaggaaagtacaaaatagtttatgtagttggtataatttttatttgtgtcttcatgtagaaaaaatgaatgtcataataaaatataaaacttacgtaaagaaaataaagtcattgtccacctt

SEQ ID NO: 68990 - DNA, 1279 bp, Homo Sapiens
  misc_feature (966)..(966): n is a, c, g, or t
  misc_feature (1185)..(1185): n is a, c, g, or t
  misc_feature (1230)..(1230): n is a, c, g, or t
aatagtaaaatcactaaacttgtgcaatggtagccatggaaattatctgagggtatattgtatgattgtactttagccagggtggacatagcttaaattataaaaactaaagatgaaagtacaaggaagtataagttatacttatgtaagtataaattcatgctgcctacttctaagagaaatttcattcttcataaccacataacattataatgccactgattcatacgggatttacattaattctatgggggaggacactagaattattagtgttcattttcatctaagatctttattctctaacgttcttggtcctattgaaacattgcagtatgcaaaactactgcaatgttaaacccaagagaaaagccattatcatgtgtatgctggtcatcatgatcagtgtggtacaatttttaaaaataaactatcatgcccttcatgccattatttgtctttatttctatgatttataatcctgatatgtgatgtgtttgtaacacagggtgtgcacttgagcctggttctactgtttttattagacagactcgctcatacgcttgtactgtacctctcactaacttttctctacagccctccgctcgtcttcctgctctccctccctccctgctttctccccttttcacccctcttccttccccttattcagccctgccattctgtattccacctcctcctcccccccaccctcgcgctcccacactaccttccctgcttcctcgctctcctgtacttatccacaccccctcgcccgacgcagaacctcaccgcctccctatcctctgctcacaccttcccccctcatatccatatacaacctttcacgatgctgcctcagctcctctcccctctgcacttctacactttctccagtacatgcccttcaccctcacgcgctatacacttctccctcctcctccccttcatcacctacccttctcncctttttcctctgacctgactcttaccccggattactgaatcgaccaccatgtcaccctccctatattcacaatccaacacaacccacgctgcatccgtaactcccagtcctctcatccttctccacctgccctttgcccagcgtcctacccttattttgaaccagcacgcgctctccagacgacccacgcggttatattaacactccccctccttccntccctcgcagcattcacatacttatatctatctcacccatgtatntccagcgctcctgagaagattacatcatacgcccgctagatagtaacta

SEQ ID NO: 68991 - DNA, 1193 bp, Homo Sapiens
gaccccccacaacatttgtgactatgaacagtttacaaaaagcaggctgtactgcgtcggaattcccgggatatcgtcgacccacgcgtccgcaggagccggttccctgtgtgtgtgtccgctcgccctctgctccgtcctgcggctgcccactgccctcctacggtccaccatggccctgctgcactccggccgcgtcctccccgggatcgccgccgccttccacccgggcctcgccgccgcggcctctgccagagccagctcctggtggacccatgtggaaatgggacctccagatcccattctgggagtcactgaagcctttaagagggacaccaatagcaaaaagatgaatctgggagttggtgcctaccgggatgataacggaaagccttacgtgctgcctagcgtccgcaaggcagaggcccagattgccgcaaaaaatttggacaaggaatacctgcccattgggggactggctgaattttgcaaggcatctgcagaactagccctgggtgagaacagcgaagtcttgaagagtggccggtttgtcactgtgcagaccatttctggaactggagccttaaggatcggagccagttttctgcaaagattttttaagttcagccgagatgtctttctgcccaaaccaacctggggaaaccacacacccatcttcagggatgctggcatgcagctacaaggttatcggtattatgaccccaagacttgcggttttgacttcacaggcgctgtggaggatatttcaaaaataccagagcagagtgttcttcttctgcatgcctgcgcccacaatcccacgggagtggacccgcgtccggaacagtggaaggaaatagcaacagtggggaagaaaaggaatctcttttgcgtctttgacatgccctaccaaggctttgccagtgggtgatgggtggataaggatgcctggggctgtgcgccacttcatcgaacagggccaataaatgggtggcctctggccaatcatatggccaagaacatggggcttataatgggtgaacctggtaagaaccctctcactatgggcctgcaaaagatgccggatgaaacccaaaagggtaaaatcccccagtttgaagatcctggatcccgtccaatgtatttcaacccctccccctcagggggggcccggaattgcttgctgcccattc

SEQ ID NO: 68992 - DNA, 2777 bp, Homo Sapiens
  misc_feature (1974)..(2066): n is a, c, g, or t
  misc_feature (2072)..(2072): n is a, c, g, or t
  misc_feature (2086)..(2130): n is a, c, g, or t
  misc_feature (2141)..(2156): n is a, c, g, or t
  misc_feature (2254)..(2284): n is a, c, g, or t
  misc_feature (2304)..(2313): n is a, c, g, or t
  misc_feature (2351)..(2383): n is a, c, g, or t
  misc_feature (2678)..(2678): n is a, c, g, or t
  misc_feature (2696)..(2696): n is a, c, g, or t
atacgctaggtcgaggctgggtgttaattcggcacgaggctggaactggagccttaaggatcggagccagttttctgcaaagattttttaagttcagccgagatgtctttctgcccaaaccaacctggggaaaccacacacccatcttcagggatgctggcatgcagctacaaggttatcggtattatgaccccaagacttgcggttttgacttcacaggcgctgtggaggatatttcaaaaataccagagcagagtgttcttcttctgcatgcctgcgcccacaatcccacgggagtggacccgcgtccggaacagtggaaggaaatagcaacagtggtgaagaaaaggaatctctttgcgttctttgacatggcctaccaaggctttgccagtggtgatggtgataaggatgcctgggctgtgcgccacttcatcgaacagggcattaatgtttgtctctgccaatcatatgccaagaacatgggcttatatggtgagcgtgtaggagccttcactatggtctgcaaagatgcggatgaagccaaaagggtagagtcacagttgaagatcttgatccgtcccatgtattccaaccctcccctcaatggggcccggattgctgctgccattctgaacaccccagatttgcgaaaacaatggctgcaagaagtgaaaggcatggctgaccgcatcattggcatgcggactcaactggtctccaacctcaagaaggagggttccacccacaattggcaacacatcaccgaccaaattggcatgttctgtttcacagggctaaagcctgaacaggtggagcggctgatcaaggagttctccatctacatgacaaaagatggccgcatctctgtggcaggggtcacctccagcaacgtgggctaccttgcccatgccattcaccaggtcaccaagtaatgtccctggtgcgaggaaacagagacaacctttctgtcttcagcctctgctattgagagcttcacacagacaatgagagagggtggatggtggtgagtggatcatttctttcagccacagtgtgtaacactcagcatttgaatgtttctcagaaaagaacatgtagtgacacagggcagaggcatccatggctggcgtctggaatattaaaccaaactctccccggtccttttttctccaacttttctcaaagagtttacatgtgcaagaaagtcatcgcaccaaaaaacctgtcaattatgccattgcaatatttcagaagctttaactgaagtgtcaggttcctcgtgagaaacagcacacgttagaggctttgagagaaggcctagttctgtcatgagtagtcggcctcgtgtctgtcctcccatcttggaacaaccttatcaacaggccgcactgcagaaatgatgttttatgaaaaccaatgaggctgctgccactccagcaagggaaataatgcagtttcctgtcttatttaagaaaaagagaaggctctcttttctcccttgtcattgccgttcttttccttacacgcaaagattttttaactattgcagattttcatcccattctactgcttgattgaccatcaactccatcctatcgagatttatttaagaatgaagaacataattttctgctgatgccgtaccctcacccttttcagcaaagaatagtggagagtaggaaactgtactttatctcggcatcctcttgaatgatagtgcaagtttctccagttgggatgttgtctctgcccggttggacctcctccctttgttgaatgtggtgtgcagcctctcatctcacactgtgagtccagcggcgcagggtggtaccaggaaagaggatattctaggctttgcgtgctgctagctgggttcaggcttcacccactggaaagaaccaccatctgctctaaccatgtagacttattgcggcctggtttctctgttacaataaaattactgtagacccnnnnnnnnnnnnnnnnnnnnnnnnnnnnnnnnnnnnnnnnnnnnnnnnnnnnnnnnnnnnnnnnnnnnnnnnnnnnnnnnnnnnnnnnnnnnngtgggngggaagaggggagnnnnnnnnnnnnnnnnnnnnnnnnnnnnnnnnnnnnnnnnnnnnnttttgtgtggnnnnnnnnnnnnnnnnacaaaaaaatatttttttgtgacccctcttctttgggcccggaagaggcccctttaaaaaaaatatttccaatggggggcgccgggcgcccccacccnnnnnnnnnnnnnnnnnnnnnnnnnnnnnnntaagggtgtttccggcgggnnnnnnnnnnaagaaaaaagaaaacttccggggggggtgggtctcctnnnnnnnnnnnnnnnnnnnnnnnnnnnnnnnnnggcgggagaaacccccgggggggtgttttttataaacgaacactcctcccaaacgagaggggtctttgccggcggcccaacccccggcggaatatataaaaataaaaagaggggccgcccgcccgcggggcgcacccttttatataacaaagaaaacttcggcgcccccgcccctccgcttacgaacccctttcctgccgaaccaaatgtgggggagaaatacctctcttaaaaaaaggtctgtggttgagggagaaaaacggggaagaaccccgcgcccccacagaggggaggnaaagaaacgttactgacnccccccatctgtcggcagacagaataaatatattctccgcccccccgcgtgtgtgtgtagatactgcgtgtgtgggaggag

SEQ ID NO: 68993 - DNA, 1373 bp, Homo Sapiens
tgggggctaaaagagaaaaagagtgtctgcccgccagacaacgggcctgggagcggcagtacccgtggggggccccgcacagaaccgcattttctcagagaggaactcttgaccaccctcccttgtcaggcttaccgggaacagaacagcccattggtcgtgagtgtgcaatgtgggtgaaacctcttctgagggtggaagaccagttgagtccgcatgccaatgatgcggtcagccatgactttcacttcttgcagccattgttttcgcaaatctggggtgttcagaatgccagcagcaatccgggccccattgaggggagggttggaatacatgggacggatcaagatcttcaactgtgactctacccttttggcttcatccgcatctttgcagaccatagtgaaggctcctacacgctcaccatataagcccatgttcttggcatatgattggcagagacaaacattaatgccctgttcgatgaagtggcgcacagcccaggcatccttatcaccatcaccactggcaaagccttggtaggccatgtcaaagaacgcaaagagattccttttcttcaccactgttgctatttccttccactgttccggacgcgggtccactcccgtgggattgtgggcgcaggcatgcagaagaagaacactctgctctggtatttttgaaatatcctccacagcgcctgtgaagtcaaaaccgcaagtcttggggtcataataccgataaccttgtagctgcatgccagcatccctgaagatgggtgtgtggtttccccaggttggtttgggcagaaagacatctcggctgaacttaaaaaatctttgcagaaaactggctccgatccttaaggctccagttccagaaatggtctgcacagtgacaaaccggccactcttcaagacttcgctgttctcacccagggctagttctgcagatgccttgcaaaattcagccagtcccccaatgggcaggtattccttgtccaaattttttgcggcaatctgggcctctgccttgcggacgctaggcagcacgtaaggctttccgttatcatcccggtaggcaccaactcccagattcatctttttgctattggtgtccctcttaaaggcttcagtgactcccagaatgggatctggaggtcccatttccacatgggtccaccaggagctggctctggcagaggccgcggcggcgaggcccgggtggaaggcggcggcgatcccggggaggacgcggccggagtgcagcagggccatggtggaccgtaggagggcagtgggcagccgcaggacggagcagagggcgagcggaccctcgtgccgaattcgccacccaggcctcgctaccttgga

SEQ ID NO: 68994 - DNA, 660 bp, Homo Sapiens
gaacacaccatacacattctcatctggaatataaggagcagcttttaccctgatccagtatcttgaggaattttaagcctccactcaaatgacctgcctgtgttgtcatttccatgggaaagaactctttccacgagatctgctagttccaggcctctaagacaggaacgtatgtgccataagtgggtctacttcacagactcaatgaggcagaaattattgtagttttctcctatttcttctgcacccaactttctccttgtatttcaaaggccaggccatgtacactaacgtccttgaaatttgcagttctgtatgcttctattccaaatcattcattaccaataaaaacgaaataccaccctttccattttatagacctcatcccctatttctgtcagacagttatatgacagggtgactgtggaacctcttagttcatccaaagtctacctgaagtgctagactttcagactcttatcactgaaatccttaaggttgaggaggctttatttccctagcactggtgaagggcttcaactgtcaaacctcagaacaaatgcattagggccttagaaatgtcaatggggcaggaagaaaacacaatttctaactgcctgtttttgtataatttaataaaaaccttttaaacattaaaaa

SEQ ID NO: 68995 - DNA, 1253 bp, Homo Sapiens
cagtcgacggtaccggacatatgcccgggaattcggccattacggccggggtagatttgccttcagacagctcttggttatggtaacaagtggcccccgagtcccagaatctttcccaggttgccccagaaagaccagccacctgtcacaggtgcagttgtccggcaatagggaagcaacttcatttttgttttatatttattccctcaagtgccctgaggagcatttgcaaactgggtacaataaataagctggattatacaaagatatttaataaataagctttcagtatctattggaagacatgaagcatttgagtgggtttctttatttaaaaaattattctactggagctggtgagaaataatgaagctgtacagttctccagaaattaaaacaatgtcagagtcaatgggagaatttaatttacctttaagatttcattttaatggtggcaaaattatacattcttagaagatgtaaatttggaactgttaggagattgctccgtggttttgatcttttcaaaccattttctttttgaaaaaaggcattagttgtagtcatggacattaaatgggccatatatgcttatcaatcaaaaaagtgttccttttttggaactgcccattttctggatcttccctctcaatggataggggatgaaaaccttggttgccttttatttgtttcctcttctaaaatttctcacctgaatgtagtcctgggagagtcccgatcacgtctctcctgacatgttcactgaaatcggagacaagaagttacatggatgatgggatcttatagggtcacacaaagacaatttggcagcttatcttaatttcctgcagtgagacaacacatgtggaactgggaaggacagctgttgttacgagcagtttttcctggtcatggttgtaaagctctgtaacccacattgtaaagccgtgaatgtttttagtcttgttgacgagtttttagagactgctggacctctgagggctttgagagtgcagctgtgatgatgtttcactattacttcagtgtgaatgtagaaccaaggactcatcttcattttatacctaaaagtgccttgtcaagaaatttttgcatgttttaaaagataaatatttttgtacacagagttcaaggggaaatgcactttaaaaatcccaagaatggatgttctttgtgtggtatgagaggttggtttgtatctcaaaagcaaaaatgtaataaaggaagacaaaaca

SEQ ID NO: 68996 - DNA, 941 bp, Homo Sapiens
attcggaacgaggacaattgcagctaggaacattaggatgaatggctggctgcttctaggaatataagatgcctcaagcattcattatttatgatttgaatactgtagctattttatgttgcatggcttttgaatgagtgtaaattgttttcttttgtgtatttatacttgtatgtatgatttgcatgtttcaatgataaagggataaaacagtatactgacaactgtttacaagaaagtggagaaaaatgtacatacatttttgtatgtttagatattaccgtaaatactcaggattggagctgcttgtaagtataacaatatacagaataactttattttatcttgtcagactccatcactaatctaaaacaaaggtggcacttttttatgttaaccttaaactctaggccttactggaagccactgataggggacacttcactaccagatgtgtgcagtgcaacagatggtcatatacactgtgaggcactgaaattttgccttcagaggttctgaccagattggctgctgaaatagcccctaactttctgaaggcttgaagaggaaaaaataaagtttacatactcttgatgtgaagtgcatttaaatgtttgttggcttgttgcagttctatgaaacagagctgttaataatggttatgtggattactgtgatttgaaaactaaattcacaataacttacctagtagagatttagtgagttgtttcctttaaagaattttacactacatattttaatagtaaacagggatcacttttcctttagcattcagaatgacaccatattcttaaatatactccttccctgaagcgtgtttgtgtgtgatgccatatttctttttcaggtaaatgtagtcttccttataaaaatgaaattaaacctatgctctcaattcttttatattctaacaataaata

SEQ ID NO: 68997 - DNA, 341 bp, Homo Sapiens
  misc_feature (22)..(22): n is a, c, g, or t
taaaaacacaaaacaaacaaanacaccttgaatcaagtttgtttgtatatggaggttccacgtctttctttaggcagggaccaggcaggacttcagaaaaaccctcatgagcacattgcaaagatgttagacatgaaattttaaatgtagtttgtacagaagtcacacttttttgtccacctcacagatgtgaactttactttgttttaaaactgatcagttttgccaaggggccagaattattccttgttagaattgctccagttcaagtctgctgctttcctacaatttttcaaattttataatgtattaaatacaataaactctgtttaaaaaataaa

SEQ ID NO: 68998 - DNA, 1185 bp, Homo Sapiens
ttttttggattttacataggaagttttaattaagtagaaatgaaaatttatccagatcaatttatttgaacttacatccaagaagaaacattcaacttaaggattagaaataaaagtggcaattgtctacttcttttgtggtaaggaatagatcatacaagcctgactgatgagagtaatagctttgtgaaaactgtatattcgagtacatgtgaactcatacttggcttatacagaatttatccaattctagcaaagtcagcataatttaaataaacctccttgagttttacaccatggctctcaagtctgaaagcttagatttgattataaccatggcaaaagtgattatctttattttctgaaaacgtaatcaacttttaaaataagttaagcaaacatcagttttacacagaccatatgaagggtaggaggaaactgcaattgttcctctaattgcagagcctaaaccataaattcaaattgtactgctatctctactgttaaaacaagtcaagaaagtcttttacagtctaagagaagtgaatgtaattatgcagcatccactacaaagatattttgaaaacctatcatcatgttagtactcaatggctgtacagcaattattttaaagtacgctcccagggtcacctcttgctgaagaattaactccaggaagtcgagttacaagtatcacctacattttataggaaataaaggcaaagatttaggactgagtcatctgttcaaaattagaaagtaaaataaaaaaatagactttggttttatttgaaaatccctttctattgggttatatccattaatctacatttcaacttccaagccaatctattttaaaaagttacctccattttgtgtccaatatcttactgtattagaatagtacaggtagactcttgcactgctcatttctagtaggccattaataaagaaaagaaaaacctttgtgctttctgttctttccttaaattacaaatgtaaaactgacttttttcccccaaagtagaaacagtagtttgcttgacgaaaaatcttttattcacttgggcattacattacctaacattacacaggctattttgcttttaaacattgttttccttgtgttgtctcccccggccgtaatggccgaattcccgggcatatgtccggtaccgtcgactg

SEQ ID NO: 68999 - DNA, 523 bp, Homo Sapiens
gcacgaggagtcacaggactctctggtggcacagcaggaagcctgtccacactcaccagcagaacatcagctctgtgagggcagagatctcatccttcacggtcactgctctattctcagcacagaccagagcctgcaaacaacgtactctacagatgtttccacaactccacaagacctccacctttccaagctctcaaaaggcacagagcaataaaacgtattttcccaagctcagaggaaccatctgaatttaacggttggttacaaacactttggcgagagtcacaggaggatgtgctctggagtgaattcttcagtcagggcctacgggttctgcaggtacagaaatggcagtctacagagaaggaggcaaacacagatctgatcagtgcggagcaggtcacaagtcacaccagtcacaaagctgcctccttgacattcagagcttaaagatctaattgtcattcttcctgaaacttgacctaattatttctcctataaaactgtgctgtttctcaac

SEQ ID NO: 69000 - DNA, 611 bp, Homo Sapiens
attaaatagtgtgaaaatataatgggcattctgaaaacttttagaaaaaagtagtactttttgatactttagtatttatggaaactagtggaaaagagaaattagtgtgctatataaatcaggcattcaagtaacagtaatacaggatatatgtgttttctttccctgatgtttaggaaaatcacaggagggtaaatctttgctggagttatctgaatcattggcatttatccgattccactggtggtagtttgctagtgcttctaaaagttgctccctagcactgagaggtgtgggtaggtaaaaatgtgtttgcttgagaaaagcaaaaatgctaacaaggttttgatagattggcccaaaattctaacttgaatattaagaatgactaggaatggtagaattgacagagatgattagtaaagtctcttgatgcccaattggttaggtatgaaagtaatatgaacacattaatgttgaattttacagacagtatatttgaaaaaaattgattccatgtagtcttcaatttttaatttttaagaattggagaatttctaatgttaaagttagtttataaatgtgagtaaataaactctaagtttgtattg

SEQ ID NO: 69001 - DNA, 1780 bp, Homo Sapiens
tggctttaaatatatgtttatttgtttttctttatattaatttgtttctcccatagaggaatagcattacagtctaacaatcagaattctgttacacacatacacaggcatgccacatgacccagttgaggtggttgtctccttgagtctgttgacacgtcacatggtcaaagtctcctcatttcagccagtctcaacacaaaacacccaacagggatgcactcaacttgttggttccatgtggaactaggtggcagggcgagagggaaagtagtagaagggggctatggtgtgtctgcattcagtcccctcacataaagccacatggatctaggggggtatccaagagctctggtggggtccgtgttgcacctaagacattataggtcagagcaagttgctcagagggttccaggcagggggctggggagcaggcatactctaaaacagcaccaaactgcattcatacacggtgccctgctggggctagactggcaaaggctggaaagacacccagcttgaaggaaccactcagacttactggggaataactggaagtcactgtttgatgtaactgggactcactctagaaacgggtccctctgacagttttggcaaagtgctggtagtactgacattaatactcacaaattgatacaaactcctctagggcctcagaaaacatcaatcaaaacagactctctaaccccctcctaaggttgcataggactttgaactctggttccctcatgtattcaagttctgtggttttaaaaaaaatcctgaagcatgctcaaggtgaaaggcacgtacacagtcaatacagtatgacaagggctgatgcttcaggagtcagactagcaggagactgagtagtgttggttccttagaaatctatacacaattaaaatattgccacactcaaatgctacagaatctataggaaaggtacaaaaaaatatggagccttgcaaccaagcaggtgagagattgggttctagaatacaggagcctccagaaatataggtaaacaaaaggccttttaaaatttgagccaaatgccctataacttaaactcttcccccaccagaaggatcatgggcaccacacaggactgagcctaggtcccagctggcagtgaggagtaggcaagaagggttggagggagattcagctcttggaggtgccgaagaccctaggctggctgtgaagtgcccaagtggtagctggaagaataaaagcaactaggttctgaaggagaacttgggagaggagcaaggctgtcaactactggggccctagtggactggcgtgggagctttgatccgtttttagtgttaatttggcttattccctggaataggagaccccatcaggtcttcctctgtcctcatcccagcatccatggggataccccatcccttccccacataccccccatgaggcctggggctatagggtcagggagggcagctgcctttgccctcatgggaatgcagagttttctccaagcttcagcttggctgtgaggcctggaaacctagagttggggtgaggggaggacctatgttcataggtaccaagaagtcttaaaagttcctaggaagagtgagcacacactagaaaaggacggctagaaagaggaaatgggaagcaactcagggcatcccaagaggctgttgctggtgtctgagcccaaaattcagtctcaccacaagaaggggaggctgtggcccccctcgtgccgaattcacaacccagcctcgtacctagaccgtta

SEQ ID NO: 69002 - DNA, 648 bp, Homo Sapiens
  misc_feature (451)..(465): n is a, c, g, or t
aatattaactactatttgctttcagatttaaaataattattgggactttaatcttttgaacttctctgaagcttctaagtattctttctagtcatgtgaataggtaatttgagaaatacatgctcactgttcaatacttttccattatttttcctcttttttatagagctaatgtcaaaccccgaaattccacaccacctagtttggcaagaaatcctgccccaggtgtgcttacaaacaaaagaaaaacatatactgagagctacatagccaggccagatggggactgtgcatcttcccttaatggtggaaatattaaaggcattgaaggacattcacctggaaacttaccaaaattctgccatgagtgtgggactaaataccctgtagaatgggccaaattttgctgtgaatgtggcattcgaagaatgattctatgaatagaatctcnnnnnnnnnnnnnnngccaagttcagagtttatgattattgctgcttggacagctagagcacatcctctagttagtttgtgctaaaaatactcgaaataccatttccagttaattttgaagtgtaatcttttggctatataatgtgtgtatgtttatatgtgtacatatactgtatataataaatatctgatacccca

SEQ ID NO: 69003 - DNA, 1262 bp, Homo Sapiens
  misc_feature (1065)..(1079): n is a, c, g, or t
cagtcgacggtaccggacatatgcccgggaattcggccattacggccgggggctgagctcgaggaggtggcgcgatggagggactggaagagaatggaggtgttgtccaagttggagaattgttaccttgcaagatttgtggaagaacattctttccagtagcattaaaaaaacatggacccatttgccagaagactgcaactaaaaaacggaagactttgtgattcaagcagacagagagctgaaggaactgatattccaacagtaagaacctctcaaaccgaggccagaaccaccaaagaaaccatctaattggagaaggaaacatgaagaattcattgctaccataagagcagctaaaggccttgatcaggccctcaaagagggtggcaaacttcctcctcctcctccaccttcttatgatcctgattatattcaatgtccatattgtcagaggagattcaatgaaaatgcagctgatagacatataaatttctgtaaagaacaggcagcacgtattagtaataaagggaaattttctacagataccaaaggaaaaccaacttctcggacacaggtgtataagccacccgcacttaaaaagtcaaattctcctggaactgcatcatcaggatcttcacgattaccgcagccaagtggcgctggcaaaactgttgtaggtgttccttcaggtaaagtgtcttcaagtagcagctctttgggaaacaaacttcagaccttgtctccctctcataaagggatagcagcccctcatgcaggagctaatgtcaaaccccgaaattccacaccacctagtttggcaagaaatcctgccccaggtgtgcttacaaacaaaagaaaaacatatactgagagctacatagccaggccagatggggactgtgcatcttcccttaatggtggaaatattaaaggcattgaaggacattcacctggaaacttaccaaaattctgccatgagtgtgggactaaataccctgtagaatgggccaaattttgctgtgaatgtggcattcgaagaatgattctatgaatagaatctcnnnnnnnnnnnnnnngccaagttcagagtttatgattattgctgcttggacagctagagcacatcctctagttagtttgtgctaaaaatactcgaaataccatttccagttaattttgaagtgtaatcttttggctatataatgtgtgtatgtttatatgtgtacatatactgtatataataaatatctgataccccc

SEQ ID NO: 69004 - DNA, 624 bp, Homo Sapiens
caagcgagaaacagccttcagccgagggaatgaaaggattgtgaaccccagagtgccccctccctgcccagaacccagcagcgtgagtcaccagcagtttcaaccacttcatcggatgcaacagacaaacgttgccctgcttggccgggagactgtggggaaaaaggagcccacagggttcagccttaacaaccccatgtatgtccggagcccctgtgatcctgacagggatcagcgatacctgaccacctacaaccaagggtactttgagaacatccccaagggtctagaccaggaaggctggactcgaggtggcatccagccccagatgccaggaggctacgccctcagccagccggtcagctgcatggaggccaccccaaaccccatggagagcctgcggcacctgcatccccacgtgggaagaaccctgacctcagctgaccccttctaccagaacacacctcacagcagccgctgcgtggcacacagctgagccctgagcccttggtttgtcaatcctaggggacaggagccaggctactgtctgtacccccactccatcccccaggggaacacccctgcccagctactttcctaatgaaataaagagcattgaagcag

SEQ ID NO: 69005 - DNA, 779 bp, Homo Sapiens
ctaacaggttaacctcagagccacagacgtcaggctcatgcgccagttgcttgtaatcaatgagagcatcgagtccatcaagtggatgatcgaagaaaaagccaccattaccagcagaggcagcagcctcagtggcagcctgtgcagtttgttggagagtcagagcacctccttacgtggcagctacaacagcctacacgatggcagtgatgggctggatggcatttccgtgggaagttatctggacacgttggcggatgatgtcccaggccatcagaccccttcagacttggaccaattcagtgacagctccctcatagaggactcacaggcactacacaagcgtcctaaattggattctgaatactactgctttggctagtgacagttttttgcatgggactggtgtgcaatgaacttgtatttatccttcttctccgctgctatatttttggtgtgatttttattttaataagatgacctttttaaaagaagctgattttgaaactgcttaatggtattgctgttgctcctaatacttctcatctgagctgatttatttttctctgttacatctctattttttatttattacaatgattttctcccttcttttacagtagcacaaacaaagtagggggaaaagaataagcaataattatgtttttgcttttgttttcagagcaatgggtcagggattacaagaaaaactttgctaaattttacaataaaccaaagtctgataacagttaatggtgctgcttgcgtccttaaatgac

SEQ ID NO: 69006 - DNA, 1328 bp, Homo Sapiens
ggctaggtacgaggctgggtgtgtgaatcggcacgaggcgcgggagctggcccggcagacccatggcatcctggagtactactgccgcctgctgcaggaggacagctcaccactcctgcgctgcgccctctgcattgggggcatgtccgtgaaagagcagatggagaccatccgacacggtgtacacatgatggtggccaccccggggcgcctcatggatttgctgcagaagaagatggtcagcctagacatctgtcgctacctggccctggacgaggctgaccgcatgatcgacatgggcttcgagggtgacatccgtaccatcttctcctacttcaagggccagcgacagaccctgctcttcagtgccaccatgccgaagaagattcagaactttgctaagagtgcccttgtaaagcctgtgaccatcaatgtggggcgcgctggggctgccagcctggatgtcatccaggaggtagaatatgtgaaggaggaggccaagatggtgtacctgctcgagtgcctgcagaagacacccccgcctgtactcatctttgcagagaagaaggcagacgtggacgccatccacgagtacctgctgctcaagggggttgaggccgtagccatccatgggggcaaagaccaggaggaacggactaaggccatcgaggcattccgggagggcaagaaggatgtcctagtagccacagacgttgcctccaagggcctggacttccctgccatccagcacgtcatcaattatgacatgccagaggagattgagaactatgtacaccggattggccgcaccgggcgctcgggaaacacaggcatcgccactaccttcatcaacaaagcgtgtgatgagtcagtgctgatggacctcaaagcgctgctgctagaagccaagcagaaggtgccgcccgtgctgcaggtgctgcattgcggggatgagtccatgctggacattggaggagagcgcggctgtgccttctgcgggggcctgggtcatcggatcactgactgccccaaactcgaggctatgcagaccaagcaggtcagcaacatcggtcgcaaggactacctggcccacagctccatggacttctgagccgacagtcttcccttctctccaagaggcctcagtccccaagactgccaccagtctacacatacagcagccccctggacagaatcagcatttcagctcagctggcctggaatgggccaggctggtcctggctgcctgttccctgtgctcttcagaattactgtttttgtttccttttaccccagctgccattaaagcccaaacctctagcccaaaa

SEQ ID NO: 69007 - DNA, 889 bp, Homo Sapiens
taaaggctaggtacgaggcctgggtgttgaattcggcacgaggagaatggaggagtcggaacccgaacggaagcgggctcgcaccgacgaggtgcctgccggaggaagccgctccgaggcggaagatgaggacgacgaggactacgtgccctatgtgccgttacggcagcgccggcagctactgctccagaagctgctgcagcgaagacgcaagggagctgcggaggaagagcagcaggacagcggtagtgaaccccggggagatgaggacgacatcccgctaggccctcagtccaacgtcagcctcctggatcagcaccagcaccttaaagagaaggctgaagcgcgcaaagagtctgccaaggagaagcagctgaaggaagaagagaagatcctggagagtgttgccgagggccgagcattgatgtcagtgaaggagatggctaagggcattacgtatgatgaccccatcaaaaccagctggactccaccccgttatgttctgagcatgtctgaagagcgacatgagcgcgtgcggaagaaataccacatcctggtggagggagacggtatcccaccacccatcaagagcttcaaggaaatgaagtttcctgcagccatcctgagaggcctgaagaagaaaggcattcaccacccaacacccattcagatccagggcatccccaccattctatctggccgtgacatgataggcatcgctttcacgggttcaggcaagacactggtgttcacgttgcccgtcatcatgttctgctggaacaagagaagagggtacccttctcaaagcgcgaggggccctatgactcatcatctgccctcgggggagctggcccgggaaccctggcatccggagtaatatgccgctgta

SEQ ID NO: 69008 - DNA, 1227 bp, Homo Sapiens
  misc_feature (29)..(29): n is a, c, g, or t
  misc_feature (45)..(45): n is a, c, g, or t
  misc_feature (54)..(54): n is a, c, g, or t
  misc_feature (1084)..(1084): n is a, c, g, or t
  misc_feature (1102)..(1102): n is a, c, g, or t
  misc_feature (1105)..(1105): n is a, c, g, or t
  misc_feature (1153)..(1153): n is a, c, g, or t
  misc_feature (1170)..(1170): n is a, c, g, or t
  misc_feature (1217)..(1217): n is a, c, g, or t
aaccgagggggggcctagttggtacaaancccgccagggctttanttaaaaacngaacggggccagtaactatacggtcctaaggtagcgaggcctgggtggcgaattcggcacgaggagtcggaacccgaacggaagcgggctcgcaccgacgaggtgcctgccggaggaagccgctccgaggcggaagatgaggacgacgaggactacgtgccctatgtgccgttacggcagcgccggcagctactgctccagaagctgctgcagcgaagacgcaagggagctgcggaggaagagcagcaggacagcggtagtgaaccccggggagatgaggacgacatcccgctaggccctcagtccaacgtcagcctcctggatcagcaccagcaccttaaagagaaggctgaagcgcgcaaagagtctgccaaggagaagcagctgaaggaagaagagaagatcctggagagtgttgccgagggccgagcattgatgtcagtgaaggagatggctaagggcattacgtatgatgaccccatcaaaaccagctggactccaccccgttatgttctgagcatgtctgaagagcgacatgagcgcgtgcggaagaaataccacatcctggtggagggagacggtatcccaccacccatcaagagcttcaaggaaatgaagtttcctgcagccatcctgagaggcctgaagaagaaaggcattcaccacccaacacccattcagatccagggcatccccaccattctatctggccgtgacatgataggcatcgctttcacgggttcaggcaagacactggtgttcacgttgcccgtcatcatgttctgcctggaacaagagaagaggttacccttctcaaagcgcgaggggccctatggactcatcatctgcccctcgcgggagctggcccggcagacccatggcatcctggagtactactgccgcctgctgcaggaggaacagctcaccactcctgcgctgcgccctctgcattgggggcatgtcccgtgaaagagcagatggagaccatccgacacggtggtacacaggatggtgggccaccccggggcgncctcatggaattgcctgncanaagaaagatggtcagccttaaacatctgtcgctaactgggcctggacnaggctgacgcatgatcnaaattggggcttccaagggtgacatcccgtacatcttcttcctattncaaggggcaa

SEQ ID NO: 69009 - DNA, 759 bp, Homo Sapiens
  misc_feature (47)..(151): n is a, c, g, or t
  misc_feature (175)..(188): n is a, c, g, or t
cagcctgggtaggaaaattagaagcaagctggatgcagtggctcatnnnnnnnnnnnnnnnnnnnnnnnnnnnnnnnnnnnnnnnnnnnnnnnnnnnnnnnnnnnnnnnnnnnnnnnnnnnnnnnnnnnnnnnnnnnnnnnnnnnnnnnnngtgatagaacaagaccctgtctcnnnnnnnnnnnnnncaacaaaaacttagaattgaggagttgtacctccattggcttcctcactccaaaataggtgctgatccttcctattcctattctttgccaccttttgggtgtggtgtcaccagcctgtttagccaagtagctttgggcataggctgcccaatctgagcaaacaccagtgaggctctattgagccaagaccaagtcctcaaagcacctgaaccactgtggccttctcagcctacagcagtgtggtctcttacatggccacaaagggacacacagtgacaaaaggctcggaatgttacaatggtaaaatgagtgatctcaaatccactgacagatataaaataggcttagagaggaaaagctgcctctggtcaagtagatcatggcagcatgaattccaactcacttttttacaactccaacttctatgtttatctttgttactttcacttttttacaacctggccagaggcattttttaaatcaggcccaatatcagtattctttttgtgtgtgccaattttgttatcacatccctatgaagttgaaaaataaagttaattttgaccaaaag

SEQ ID NO: 69010 - DNA, 1204 bp, Homo Sapiens
  misc_feature (93)..(156): n is a, c, g, or t
aaaaattattggtagttccaggatagccccgtggccaattggaattgagtcttaaaaatatgcatcttttcagaaaacccttgcccctttttnnnnnnnnnnnnnnnnnnnnnnnnnnnnnnnnnnnnnnnnnnnnnnnnnnnnnnnnnnnnnnnnggtatacacaatttaccacaagaatagcaaacttcctttgggaaaatgaaatagttacccaaaaacatctctcttaaagcttcaaacaggtatattacttgaggaaaagtatattctctgtgtactaaggatgaattaaaaaatcaactggtttgctctcttcccacctgaaaagggatgactgcattaatatatgtgctttccacatccatatatgttttaataaaagtctaccatctatgtcttttgtttcaaacattttgaaacaaaatatgtattgattcttcaatgaatgaaatcacgcctcaaagtttggagaaggaaaagccagtgaaaataaggccaaaaaaccataccacaaaaggacaggaagcctgcagaaataaacagttctcttttctgaagcgatgttttagaatactgattataattcatggaaacaagaaaacaaatactgttcatctttattcaaattgagtgaattctggcaacatcataatctggtggctcaggccaacagaagtgactagaactttatggaaaagtactgttcaacattaaatctacaaacaaaggtttatggaagagggaatgtcaaatttatgtatttttatcatatggtgagctgctcatgtcgtcttgacagtctgaaggctttaaaagatggttttacattgttagctaataaattacagatgatttctattttgccatgtctaaaactagctctgggcaggtatgaacaagtggtgacatggaagctgccaggaggtatcaaaaacaaggcatgaatattcatttgctaggaagctataatgtctgttccctaggtgacatataggactactcaaacctcttaccacacaaagtgcacgatcacgcagtcctgaaaaatacacgttaggtttatattttgtgtaacagtttatggaaaactgaaatgaaaaattattttttctgactaaaaatataaaataccttgagactcaagaaaaatgtatatgtttgtgaatgtataaaaccaaaaaggacaaattctcctcttgcc

SEQ ID NO: 69011 - DNA, 1332 bp, Homo Sapiens
  misc_feature (548)..(548): n is a, c, g, or t
ctttgattacaaggaacatgcagctttaaaaatgctttaaccccaaactggcaacttttctatcacttttttactctgttttcaagtttgaaatatttagaaaataaagatcacctctgacagttattgatgaaaaataaattgttttagatattataactttgatgtttaatgctctcaatttaaaactttgaacttggaacaaagtgctgtggtttataagaccttgttggggaggagtgggttaattttagtaatcagtacaaggatttagacactaagatttcattttataaaattatggagacattaggcttgtaatgttctgtctttccatttgaagtctccccattattatattcctctatgtaaattacattcaaataacaaacttaaacacaggccaatattgaataatttaaaaaccagttgaaaacgtcattaaaatcagcttatttgaattaacacatggtttctccctagagaaggaccctatgagcaaccagctgcccgtgttatgtggtcattttctaatacttaaaaaaaantccattaaaaacatataaagtattagggcaacattaatcacttttctaaaagttcacattaaactttgaaaaaagatgccaaaaaaggtattttaatgactctaacaccagtagctacatggatgtggtaagacgtgatttgtctgtttataataacattgtacacatttttctacatctcctcttaagaacaagagactgttttaccagattcatgaactttctctcctatgctgacctttccctgcccctactacctccaccaagtgctctttaacaaaaataaacttgcttacctggtctaacaatatattcatttccttgaaatgttgtactgtacgttcatttggtattttccaaaagcaattattctaacatcaaaacttcttaataacatctctacacctcaagtatatatgtggcattacatgagaacttgaacttccctttagttttgttttcactaataatataaaccttttctaaatacaaattctttgaaatgaacttaggcaatgaagtagataagtgatattaaacagcttctagaatcaaagaaacattctgatggactaggctttcaaaatatttgtctttcgtcctcattttacttagggtatagacgaacatttaaaggtttttttcatccaggtttgactcagtgacagtgaaaacatacaacattcaagtactattagataaacgcagccctacaagggtatgtgtccacatagctaattttacaaaggagaattatcttcattaatctgcagtatatttgacc

SEQ ID NO: 69012 - DNA, 1217 bp, Homo Sapiens
  misc_feature (100)..(100): n is a, c, g, or t
  misc_feature (190)..(481): n is a, c, g, or t
  misc_feature (526)..(549): n is a, c, g, or t
  misc_feature (570)..(632): n is a, c, g, or t
  misc_feature (634)..(649): n is a, c, g, or t
  misc_feature (849)..(864): n is a, c, g, or t
  misc_feature (1034)..(1050): n is a, c, g, or t
ttatatctgcggttccccttgaatgaggtatatttgatatctcacgggggacctttgaaaccccgacaccggcttttacgtcatgctttgatgcctttgntacatgtcttcctggtatcccctgatctgtgataccgtataccgccttgagtgactgataccgtcaccgcaccgaacgaccgaggcagcnnnnnnnnnnnnnnnnnnnnnnnnnnnnnnnnnnnnnnnnnnnnnnnnnnnnnnnnnnnnnnnnnnnnnnnnnnnnnnnnnnnnnnnnnnnnnnnnnnnnnnnnnnnnnnnnnnnnnnnnnnnnnnnnnnnnnnnnnnnnnnnnnnnnnnnnnnnnnnnnnnnnnnnnnnnnnnnnnnnnnnnnnnnnnnnnnnnnnnnnnnnnnnnnnnnnnnnnnnnnnnnnnnnnnnnnnnnnnnnnnnnnnnnnnnnnnnnnnnnnnnnnnnnnnnnnnnnnnnnnnnnnnnnnnnnnaagaattcggcacgagggatgttggagcgcccgcggctgtaggcnnnnnnnnnnnnnnnnnnnnnnnngagacaagggttttgctcttnnnnnnnnnnnnnnnnnnnnnnnnnnnnnnnnnnnnnnnnnnnnnnnnnnnnnnnnnnnnnnncnnnnnnnnnnnnnnnnttgtgttgcctcatacgaaatgtatttggttttgttggagagtgtcagactgatctggaagtgaaacacagtttatgtacagggaaaaggattttattatccttaggaatgtcatccaagacgtagagcttgaatgtgacgttatttaaaaacaacaacaaagaaggcagagccaggatataactagaaaaaggatgtcnnnnnnnnnnnnnnnnactccccctctaaacactgctgctgccttaattttagaaagcagcttactagtttacccttgtggtataaagtattataaattgttgtgaatttgaagaatccgtctactgtattattgctaaatattttgtttatactaagggacaattattttaagaccatggatttnnnnnnnnnnnnnnnnnctctgtttctgcaggggatgatattggtgagttgccaaagaagcaatacagcatatctgcttttgccttctgttgtttatcttacctgcagatattaagaatgtatgcattatgtaaaatgctcaattatatatttttgttgagttttttaattaaagacttgtaaa

SEQ ID NO: 69013 - DNA, 603 bp, Homo Sapiens
  misc_feature (14)..(14): n is a, c, g, or t
  misc_feature (35)..(35): n is a, c, g, or t
tccaaagagaagancggctcacttctcccccctcntaaacgaagagcatcaccatctccaccaccacagcggcgggtatcccattctccacctcccaaacaaagaagctcccccagtcaccaagagacgttcaccttcattatcatccaagcataggaaagggtcttccccaagccgctctacccgggaggcccgatcaccacaaccaaacaaacggcattcgccctcaccacggcctcgagctcctcagacctcctcaagtcctccacccgttcgaagaggagcgtcgtcatcaccccaaagaaggcagtccccgtctccaagtactaggcccattaggagagtctccaggactccggaacctaaaaagataaaaaaggctgcttccccaagcccacagtctgtaagaagggtctcatcctcccgatctgtctccgggtctcctgagccagcagctaaaaagcccccagcacctccatcccccgtccagtctcagtcaccgtctacaaactggtcaccagctgtaccggtcaaaaaggccaaaagcccaacaccgagcccatcaccgccaagaaattcagatcaggaaggaggtggaaagaa

SEQ ID NO: 69014 - DNA, 2018 bp, Homo Sapiens
  misc_feature (746)..(829): n is a, c, g, or t
  misc_feature (1363)..(1403): n is a, c, g, or t
  misc_feature (1406)..(1406): n is a, c, g, or t
  misc_feature (1714)..(1745): n is a, c, g, or t
  misc_feature (1929)..(1966): n is a, c, g, or t
ctccttctcccgcccctcctcctcgacggcgcaggactcccacaccaccaccacgacgaaggactccttctcctcccccacgtcggcgctaaccttctcctagaagatactctcctccaatacagaggagatactctccttctccacctccaaagagaagaacggcttctacctcctccccctctctaaacgaagagcatcaccatctccaccaccaaagcggcgggtctcccattctccacctcccaaacaaagaagctccccagtcaccaagagacgttcaccttcattatcatccaagcataggaaagggtcttccccaagccgctctacccgggaggcccgatcaccacaaccaaacaaacggcattcgccctcaccacggcctcgagctcctcagacctcctcaagtcctccacccgttcgaagaggagcgtcgtcatcaccccaaagaaggcagtccccgtctccaagtactaggcccattaggagagtctccaggactccggaacctaaaaagataaaaaaggctgcttccccaagcccacagtctgtaagaagggtctcatcctcccgatctgtctccgggtctcctgagccagcagctaaaaagcccccagcacctccatcccccgtccagtctcagtcaccgtctacaaactggtcaccagctgtaccggtcaaaaaggccaaaagcccaacaccgagcccatcaccgccaagaaattcagatcaggaaggaggtnnnnnnnnnnnnnnnnnnnnnnnnnnnnnnnnnnnnnnnnnnnnnnnnnnnnnnnnnnnnnnnnnnnnnnnnnnnnnnnnnnnngctgtggctgcagctgctgcagctgctgtgacccctgcagccattgcagctgccacaaccacattagcacaggaagagccagtggcagcgccagagccgaagaaggagactgaaagtgaagctgaagataaccttgatgatttagaaaagcacctgcgtgaaaaggccctgagatcaatgaggaaggcccaagtgtccccacagtcttagggggaaatgtttgttatgatgtaaattttatttggtttgtacgcagttcaatttcaaaattgctaaaatgtgtttgagctttagactataacatttgttgtaataattgctaggttgaagttcaacatgtaaaaaaagggggcatggatttacattgcaaaaggtgtccacagtgtattagtgacattctttcattgacagctgacataattcattgagtgaaatattttaagccaaaaaaaattccctttttaaaaaagggggtttaaatactgttggcatttttatggttcctttaaatgccctagctattcccagaggggnnnnnnnnnnnnnnnnnnnnnnnnnnnnnnnnnnnnnnnnnttnttccttcctcttcttatttttttcatttgagtcttagctcccatttaagttatgcttctgaccttgtatggtctgtaagcttgcccagaaataagaccactgttttgaactaccacaaaagtataaatgaatattttaatgccacaatctttcctgttgcctgtggagtctctgctgaaatgaatcaggattcgagctctaggatgagacagaaaatgaaagcatgttgtttgccaggacactgtgggtttatattgatgtgtaacaagttgatttggaacactggactctcattctgttattctggnnnnnnnnnnnnnnnnnnnnnnnnnnnnnnnngtaaaggcaatgagctagtcccagaaaggatccttcagttacatacaatttgtttaatgaaatgtcatggctctgttcatatttttgtcttgttcttccaattggtataaacaactttcagagcctcttgtatttggaaggctggaagggcccagactttggaatagtgttttggtttccctgnnnnnnnnnnnnnnnnnnnnnnnnnnnnnnnnnnnnnnaaactaaagctatataaagcttgtggattaaacagaataaatttttaaattt

SEQ ID NO: 69015 - DNA, 767 bp, Homo Sapiens
  misc_feature (59)..(90): n is a, c, g, or t
  misc_feature (370)..(438): n is a, c, g, or t
  misc_feature (519)..(527): n is a, c, g, or t
attaaacaaattgtatgtaactgaaggatcctttctgggactagctcattgcctttacnnnnnnnnnnnnnnnnnnnnnnnnnnnnnnnnccagaataacagaatgagagtccagtgttccaaatcaacttgttacacatcaatataaacccacagtgtcctggcaaacaacatgctttcattttctgtctcatcctagagctcgaatcctgattcatttcagcagagactccacaggcaacaggaaagattgtggcattaaaatattcatttatacttttgtggtagttcaaaacagtggtcttatttctgggcaagcttacagaccatacaaggtcagaagcataacttaaatgggagctaagactcnnnnnnnnnnnnnnnnnnnnnnnnnnnnnnnnnnnnnnnnnnnnnnnnnnnnnnnnnnnnnnnnnnnnncccctctgggaatagctagggcatttaaaggaaccataaaaatgccaacagtatttaaacccccttttttaaaaagggaannnnnnnnnggcttaaaatatttcactcaatgaattatgtcagctgtcaatgaaagaatgtcactaatacactgtggacaccttttgcaatgtaaatccatgcccccttattttacatgttgaacttcaacctagcaattattacaacaaatgttatagtctaaagctcaaacacattttagcaattttgaaattgaactgcgtacaaaccaaataaaatttacatcataacaaacatttccccctacc

SEQ ID NO: 69016 - DNA, 597 bp, Homo Sapiens
  misc_feature (488)..(544): n is a, c, g, or t
  misc_feature (586)..(586): n is a, c, g, or t
cccctcccatggcaaataatataataaccagtgaattttcaggaatttaaaaattagcttttttccacttaaaggagaaaaatatttgggactagcagcagaggcagtaagagatgtgaaccttggatgagctctgatacagtgagaagagattatactcatgaaagagaatgttagtgttacagagaagcagccgatagcaaatcgactgtagagacttggcggcggtggcattgccccaggtcgtcagcagtgtggtattatctatgagaacttgagcgacagagtatttcttgatgaatttatagatcatttgagatgttgagttactttagtttagtttcgtgtagttttttcaaataagtagagactattgtaaaaaacgagaaaggaaaatgaaatgtgcgtgttgatagcaataatttgtttcttttaaagattctaaaaggtctgagacctgtagcattaattatttgagtgccctcccnnnnnnnnnnnnnnnnnnnnnnnnnnnnnnnnnnnnnnnnnnnnnnnnnnnnnnnnncattcattgttttgcttttgggagtaggtgttgttcaagtanccggtgggttt

SEQ ID NO: 69017 - DNA, 1459 bp, Homo Sapiens
  misc_feature (99)..(178): n is a, c, g, or t
  misc_feature (1096)..(1116): n is a, c, g, or t
  misc_feature (1139)..(1277): n is a, c, g, or t
  misc_feature (1296)..(1375): n is a, c, g, or t
  misc_feature (1409)..(1410): n is a, c, g, or t
cgagaaaggaaaatgaaatgtgcgtgttgatagcaataatttgtttcttttaaagattctaaaaggtctgagacctgtagcattaattatttgagtgcnnnnnnnnnnnnnnnnnnnnnnnnnnnnnnnnnnnnnnnnnnnnnnnnnnnnnnnnnnnnnnnnnnnnnnnnnnnnnnnnggagtgggtgttgttcaagtatctgtggtttggttctggcattttgttcccaccatccccttcccccattaacttcccccctgcttgccatcctgcagtagtataaatcatgaataaaaaataattttgctgttgtagtatacattggagaaactggcaggttttatttccattattttatttccactatatctatgataagatgcaattataaggagagaagtgactgttttttattgataaggcaagattttcagaaaaatgagtaaaataattaatgaaacatatttagagcacttaatggtctctgttttcaatataattcttgatttcatttttctctggaatatattggccttctacagctattactgaattatagaaactggtttatttctggcagaaagctgcagtgccacctgagttccaaattttaccattctttgtaaacagttggatggattatgataaagaagatgctaccaatgaaatagaaaaccaacgagatgagaagactgtgatcctcatgtactcagaggcacttccctcctaagtcaaagaccatcctcactgactatgtgccaacgcctcgtttcaggcttgtgactcaacaaagggcttttccattgatagaagcagtttgggatttgtagttgcgacttcttcgatagttacctgcacgtccattgctggcaactgacttgtcattaaaacctggctctttggttaagggagctacgctgtggtttattcttaagttacgtggataaactaacctctaacagaaatatactttggttaattttgaaatgtgtcatttttaaacaatcttaaaagtaatacagaattgtgatttattaattttaaaacattcagaacttgttgaaagaaaaattatatctgaatcaagattcatgnnnnnnnnnnnnnnnnnnnnngatacagagtctcactctgtcannnnnnnnnnnnnnnnnnnnnnnnnnnnnnnnnnnnnnnnnnnnnnnnnnnnnnnnnnnnnnnnnnnnnnnnnnnnnnnnnnnnnnnnnnnnnnnnnnnnnnnnnnnnnnnnnnnnnnnnnnnnnnnnnnnnnnnnnnnttttagtaagagacagagnnnnnnnnnnnnnnnnnnnnnnnnnnnnnnnnnnnnnnnnnnnnnnnnnnnnnnnnnnnnnnnnnnnnnnnnnnnnnnnncaagttacaggggcgtgagccactgcacctgggnnctcatggtttttttaaataaattgccctttttataattttacccctttt

SEQ ID NO: 69018 - DNA, 971 bp, Homo Sapiens
  misc_feature (775)..(775): n is a, c, g, or t
gtgtgagccaccatgcctggcctctcaaaatattttaaggatcaaatatattattaactaaccagtttttggaaactgctcatcacttaaagaaatgtaaaatattatatgattaaggtctaacaagtttcaacaattagcaaattatatcatagatgatagttattccaatgagcaaagaggaaaaatttataatccaaatgctgacctaaaatatctgtgccaagccatctaaactcagctaaatagcactgcagtttcagtactaaaaccaccagggaagtaggaggaataaaatcaagcatggtttttagaaatagctgctgagtcttcagttatttaaggaagcaaaatattgggaaactgtgtaaagaaaacgtgtcagacttctcccatcagccagctaaggctttggatgtacttgaaagaatattatgcttacagacatgaaataggtttgattcaggactttgcagtattcctatagttgatttataacatctcctgctaagcaaagcccactgactaattagtcaccactacacaaggaaaaacagcattatttttagaggctgaattaatgttagttttctcattttctcatcttcattctctctgctgttgaagaaatgttcagtggccaactgattctgcttcttctcttgcaggtttcctatcctgggagcaggagagtgtgcctatttgaatgacaaaagggtgccagtagtgccaggcactacccacagagaggaagtggatttgttccaaatcagantatacatgtctagatgttacagcaaagccccaactaatctttagaagcatattggaactgataactccattttaaaatgagcaaagaatttatttcttataccaacaggtatatgaaaatatgctcaatatcactaataactgggaaaatacaaatcaaaatcatagtaaaatattacctgttttcatggtgctaa

SEQ ID NO: 69019 - DNA, 1039 bp, Homo Sapiens
  misc_feature (45)..(63): n is a, c, g, or t
  misc_feature (928)..(989): n is a, c, g, or t
ggggactggggcggttacacacttacacgttttagtcgttgggcnnnnnnnnnnnnnnnnnnngaatcattcttggggttgaaaacgtagagactgtggtttagatcactcatagaaactggaggcaaaatgcatgacagtaacaatgtggagaaagacattacaccatctgaattgcctgcaaacccagggtgtgtgcattcaaaagagcattctattaaagctaccctaatttgggcgcttatttttcttaaccatgtttctgacaatcatagtgtgtggaatggttgctgctttaagtgcaataagagctaactgccatcaagagccatcagtatgtcttcaagctgcatgcccagaaagctggattggttttcaaagaaagtgtttctatttttctgatgacaccaagaactggacatcaagtcagaggctttgtgactcacaagatgctgatcttgctcacgttgaaagcttccaagaactgaatttcctgttgagatataaaggcccatctgatcactggattgggctgagcagagaacaaggccaaccatggaaatggataaatggtactgaatggacaagacagtttcctatcctgggagcaggacagtgtgcctatttgaatgacaaaggtgccagtagtgccaggcactacacagaaaggaagtggacttgttccaaatcacatatacatgtcctagatgttaccccacaaccccccctaatctttagaaacataatgggaactggatactccatttttaaaatggacccaaaaatttatttcctaataccaccaggtatatgaaaaatatgctccactatccctaatcaccgggcccaactccccattcaaaattctaggaaaagctttctcctaatatcaacctctttcccccacaaacatttgcccgggccgtcnnnnnnnnnnnnnnnnnnnnnnnnnnnnnnnnnnnnnnnnnnnnnnnnnnnnnnnnnnnnnnattaagcgccaaccgcaccattggtcccaacaccgggtttccctaaagaa

SEQ ID NO: 69020 - DNA, 828 bp, Homo Sapiens
  misc_feature (747)..(747): n is a, c, g, or t
ggggaaagttggagcaagcaggaagtgaactgagggccaccctgggaggaagccgactaggcgaattcacttactgaccggcctgggctgctctgagacatggaggaagccagtgaaggtggaggaaatgatcgtgtgcggaacctgcaaagtgaggtggagggagttaagaatattatgacccagaatgtggagcggatcctggcccggggggaaaacttggaacatctccgcaacaagacagaggatctggaagccacatctgagcacttcaagacgacatcgcagaaggtggctcgaaaattctggtggaagaacgtgaagatgattgtccttatctgcgtgattgtttttatcatcatcctcttcattgtgctctttgccactggtgccttctcttaagtaacagggaacctctcccacctgcccttctcttcagggacaaccctccataaatgtgtgccaagagggtctcctttcctgtcttcctctacagagaatgctgctcggtcctcctacccctcttcccgaggccctgctgccatgttgtatgccccagaaggtaccttggtcccccggaaggagagaaaaaagagagatggactgtggctgcatttcttgggtccttagagtgggctggagagacctagagggcccagcatgtggctgggaaactgttggtggccagtgggtaataaagaccttttcagaatcccccggagcaacgaaccccgcccaataaatatnaccctgggtcgggccgccctcggcccctctgaaaaaacctttctcatgaaccattctcctttgggcggccgcggggccccc

SEQ ID NO: 69021 - DNA, 771 bp, Homo Sapiens
ttgctcttacttgctttttgtagaagagattgagaatggtactctaatcaaaaataaagttttgtagtgggaccagaaattacttacctgacatccacccccattccccctcatcctgctggggttgaaagttccagacctgctgtcgaggccttgtgtttgtcagacacccagtgtcctcctgcaaggacgcaactgtgagctgaggtgtgagcctaggagcccaggacccctgaccccggccgctgctgccagcctcagaaaggcacccaggtgtgcaggggagcacacagggcccggcagcccccaggaatcaaggatagggctaaggttttcaccttaactgtgaaggcaggaggaataggtgactgcttcctcccgcccttcacagaactgattctcacacactgtcccttcagtccagggggccggggctcaggagccatgacctggtgtctcctgcccaccctggtcccaggtaaatgtgaatggagacaggtatgagaggctgtcctcgtctttgattcccccccaaccccacctcgggcctcacgacggtgctacctaagaaagtcttccctcccaccccccgctagcctggtcagtggtcagcaaattggaagaggatccgatgggagtgtaaatgtgagacacaatgtcttgattatacctgtttgtggtttagctttgtatttaaataaggaaataaacttgaaaattatttgtcatcataaaaatgaaacaaattaaaatatttattgccaggcaaaa

SEQ ID NO: 69022 - DNA, 663 bp, Homo Sapiens
  misc_feature (230)..(260): n is a, c, g, or t
cgaggagaatctaagataatggttataaagatgttcactgaagtcaaaagaacaatgaaataacaaactaagaactttgacaaagagatagaaagtataaaatagtaccaaatagacatcaaagacgtgaaaaatactgtaactgaactaaaaaaattcaatggaggtattcaacagcagattcaatgaagcagaagaaaggatcgatgaaatcaaagacaggtcactgnnnnnnnnnnnnnnnnnnnnnnnnnnnnnnngaatgaaaaggatagtttaaagatagtttatgagacctgtgggacaccatcaagtggacaacaaatgcattattgatatgtcagaaaaagaagaaataaaatatattcaaagaaattatgtcagaaaacttcccaagccttatgtcagaaaacttcccaagcctggggaaggagatagaaagccaaatccaggaagcccaaagaacaccaaataagatgaacccgaaaagatccacaccaaagcaagttataatcaaattctaagttagagagagttgaaaacagcaagggaaaagtgaattgtcatatgtaagggaaccaccctaaggccagcagtggatttcacagcagaaaccttacagatcagaagagagtaggatgatacattcaaaaccctgaaagg

SEQ ID NO: 69023 - DNA, 814 bp, Homo Sapiens
  misc_feature (469)..(524): n is a, c, g, or t
ctcgtgagggcgatggaacctcactacctccaatctctgctcactaccactggatgatacaatgggaagatggccatctgcagaccaagaagcaagccctcaacagaactgaatctacttacaccatgatcttgaactttccagcctccaggattgtgagaaatacatgtttgttgtttagccatctagtctgtggttttctgttgaagcagtctgaattgactaaaacagtcacttggagtagttataaaccactttcctgttgaaagcagaacatgctgattcaactgttttgttcaatagcaatgatagattttgtttaagtcccctacactttcttatttctaaatgatcaagagtacacttcctggcagtgattaaggagtgtgtatctaacagaaaaaatatatataccctgtgaacccgaatatggaattcagattgtttctgccctcagtatcatacttannnnnnnnnnnnnnnnnnnnnnnnnnnnnnnnnnnnnnnnnnnnnnnnnnnnnnnnacctttaaaggtgggtttttgctgtgataaatgaatacggtactctgaaggagaaaaaagtttctcaaatgagcttaaactgcaagtgatttaaaaattagagaatataattcttaaagctattgaaagtttcaaccagaaaacctcaagtgaattttgtatgtaaatgaaatcttgaatgtaagttctgtgattctttaagcaaacaattagctgaaaacttggtattgttgtagtttatgtagtaagtgacttggcacccatcagaaaataaagggcattaaattgaa

SEQ ID NO: 69024 - DNA, 920 bp, Homo Sapiens
gtgttaactctgaaacatttaacagatttcatttaaactcatagggtcataaaactcaaactatcaaacaaaaatagcattgtgcacttaaccactttcaataatgaaccttcaagaggaaacatttagagactcccacacaatttgggagccaataggcaacacatatttaatattaagcaaagacagcattaaaaactaaaaatcctcaaatttcaagagaatacctgttcaagtctttgatatacatttgcacatgagaaaagaaatattttaatttaaaagagaccaagtctgagtgcttatcctttcttcaaatgtaatctcctgtccacccttcattttatgactgcatacgcctcactctacttcatctacactgaaccagtgttcgttcaacatgattggcttcactcgaagccctctagatcccatttcatatatcccatcgaccaccattattcccttacatgtttgcacagccttatactgagcattacattgtaaccaagcttgggaatttcaggtatccaaaggtaattatatacacaaacgcttctgttttattgcacagttcacaatatagctggtgattacacaaccaaccatgttaagatgaatatcgactatttagacaaatacatcgattttgtccccaaccacaaatgaaacaagaaagacacacatattcgccaccatatcaaggttgtgtttactctgtggtgcagtcctgagggctcataccactctcagtgtgttcaatacggaatccataacatttctggtggcatcacacatgaagtataggacacaagaccataagtgtcctgcgctcatgagccatttgtgccacagacgtaacagaaaggccacttttaaagcttttcagatattcaatcacatttgccttttcaattttt

SEQ ID NO: 69025 - DNA, 738 bp, Homo Sapiens
  misc_feature (96)..(106): n is a, c, g, or t
ctccacagtgtccaaggagcagtcctcagtggggcaggtgtggccctacccctaagctagaatgtggttgtcagaaccctgaaagtattagttctnnnnnnnnnnngatatatactagaagtaattgttttatcaattcattgtataataaacaggagtgagacttcattgtatgacttcagttaaaatactattttgtatgcattctttattcacttaagaagcttgtctgcaataataaagccacgtcatgtcttcttttgggagggagagagtcgatggcaggagggggttttgggtgggccactgaaaaggggtaccgaataggttgtgtgatgaaattctgtgtcttggaactggaattgagtttcgatgttgatgaactgattcaaccaggtgttgaaggcacgacagccactgctctacgaaaaggcagagtacgtttttcccttctggttgtaacctggttgagagcttcccctttatcagattggcagctaaacagttgtattagataatccttaaatctgacatccagcctgttacgctctagggctcgctgcttggcctgcgtttgctttttattgtgtatccgttcccctcctacggtgtgctcctgaatgaaggtttctatgtaagcagatgatgattttacctgtcaataccagcactgtattactaacatgcaaaatactgcagatttattttgaaaattaaagttaactggtcacaaatgtt

SEQ ID NO: 69026 - DNA, 873 bp, Homo Sapiens
  misc_feature (805)..(820): n is a, c, g, or t
tcaatagacagagattactttcaggaaattggaacatatgatgctggaatggatatttggggaggagaaaacctagaaatttcctttaggatttggcagtgtggaggaactttggaaattgttacatgctcacatgttggacatgtgtttcggaaagctacaccttacacgtttccaggaggcacagggcagattatcaataaaaataacagacgacttgcagaagtgtggatggatgaattcaagaatttcttctatataatttctccaggtgttacaaaggtagattatggagatatatcgtcaagagttggtctaagacacaaactacaatgcaaacctttttcctggtacctagagaatatatatcctgattctcaaattccacgtcactatttctcattgggagagatacgaaatgtggaaacgaatcagtgtctagataacatggctagaaaagagaatgaaaaagttggaatttttaattgccatggtatggggggtaatcaggttttctcttatactgccaacaaagaaattagaacagatgacctttgcttggatgtttccaaacttaatggcccagttacaatgctcaaatgccaccacctaaaaggcaaccaactctgggagtatgacccagtgaaattaaccctgcagcatgtgaacagtaatcagtgcctggataaagccacagaagaggatagccaggtgcccagcattagagactgcaatggaagtcggtcccagcagtggcttcttcgaaacgtcaccctgccagaaatattctgagaccaaatttacnnnnnnnnnnnnnnnntaaggattgactgggctacctcagcatacatttctgcctcattcttaagtagc

SEQ ID NO: 69027 - DNA, 409 bp, Homo Sapiens
  misc_feature (135)..(150): n is a, c, g, or t
gtaatcagtgcctggataaagccacagaagaggatagccaggtgcccagcattagagactgcaatggaagtcggtcccagcagtggcttcttcgaaacgtcaccctgccagaaatattctgagaccaaatttacnnnnnnnnnnnnnnnntaaggattgactgggctacctcagcatacatttctgccacattcttaagtagcaaaaaaggaaaagtgctttcctcctctgcaggatgtaaggtttatcagccattaaaacttagacttctctagcttttcactagctgtgaaccagccttcctgtccatggacgtgaaactgcatagtaatgagactgtgcacactgatgtttacaagattgaaagagtctttctccgaaaatcatggtaaagaatactgagacaatg

SEQ ID NO: 69028 - DNA, 801 bp, Homo Sapiens
aagatggtgaaaaggaagaatccaaaaaggaggaaactccaggaactcctaaaaagaaggaaactaagaaaaaattcaaacttgagccacatgatgatcaggtttttctggatggaaatgaggtgtatgtatggatctatgacccagttcactttaaaacatttgtcatgggattaattcttgtgattgcagtaatagcggccaccctcttccccctttggccagcagaaatgagagtaggtgtttattacctcagtgtgggtgcaggctgttttgtagccagtattcttctccttgctgttgctcgatgcattctatttctcatcatttggctcataactggaggaaggcaccacttttggttcttgccaaatctgactgctgatgtgggcttcattgactccttcaggcctctgtacacacatgaatacaaaggaccaaaagcagacttaaagaaagatgagaagtctgaaaccaaaaagcaacagaagtccgacagtgaggaaaagtcagacagtgagaaaaaggaagatgaggaggggaaagtaggaccaggaaatcatggaacagaaggctcggggggagaacggcattcagacacggacagtgacaggagggaagatgatcgatcccagcacagtagtggaaatggaaatgattttgaaatgataacaaaagaggaagctttatttacaaccagggagtctgtggttgactactgcaacaggcttttaaagaagcagttttttcaccgagccctaaaagtaatgaaaatgaaatatgataaagacataaagaaag

SEQ ID NO: 69029 - DNA, 2284 bp, Homo Sapiens
  misc_feature (79)..(113): n is a, c, g, or t
  misc_feature (1011)..(1019): n is a, c, g, or t
  misc_feature (1444)..(1453): n is a, c, g, or t
aatgatcactcctatagggcgctagctctcgcagccgaacgacgagcgcagcgagttcagtgagcgaggaagcggcggnnnnnnnnnnnnnnnnnnnnnnnnnnnnnnnnnnncagtcgacggtaccggacatatgcccgggaattcggccattacggccggggagcatcttgctttgtggttgaaataggtagtgtatgtcagtctttgctttaggctgtttctcatctaagtgtttgaattaaagatgttaaatttttctaattgtgaaaaatatgttttctgtatcgacacattttattaaacttggcttgattgcttctttatagtagtccctgtaagtggacataaatgtggctatttgatgttaatgcaactatgtcaaggctgcaatcactttaatagtttctttttagcaaataaatgttcattgatgaagtgcctgggtattttcccgtcccatttgcagagctctactacttcatttccacagtaagcatatatataatgatcacttctgagtttatcaccagtaacattgatacctattttggggtataaacatggtgtttttcagaaataaaaattatttcattaacctttactattactgtgataatacccaggcactcaatattcatcctgaaatttttctataatatatgtaatttgtctagtcttaaagacattttggagcatggccaacaggaaggtcagcttcttactgatgtgtgtggattcttacagaatgtcagtacaaactttcttataaactatctggtgatccctgggggcaaatatcattcttactatggttagaaagtgaattagaaatttcagctcagtttctattttactattcaagttgtgtactttaaacaaatataaaaatcaaaaggctgcctctattacaatcctcagtggaatagatggctatctttcttggctaacattaaatattcttgtaccagagcatggaaaatcgtttataattgttaatagaatggcgannnnnnnnnaagaacttcagatttgctatgctgctgtaagtagaaagcatgaagctttttgatcatgtagggcttattgtagagggtatcaattggcctaactaagcaggattgaatttaccagaggctaagttcagatagtaagaataatgcatatgtgattgttcttaaagtcaatgtattaaataaggtatttttccttttccctcttactggatttttcaattttcaaaccatatggcctaggtaactttaattgaaataatatagatttagttgaatactattcaggaagtaataaattttaatatatcacattgaaattatgcagtggtgatgaattttggtgtttcccccctctttctggttttacatcatgaggatcagttagctgctgacaagaaaagtcatcttgtgtcttttgtaaattgaannnnnnnnnnaaatctattaggaactggaaaacagcaagtatggttgattctcattattcaaggtagttacgttctataaagtcactgcgaacactgaattagcaaatatagaacctaggggaaatacaaggctagatttctgcaagccactggtcacattttcatcaagcagtcaacatgtaaatttctgttgtaaagacaccttatttaatataatcgattcattaacattgaagtcatgaccaacaacactgtaactcatgcctgaatgaagcttatctgacacataagcttcataaggcacacaacagcctttttacccttaggaacagctttttgcccttagcactatgcttgggggccattttaaacagtgaaatcaaaaaaagaacagaaatgcaaaaaccatggcattagcgtaaaaaggacacgtttatagtatgaaagctggaacatggccttgttcaacctcagctcagaatatgtgtacagcaagttttttgctgtaccacaaaattttaggttaggcaaattcacaaatacggaatccatgaataacgaggatcaactgtacttaactatattttaaagctgtgacatttatctacctggtttatggaatagaatttattgctgaatcatgctccagtatttgagtgatgttttaaatatcctatgtctgaaaataattcctcctaattgtgtggtaatttgcttttactgtttccgcagtatttcaggtctttgctcattcactcagtaatactgagcacttaccatgtaccagaattttactaggcacaaccatgaataaaaatacaattctcttgcaccattaaa

SEQ ID NO: 69030 - DNA, 1117 bp, Homo Sapiens
  misc_feature (752)..(752): n is a, c, g, or t
cagtcgacggtaccggacatatgcccgggaattcggccattacggccggggagggaaccgggcggagcggccaacatggcggaacgcaggagacacaagaagcggatccaggaagttggtgaaccatctaaagaagagaaggctgtggccaagtatcttcgattcaactgtccaacaaagtccaccaatatgatgggtcaccgggttgattattttattgcttcaaaagcagtggactgtcttttggattcaaagtgggcaaaggccaagaaaggagaggaagctttatttacaaccagggagtctgtggttgactactgcaacaggcttttaaagaagcagttttttcaccgagccctaaaagtaatgaaaatgaaatatgataaagacatcccgcaccaaaaagattcaggaaacgcctgaaagtgaaaccactatcccggtccgacgcgcattttttgcttggtcggggcccgccttcgggcccttggagccaagtccgtctctaagaaccccttcccgttctcgggcgcccgttgcgtccccccctttcatggtttaatggttgcacccccgtcggctccccttaaagcgcttgtgtctcccctttacgggcagagaatccgtttttgggagtttcagctcgaaccctaatacagggagcgccttggggcgaatctctccttctgcccccctggtcttttttctacgcagaagatgccgctccccgccggcaatgatggctcaaaaanccttattaatccacgcgactcctcagcaaaacacacaaaactcttcccagtgaatgcgggaacaagcttatccttggacacgagccttaatatctttcccgcggtgacctgcttccgcgcctaaatgttcggcgcgctcttctccaaaacacccgaggacttcttcgccccatatcgcagtatgtatacgttgcccccgcgaccgcctgtgtccactctttaactcccagtgagtctactgggtcgcgccaaaactccaacttatagcggcgatctcttgtggtcccccacatgtgagaaagcgcgcgtgctgctaacagggtgccacgtttattactcccccccgcatatttgaccgatccgtg

SEQ ID NO: 69031 - DNA, 2061 bp, Homo Sapiens
ggtagccagtattcttctccttgctgttgctcgatgcattctatttctcatcatttggctcataactggaggaaggcaccacttttggttcttgccaaatctgactgctgatgtgggcttcattgactccttcaggcctctgtacacacatgaatacaaaggaccaaaagcagacttaaagaaagatgagaagtctgaaaccaaaaagcaacagaagtccgacagtgaggaaaagtcagacagtgagaaaaaggaagatgaggaggggaaagtaggaccaggaaatcatggaacagaaggctcggggggagaacggcattcagacacggacagtgacaggagggaagatgatcgatcccagcacagtagtggaaatggaaatgattttgaaatgataacaaaagaggaactggaacagcaaacagatggggattgtgaagaggatgaggaagaggaaaatgatggagaaacacctaaatcttcacatgaaaaatcataatctgactaattttgggactgaatgaataagtacaagaggttggattttctatgttggctgattaccatattgaacacatggcatttgtagcattctttaaatctatctactgaaatgtatttgacattcaagcagttatattcggtccttcattttatagaatattggcactattattggtacagtttaaagccattaatatgttttatccatttgataattttacagtaagtaggtctcattcattttgacagttatcaaagatgtactttccacagttaaatttacattaatggcaatttttgatagttttatggctttttactgttagactaatcaaaaataactttaaaaggaacaaagaaactccaacatttcacattatgcatagttatgtagccatttcacagtttctttaagatgtgtaaactcattgtccttgatagtttttatttttcattataaaattataccaggagatttcttttaagattctgagttagcagagttcaaaactattttgtggaaacaagccaactagtaacaatgcagcaacacttctggtttagctaaattatttttccaatgtaggaaatccacactgatttgtacgtctgactgagagaaagatggtcgtctccagcagagaaagtgaacagcatttgttggaaggtgatggctctccctcctccctccccatttcattggcgtaacgtaaagtgtattctgtacataatttacaaataaaacattttattttaattgttacttattatttagatatttctcaacacttaaattcataaaattaagaccatgtaagggtatgtttttagagaaatggaagtttgagtaacccacagaacatctgtgatctttctacagcagcttcagttttgtgccaacattccatgtattttgaatatgagcaaaaactgatcttaagagcagacttaaagtagctttgtacgccttaatgttcattttgatttattttaaatctttacattcagaaatgagatactgtattatcagaccaggaggcattgctgtgaaagataatttcctattctaaaatatcaaatttaaaataaagataatgaaagaaaacataagagaactattggactctaattgctttgaactagttttgcagtttgactttacgtcttatacatcttagttacaagtctttggaaactcttgtttacttatgagcataatcattccttggagttatactaactaataatgaatattaaatgatttttcttcagtcacagtgagagcatcttgctttgtggttgaaataggtagtgtatgtcagtctttgctttaggctgtttctcatctaagtgtttgaattaaagatgttaaatttttctaattgtgaaaaatatgttttctgtatcgacacattttattaaacttggcttgattgcttctttatagtagtccccgtaagtggacataaatgtggctatttgatgttaatgcaactatgtcaaggctgcaatcactttaatagtttctttttagcaaataaatgttcattgatgaag

SEQ ID NO: 69032 - DNA, 986 bp, Homo Sapiens
gtattgaatccgcattggtgctgagaatccttttgccagctaattgtgagagtttacacaagtctctgatttcagaagagactgttaaaaccaaaacaatgatgggcagctcttttaagtgtaggtgtgaaggtcccattttcaatggaatttccaactgttatcactgggattgactttactttttaaacacataatgtgtactgtgtggcattgtaatttagatataacacacttaagttttgctttttaaatctctctgtggagaaaggttgttgttaatcctttccagaatgatctattctgagctttcctggagttaggcccttctagggagagaatttttttattgtcatcaggaaacgaaacctttgtgctctgcagcctttttcttctgaaaggctaagtggggctaaaattatccttttagttttctgctttaacaagaagagaaggacttggtgtgaaagaatttcttctctcagtccaatggtataatttttagcactccgcttcctctgtagggtttagccctacagtttgaacaattattttaatccagctaagatgtggccaacactgtgaaatacaggagatgttaaggttttgctgacttttagattaaaatcttaaaatttcacattatattttaattacttgaaaagtttaattacctagtaaagattgtttctaatagatgagaacataaatttaatagttttcatccttttttaaagtgtgtgcaacaattaatatgcctgccttatttgaggacatgataaaatgtacccaaaatgacttcgaactgtttaatgcctcagaaaagtaacttaaaatcaaccacttcgtgcttaaatgtttttatattatgaaccgatttcaacaagttttaaagctgttaatatctcattgctgtgtttgacgtacaagtacattcattggttctatagtcttaatgatgacaaattaaagatgttttttccgtg

SEQ ID NO: 69033 - DNA, 1323 bp, Homo Sapiens
  misc_feature (173)..(235): n is a, c, g, or t
  misc_feature (1218)..(1249): n is a, c, g, or t
cagtcgacggtaccggacatatgcccgggaattcggccattacggccgggcaacatttcgggtttggctgtttggtaccagccattggcgataatggccggccattatcagttcttcctgcggttcgggttttggcagtaacatatatattttaaacacacttatttttgttnnnnnnnnnnnnnnnnnnnnnnnnnnnnnnnnnnnnnnnnnnnnnnnnnnnnnnnnnnnnnnnggtgtgggtggatggggggagatgctaaaatattgctgctaggatccagaaataccacactgtttcatatattggaacttgttattggctagccttatgccagcctgccactgtcaatatattctgttccccttggttacaagcttaatatactctgtgtggtttttggcgaaatgagctttttatcctattgtaatattttcaattgataatagatgtcattaaatctactgcttgtatagagacaggtgtacccaaatttactcttgacctttttataaagccaggtaatggagtctgttcctttgcatctcaggaaggaattgactttgctttatgtatcagacctcatcaattgcaccctctccatcatgccttattttcctaagttctccttaaagaaactcaacccacaaaacatttatggagagacatgttgctatctaatcctgttgcaaatatttcagatcttttgttttgccatacatctgggaaaatgtaaagcttctgaatctgtttcctcacttagatttattacaatatgaattacaactttttttaaaaaattaaggaccttgtaaacgcttctattgcttatttacctaatccaagctccttatccaaaatgctaaggacagttagtattttgctgttttcggccccatcttcagccttcttgtcccaagtttcttctcacctttttaccaccacctgactaggatgacttctcctttccctaccagtctttgttctttactatgaaaatctggcttagaactcttcaaggaatattccttgattctctaactctgcctgactattctctcttaagcctttgttcttttagcacttatgtactcagtttgtattatatcagtttgcacttgttattgtgttgctctgtaaaagtgttcaattatttcatgtatatgtattccttctcttgtactagattgtaagctccttgagagcagggaccatgnnnnnnnnnnnnnnnnnnnnnnnnnnnnnnnngtattccccagacagtgcccagtacagtgctctctttgcacatagtaggtgctcaataaatgttgttgactgac

SEQ ID NO: 69034 - DNA, 1194 bp, Homo Sapiens
ggggacaattcagatactagttctagtgtggatggaaggagaaaacataagcaaccagctctcactgcagattttgtgaattattattttgagagaaatatgcgcatgattcaaattcaggaaaatatggctgaacaaaagaatataaaagataaattagagaatgaacaagaaaagcttcatgtagaatataataagctatgtgaatctttagaagaactacaaaacctgaatggaaaacttcgaagtgaaggacaaggaatatgggctttactaggcagaatcacagggcagaagttgaatataccggcaattttgcgagcacccaaggagagaaaaccaagtaaaaaagaaggaggcacacaaaagacatctactcttcctgcagtactttatagttgtgggatttgtaagaagaaccatgatcagcatcttcttttattgtgtgatacctgtaaactacattaccatcttggatgtctggatcctcctcttacaaggatgccaagaaagaccaaaaacagttattggcagtgctcggaatgtgaccaggcagggagcagtgacatggaagcagatatggccatggaaaccctaccagatggaaccaaacgatcaaggaggcagattaaggaaccagtgaaatttgttccacaggatgtgccaccagaacccaagaagattccgataagaaacacgagaaccagaggacgaaaacgaagcttcgttcctgaggaagaaaaacatgaggaaagagttcctagagagagaagacaaagacagtctgtgttgcaaaagaagcccaaggctgaagatttaagaactgaatgtgcaacttgcaagggaactggagacaatgaaaatcttgtcaggtgtgatgaatgcagactctgctaccattttggctgtttggatcctcctttgaaaaagtctcctaaacagacaggctacggatggatatgtcaggaatgtgattcttcatcttccaaggaagatgaaaatgaagctgaaagaaaaaatatatctcaggagctcaacatggaacagaaaaatccaaagaaataaaagattttctgtagtgtttttgaaaagtttgcagcttatgtaatagcagataaaatttctaattgtaaaatgttaaattgtaaaatctaatttgcaaaatgttctcaataaagtcattcaaaatgaaaa

SEQ ID NO: 69035 - DNA, 1284 bp, Homo Sapiens
gttctgtgttgatgtacagtttctcctaagaagaagcgaggtggttgaattttggaagcacttcttgaatcggattaacccatgctcttattgaattttttcatctgctctgtttagtttgatattaaagcaaaattaagaggtcttagtttttcctatagaacttttaatatgtcaaaagctatattgtctaaatttcagtacttaagcaaatactgagtagtgttttaaattcagaaatagagcttctattatgaacacatgagaatgatttttttctcttaatcattattaaggaaatattttaatttcatggtcatataatggtgataagtaatacctgattgtttccttttctgttctagtaactcagaggagatacgtgttttatttgtgatagcaaattcctaaatgaacattaggcaagtggtatcattatcaggccagctgcagcctcttgccttgacctgcattcctagaatttctttgttgctgtaattcttgattaagtgaccttgactttcattttgtaattttgctaatcatcagcaaattcacttgcatgacgttactgccaaatatgaaggcagttgaattattatgagtgattgtggcagaggtttgtgccatggtgaaaactttgatgtttgtctgtgttcattggatccatctttttaaatgacattaccatgagtctgttgtcaaacctaaatatctttgtttgaatttaaaatgggactctatattgttgtagttcaggtcttcattgactaagagattgagagaaatctgacataagaaaatattgttttcactgcaggaataaagaggaagtaacagtgaatccaatatagttcatattgttattgtccaatcatcaagttaactaagcattatcagattacgtttatttctcatacatatggatattaacttaaggtaaaaaagctggatgtgaaggatctgaaaaggcattaatttatgtactaattctataaacatgtattaataattgcagtattattaaatacagatggactcaatgtacctttgaaaagaccactaatttagaaaacaaagctaagtgcagtcattacaagaagcaaagaaatacttaagttagaaaaaaattaaaatgaagggatggtctaagttttcttcatgctggaacaaatgttaaagaagcagtgattgcttacaatgtatgtgataaaataatacctttcacaatcaaaattttaatagtaaatataagataaaatttatattaaataatgaaaacgt

SEQ ID NO: 69036 - DNA, 1310 bp, Homo Sapiens
  misc_feature (69)..(298): n is a, c, g, or t
ttccagggagtaggtgaattactataaaccattagccacttgtctctgcaccatttatcacaccaggannnnnnnnnnnnnnnnnnnnnnnnnnnnnnnnnnnnnnnnnnnnnnnnnnnnnnnnnnnnnnnnnnnnnnnnnnnnnnnnnnnnnnnnnnnnnnnnnnnnnnnnnnnnnnnnnnnnnnnnnnnnnnnnnnnnnnnnnnnnnnnnnnnnnnnnnnnnnnnnnnnnnnnnnnnnnnnnnnnnnnnnnnnnnnnnnnnnnnnnnnnnnnnnnnnnnnnnnnnnnnnnnnnnnnttctcaagcacttttaagcaaaggtgagtattcatacaagaaatttagggggaaaaaacattgtttaaataaaagctatgtgttcctattcaacaatatttttgctttaaaagtaagtagagggcataaaagatgtcatattcaaatttccatttcataaatggtgtacagacaaggtctatagaatgtggtaaaaacttgactgcaacacaaggcttataaaatagtaagatagtaaaatagcttatgaagaaactacagagatttaaaattgtgcatgactcatttcagcagcaaaataagaactcctaactgaacagaaatttttctacctagcaatgttattcttgtaaaatagttacctattaaaactgtgaagagtaaagaaaactaaagccaatttattatagtcacacaagtgattatactaaaaattattataaaggttataattttataatgtatttacctgtcctgatatatagctataacccaatatatgaaaatctcaaaaattaagacatcatcatacagaaggcaggattccttaaactgagatccctgatccatctttaatatttcaatttgcacacataaaacaatttataaacaactttgtaggactatgcccttttgtgtacattcaggcatacccattttaatcaatttgaaaggttaatttaaacctctagaggtgaatgagaaacatgggggaaaagtatgaaataggtgaaaatcttaactatttctttgaactctaaagactgaaactgtagccattatgtaaataaagtttcatatgtacctgtttattttggcagattaagtcaaaatatgaatgtatatattgcataactatgttagaattgtatatattttaaagaaattgtcttggatattttcctttatacataatagataagtcttttttcaaatgtggtgtttcatgtttttgattaaatgtgttttgcctctttccacaaaaactgtaaaaataaatgcatgtttgtac

SEQ ID NO: 69037 - DNA, 990 bp, Homo Sapiens
  misc_feature (81)..(115): n is a, c, g, or t
tggtatacactcactatagggcctcagcttgcgcagacgaacgacgagcgcagcgaagtcagtgagcgaggaagcggccgnnnnnnnnnnnnnnnnnnnnnnnnnnnnnnnnnnncagtcgacggtaccggacatatgcccgggaattcggccattacggccggggtatatgtaaatactagcttttcaatgtgctatacaaacaattatagcacatccttccttttactctgtctcacctcctttaggtgagtacttccttaaataagtgctaaacatacatatacggaacttgaaagctttggttagccttgccttaggtaatcagcctagtttacactgtttccagggagtagttgaattactataaaccattagccacttgtctctgcaccatttatcacaccaggacagggtctctcaacctgggcgctactgtcatttggggccaggtgattcttccttgcaggggctgtcctgtaccttgtaggacagcagccctgtcctagaaggtatgtttagcagcattcctggcctctagctacccgatgccagagcatgctccccccgcagtcatgacaatcaaaaaatgtctccagacattgtcaaatgcctcctggggggcagtatttctcaagcacttttaagcaaaggtaagtattcatacaagaaatttagggggaaaaaacattgtttaaataaaagctatgtgttcctattcaacaatattttgctttaaaagtaagtagagggcataaaagatgtcatattcaaatttccatttccatcaactggtggtacagaccaggtctatcagaatgtgcgtaaaaaacttgactgcaacacaagcttattaacatcagtacgatagtaaaaaagtcttattaagaaacttccgagatttccacatggtgcttgactcctttcagcagcaaataaaaatcctaaatgaacgaatttctaccaccaagtttcctgttcacagttcca

SEQ ID NO: 69038 - DNA, 536 bp, Homo Sapiens
cagctagggccacgcggccccacattgcacttgtggggggtgaccgacttcgtacacgggtttaaagtttatttttatggtttagtcattgcagagttcttattttggggggagggaaagggggctagtccccttcttttggccctccgcccccgcaggcttctgtgtgctgctaactgtatttattgtgatgccttggtcagggcccctctacccacttctcccagtcagttgtggccccagcccctctccctgtgctgtgtggagtggacaccctgacccccgaagcggggagggccgctgtggccttcgtcacagccgcgcagtgcccatggaggcgctgctgccaccttcctctcccaagttctttctccatccctctcctcttcccgccgcgccgctagcccgcctcggtgtctatgcaaggccgcttcgccattgcggtattctttgcggtattcttgtccccgtcccccagaaggctcgcctctccccgtggaccctgttaatcccaataaaattctgagcaagttcgg

SEQ ID NO: 69039 - DNA, 804 bp, Homo Sapiens
  misc_feature (12)..(12): n is a, c, g, or t
  misc_feature (196)..(196): n is a, c, g, or t
  misc_feature (201)..(201): n is a, c, g, or t
gtgaataatgtntcgtatactgacatctttaagtgactcaactgtggatactgtatgactcactggctccctgaaagggcttctgagaattcatgatattgctgcacttaattttctgatctaggcctgaagaaagaaaatctttcaagagtcaccaacctcaagcctggttttggcaattatatcctgcgttgtntgtcncccaccaccccaccccccacccgctaaaatacttctgttttaagacacattgatattgaacctgaaatctttatgtacatcagagcaggttatgaccaagaacccctaatgttaagtcaaaagacagaagaggaatcaggtcaaactgagaatacataagacaccagcagcagaagataggtagaagttgacttcatgtccttgccttcttttgaaacagaagaatgagtacacctagacaggagggaggtgtcccaggcttggtttattctgcctcttctcctccaccctgtggagaaatgcagtgctccctggttctcaggcagggtgaagcagtttagccccggctccctgttaagcaagttcagatgctgggtcagtgtgggggtgagcccatcgacaattcaggggcttatccttcatccagatcctaactcgggattctttgatctgggatgaagacagaaagagagaaaagcttcccagtttactcattttggtatttgttggccctgcatgggggagctgagcccatgatactattcagtacattccccctaagattctcccccactcagaacaaattttaaaaacccacataaa

SEQ ID NO: 69040 - DNA, 2576 bp, Homo Sapiens
  misc_feature (994)..(994): n is a, c, g, or t
  misc_feature (2392)..(2405): n is a, c, g, or t
ccggaatttcagagatatcgtcgacccacgcgtccgttccgtcctcggagcaggcggagtaaagggacttgagcgagccagttgccggattattctatttcccctccctctctcccgccccgtatctcttttcacccttctcccaccctcgctcgcgtagccatggcggagccgtcggcggccactcagtcccattccatctcctcgtcgtccttcggagccgagccgtccgcgcccggcggcggcgggagcccaggagcctgccccgccctggggacgaagagctgcagctcctcctgtgcggtgcacgatctgattttctggagagatgtgaagaagactgggtttgtctttggcaccacgctgatcatgctgctttccctggcagctttcagtgtcatcagtgtggtttcttacctcatcctggctcttctctctgtcaccatcagcttcaggatctacaagtccgtcatccaagctgtacagaagtcagaagaaggccatccattcaaagcctacctggacgtagacattactctgtcctcagaagctttccataattacatgaatgctgccatggtgcacatcaacagggccctgaaactcattattcgtctctttctggtagaagatctggttgactccttgaagctggctgtcttcatgtggctgatgacctatgttggtgctgtttttaacggaatcacccttctaattcttgctgaactgctcattttcagtgtcccgattgtctatgagaagtacaagacccagattgatcactatgttggcatcgcccgagatcagaccaagtcaattgttgaaaagatccaagcaaaactccctggaatcgccaaaaaaaaggcagaataagtacatggaaaccagaaatgcaacagttactaaaacaccatttaatagttataacgtcgttacttgtactatgaaggaaaatactcagtgtcagcttgagcctgcattccaagcttttttntaaatttggtgttttctcccatcctttccctttaaccctcagtatcaagcacaaaaattgatggactgataaaagaactatcttagaactcagaagaagaaagaatcaaattcataggataagtcaataccttaatggtggtagagcctttacctgtagcttgaaaggggaaagattggaggtaagagagaaaatgaaagaacacctctgggtccttctgtccagttttcagcactagtcttactcagctatccattatagttttgcccttaagaagtcatgattaacttatgaaaaaattatttggggacaggagtgtgataccttccttggttttattttgcagccctcaaatcctatcttcctgccccacaatgtgagcagctacccctgatactccttttctttaatgatttaactatcaacttgataaataacttataggtgatagtgataattcctgattccaagaatgccatctgataaaaaagaatagaaatggaaagtgggactgagagggagtcagcaggcatgctgcggtggcggtcactccctctgccactatccccagggaaggaaaggctccgccatttgggaaagtggtttctacgtcactggacaccggttctgagcattagtttgagaactcgttcccgaatgtgctttcctccctctcccctgcccacctcaagtttaataaataaggttgtacttttcttactataaaataaatgtctgtaactgctgtgcactgctgtaaacttgttagagaaaaaaataacctgcatgtgggctcctcagttattgagtttttgtgatcctatctcagtctgggggggaacattctcaagaggtgaaatacagaaagcctttttttcttgatcttttcccgagattcaaatctccgattcccatttgggggcaagtttttttcttcaccttcaatatgagaattcagcgaacttgaaagaaaaatcatctgtgagttccttcaggttctcactcatagtcatgatccttcagagggaatatgcactggcgagtttaaagtaagggctatgatatttgatggtcccaaagtacggcagctgcaaaaagtagtggaaggaaattgtctacgtgtcttggaaaaattagttaggaatttggatgggtaaaaggtacccttgccttactccatcttattttcttagccccctttgagtgttttaactggtttcatgtcctagtaggaagtgcattctccatcctcatcctctgccctcccaggaagtcagtgattgtctttttgggcttcccctccaaaggaccttctgcagtggaagtgccacatccagttcttttcttttgttgctgctgtgtttagataattgaagagatctttgtgccacacaggannnnnnnnnnnnnnaagaaaaacctatagatgaaaaattactaatgaaactgtgtgtacgtgtctgtgcgtgcaacataaaaatacagtagcacctaaggagcttgaatcttggttcctgtaaaatttcaaattgatgtggtattaataccaacatcacccaagcgtgattacaaaaactttgtc

SEQ ID NO: 69041 - DNA, 1077 bp, Homo Sapiens
  misc_feature (534)..(618): n is a, c, g, or t
  misc_feature (630)..(693): n is a, c, g, or t
gtctatccagggggcctttaatagctgagaagtgctgctctttcagatgggggtgccaagcaggccggtgaccccaacctccaccccctgcccctgagaagagactgggctgggccagagaccaatccacgggggaaaggccaccagcacccatcaggcttcccactggcaccctgaaacctgcccaggctgggccgccagcgtcgtccacaggccttggccagcgggggccctcagggaagcaacccagctcgcatctggaaggccaggcagtcccctcgggtggcttgcttgttgatctctctgtgtcgttctttggttacgatttcctctaggacctcgccatctcccttaataagccttgcggatgatgctctgccgggcatcccactcctccttggtcatgggcttcatggcctggattcgcgacttctgctcatccgtcaggactggcccatcctcttcctccccagctgatcggtgccactggtccagcgaggggcccggcagagcctccacctgctgtgcttccgnnnnnnnnnnnnnnnnnnnnnnnnnnnnnnnnnnnnnnnnnnnnnnnnnnnnnnnnnnnnnnnnnnnnnnnnnnnnnnnnnnnnngccatcactggnnnnnnnnnnnnnnnnnnnnnnnnnnnnnnnnnnnnnnnnnnnnnnnnnnnnnnnnnnnnnnnngctggatcttgttctcctccgggccttctgcttgcttctctcttgggatgtggaggccgagcagttcctcgaggtgtctttcctgctcttcttctttctcttttccgacccccgtccccgggaccggctgcgactcctcgagcgcttgcgggagccgacgtgagccatggcgccgcgggctcgaccgccctgcaggccggacagcccgccccgcgccttctcgagaggaagcggcggcgaggaggcttccggccggggcgctgcgcgggaggctggccggctgggaagcgcggcgccgctgcctttcgttctgacgccccaggttccgtcccgggcgcgcccacctcccgcagaggcaagcaggggcgccggccctcgagctcc

SEQ ID NO: 69042 - DNA, 1238 bp, Homo Sapiens
  misc_feature (257)..(328): n is a, c, g, or t
  misc_feature (358)..(410): n is a, c, g, or t
  misc_feature (987)..(989): n is a, c, g, or t
  misc_feature (991)..(991): n is a, c, g, or t
  misc_feature (1046)..(1102): n is a, c, g, or t
  misc_feature (1126)..(1167): n is a, c, g, or t
gatgaggccggctgttaatcggcacgaggccggcccgcagggcggtcgagcccgcggcgccatggctcacgtcggctcccgcaagcgctcgaggagtcgcagccggtcccggggacgggggtcggaaaagagaaagaagaagagcaggaaagacacctcgaggaactgctcggcctccacatcccaaggtcgcaaggccagcacggcccctggggcggaggagagaagcaagcagaaggcccggaggagaacaagannnnnnnnnnnnnnnnnnnnnnnnnnnnnnnnnnnnnnnnnnnnnnnnnnnnnnnnnnnnnnnnnnnnnnnnagtgatggccggaagaagcgggggaagtannnnnnnnnnnnnnnnnnnnnnnnnnnnnnnnnnnnnnnnnnnnnnnnnnnnngcaaggagaaggcggaagcacagcaggtggaggctctgccgggcccctcgctggaccagtggcaccgatcagctggggaggaagaggatggcccagtcctgacggatgagcagaagtcccgaatccaggccatgaagcccatgaccaaggaggagtgggatgcccggcagagcatcatccgcaaggtggtggaccctgagacggggcgcaccaggcttattaagggagatggcgaggtcctagaggaaatcgtaaccaaagaacgacacagagagatcaacaagcaagccacccgaggggactgcctggccttccagatgcgagctgggttgcttccctgagggcccccgctggccaaggcctgtggacgacgctggcggcccagcctgggcaggtttcagggtgccagtgggaagcctgatgggtgctggtggcctttcccccgtggattggtctctggcccagcccagtctcttctcaggggcagggggtggaggttggggtcaccggcctgcttggcacccccatctgaaagagcagcacttctcagctattaaaggccccctggatagaccannnanagagaaaaaagaaggaggcaagcaaagcaccgccggcgcaaacattttgcggatnnnnnnnnnnnnnnnnnnnnnnnnnnnnnnnnnnnnnnnnnnnnnnnnnnnnnnnnngcttttttaaaaaccttttctttnnnnnnnnnnnnnnnnnnnnnnnnnnnnnnnnnnnnnnnnnnccaaaaccttggttcccccaaaggaaaaacccggggacagtgcaaaaaaggggcttgggaattccccccac

SEQ ID NO: 69043 - DNA, 938 bp, Homo Sapiens
  misc_feature (822)..(856): n is a, c, g, or t
cccaaagccaattcattttacaacgaaggacaactgagcagtcggttaaattatgcctttgttttcagagtggagtttatagcctcactagaagatttacaatccataaggccataagatgatgctgtgcttagatgaacaattttatagcgtgaaagatacttaagaccatccccccaagagagtttgggttgctagatcagtttattttattggtaattgtttttttcttcttacaaaaccaaacaaaaaattcttgctattggttcccaagcaacttataaatacttatctgtattttctcttagtgccttagtatttatatcagcaagtgccatcttacaatacaaaacaagccaccaaagaaactgcaacaacagaaacaaaaacaagaaatcaaaaaccttcagcactaaaatgatttgacaaattctacatattccacggtatacaaaatttaaataaggcttagcaaaagtaaaaaggatggtcacattcaagcaccaaatagctccagcgagtctctttgttacaaaaatgctgctctgtattaagacagtattttttgcatacaaataaagagatcaggttatgaaatgtgtggagctactagatgcagcagaaatgaatgtgaaacccaggaacttgctaaaaacagcaagcttcatctacaacataaggccccagctatgtattaaaatgtatctgatgtcctgattattctttaatcgatatgctacgatgccaaaatccacccccagttcttttcctcccggccgtaatggccgaattcccgggcatatgtccggtaccgtcgactgnnnnnnnnnnnnnnnnnnnnnnnnnnnnnnnnnnncggccgcttcctcgctcaactgacttcgctgcgctcgtcgttcgatactagcgcgtaagcgcccatagtaggtcagatagtt

SEQ ID NO: 69044 - DNA, 681 bp, Homo Sapiens
cttactgactgtaagaggttagaggtggaccgagaaggacttttcccagtcttcagtggcacttcccaagatctcccttcccttgtgctctgtgctgattttaggacagctaagatgactgccatgtgctgtggcaggcctaatttgtcttgttctttcctttccatatcccagtataatctctgttaatcaacaggactaccccaagaacccatgtgctctcccgagtaacccagatggctgtcttgttcattccatcctacatttctgactcctttcagactcaacacagttcccttcttagtgaccaaaatggtggcctactggctggtctagctgacagtggtacttagcaaaggccactgtttccatagtgaccagctgatacctcttcctgccctctagtgtgcaattgggtgttgcctcagtttcctcccagctcagttttattagatcaaagctgttgttgggcaccaggttggccacctcaatcaccagccaagatggttgctttgtccaccagaggtcaagttcacctctctggtgctgtagttcccagctccttcctgatttttctaatcgctccttctggggaacaggaagttgatattgccatggtggcgggatatgccgtcacctcagtagttttactgtaaaagggaaatttgaacaacaaaaacc

SEQ ID NO: 69045 - DNA, 882 bp, Homo Sapiens
ggggactgcgtgcagaaggtgactgtctcagtggagctgggtcatctcaggccttggctccttgaacttttggccgccatgtgcttcccgaaggtcctctctgatgacatgaagaagctgaaggcccgaatgcaccaggccatagaaagattttatgataaaatgcaaaatgcagaatcaggacgtggacaggtgatgtcgagcctggcagagctggaggacgacttcaaagagggctacctggagacagtggcggcttattatgaggagcagcacccagagctcactcctctacttgaaaaagaaagagatggattacggtgccgaggcaacagatcccctgtcccggatgttgaggatcccgcaaccgaggagcctggggagagcttttgtgacaaggtcatgagatggttccaggccatgctgcagcggctgcagacctggtggcacggggttctggcctgggtgaaggagaaggtggtggccctggtccatgcagtgcaggccctctggaaacagttccagagtttctgctgctctctgtcagagctcttcatgtcctctttccagtcctacggagccccacggggggacaaggaggagctgacaccccagaagtgctctgaaccccaatcctcaaaatgaagatactgacaccacctttgccctccccgtcaccgcgcacccaccctgacccctccctcagctgtcctgtgccccgccctctcccgcacactcagtccccctgcctggcgttcctgccgcagctctgacctggtgctgtcgccctggcatcttaataaaacctgcttatacttccctggcaggggagataccatgatcgcggaggtgggtttcccagggcaaggctgatctgttgcc

SEQ ID NO: 69046 - DNA, 806 bp, Homo Sapiens
ggggctcagagactcccaccccagctcagagggagcaggggcccagccagggacggaccctcattcctcccagggaccccagacctctgtctctctcggcaggccttggctccttgaacttttggccgccatgtgcttcccgaaggtcctctctgatgacatgaagaagctgaaggcccgaatggtaatgctcctccctacttctgctcaggggttgggggcctgggtctcagcgtgtgacactgaggacactgtgggacacctgggaccctggagggacaaggatccggccctttggtgccaactctgcctctcttcacagcaccaggccatagaaagattttatgataaaatgcaaaatgcagaatcaggacgtggacaggtgatgtcgagcctggcagagctggaggacgacttcaaagagggctacctggagacagtggcggcttattatgaggagcagcacccagagctcactcctctacttgaaaaagaaagagatggattacggtgccgaggcaacagatcccctgtcccggatgttgaggatcccgcaaccgaggagcctggggagagcttttgtgacaaggtcatgagatggttccaggccatgctgcagcggctgcagacctgggggcacggggttctggcctgggtgaaagaaaaagtggtggccctggtccatgcagtgcaggccctctggaaacagttccagagtttctgctgctctctgtcagagctcttcatgtcctctttccagtcctacggaccccacggggggaacaaggaggagcttgacccccaaa

SEQ ID NO: 69047 - DNA, 770 bp, Homo Sapiens
  misc_feature (708)..(709): n is a, c, g, or t
  misc_feature (732)..(732): n is a, c, g, or t
gggagagggagcaggggcccagccagggacggaccctcattcctcccagggaccccagacctctgtctctctcgggccttggctccttgaacttttggccgccatgtgcttcccgaaggtcctctctgatgacatgaagaagctgaaggcccgaatgcaccaggccatagaaagattttatgataaaatgcaaaatgcagaatcaggacgtggacaggtgatgtcgagcctggcagagctggaggacgacttcaaagagggctacctggagacagtggcggcttattatgaggagcagcacccagagctcactcctctacttgaaaaagaaagagatggatcacggtgccgaggcaacagatcccctgtcccggatgttgaggatcccgcaaccgaggagcctggggagagcttttgtgacaagtcctacggagccccacggggggacaaggaggagctgacaccccagaagtgctctgaaccccaatcctcaaaatgaagatactgacaccacctttgccctccccgtcaccgcggacccaccctgacccctccctcagctgtcctgtgccccgccctctcccgcaaactcagtcccccctgcctggcattcctgccggcactctgacccgggtgctgttcgccctggccatcttaaataaaaccctgcttataccttcccctggcagggggaagaatacccaaaannaaacgggtgaaccgcaacaacanaattaaaaaaccgtgttccgggccggacaaaaaagaaa

SEQ ID NO: 69048 - DNA, 2105 bp, Homo Sapiens
  misc_feature (871)..(880): n is a, c, g, or t
  misc_feature (1100)..(1110): n is a, c, g, or t
  misc_feature (1615)..(1652): n is a, c, g, or t
  misc_feature (1778)..(1800): n is a, c, g, or t
ggaacaccgagagcagccactgtcaaagcaaagacaaatgtgaattgtgggcatcgaccgagacagctatagaagaatcctcatgggaagcacactgagaaagcggaagatgtatgaggaattccttagtaaagtctctattttagagtctctggacaagtgggaacgtcttacggtagctgatgcattggaaccagtgcagtttgaagatgggcagaagattgtggtgcagggagaaccaggggatgagttcttcattattttagaggggtcagctgctgtgctacaacgtcggtcagaaaatgaagagtttgttgaagtgggaagattggggccttctgattattttggtgaaattgcactactgatgaatcgtcctcgtgctgccacagttgttgctcgtggccccttgaagtgcgttaagctggaccgacctagatttgaacgtgttcttggcccatgctcagacatcctcaaacgaaacatccagcagtacaacagttttgtgtcactgtctgtctgaaatctgcctcctgtgcctcccttttctcctctccccaatccatgcttcactcatgcaaactgctttattttccctacttgcagcgccaagtggccactggcatcgcagcttcctgtctgtttatatattgaaagttgcttttattgcaccattttcaatttggagcattaactaaatgctcatacacagttaaataaatagaaagagttctatggagactttgctgttactgcttctctttgtgcagtgttagtattcaccctgggcagtgagtgccatgctttttggtgagggcagatcccagcacctattgaattaccatagagtaatgatgtaacagtgcaagannnnnnnnnnaagtgacataattgtccagttataagcgtatttagactgtggccatatatgctgtatttctttgtagaataaatggtttctcattaaactctaaagattagggaaaatggatatagaaaatcttagtatagtagaaagacatctgcctgtaattaaactagtttaagggtggaaaaatgcccatttttgctaattatcaatgggatatgattggttcagnnnnnnnnnnnccagagttgttgtttgccaagctaatctgcctggttttatttatatcttgttattaatgtttcttctccaattctgaaatacttttgagtatggctatctatacctgccttttaagtttgaaactaactcatagattgcaaatattggttagtatttaactacatctgcctcggctcacaaattccgattagacctttatccagctagtgccaaataattgatcagatgctgaattgagaataagaatttgaggtctacattcttggttgttaatttagagcgtttggttaaagtatgtccttcagctgactccagtataatctcctctgctcattaaactgattccaggagattggatttgctgtgactagatacagatggagcaaatgtcctaacagagaaatagaggtgatgctgctaaagggagaaatgccaggcggacaaagttcagtgtcgggaattttccccgtgacattcactggggcatgagattttggaagaagnnnnnnnnnnnnnnnnnnnnnnnnnnnnnnnnnnnnnnattcagctagaatttctggggggttgatggtagggtataatgtgtctgtgttgcttcaaattggtctgaaaggctatcttgctgaaagtcctgctttcctatctagcatttatttctctggaaaannnnnnnnnnnnnnnnnnnnnnnaaagaaaacttgtgtatttgacccttaaccgttatttcagtaattttcccgcccttatggggtaacattatttccaatggatacccaaacgggttaattttttaatcactttttttaaaaacaaatttcacacagtccttgacatggaacgccacctttaattttccattggggaatttaattacaagggaacagtaagggttattatttgggagagagtactgcaggaacttttttccatcttgggggggcaaactaactgactcctgcttattggaatcctttctccgggcccttttccccgg

SEQ ID NO: 69049 - DNA, 1116 bp, Homo Sapiens
  misc_feature (148)..(337): n is a, c, g, or t
  misc_feature (414)..(460): n is a, c, g, or t
  misc_feature (1026)..(1042): n is a, c, g, or t
tgctgtgtccattattctgcttcccttatctggtaccttcccgcttggtagtgtaccgtccccaccgaagacgagccgcgatcatgacgagaacggagacgccatacgcaacgcctctcccgcgcgtgccgatcataatcaactggcnnnnnnnnnnnnnnnnnnnnnnnnnnnnnnnnnnnnnnnnnnnnnnnnnnnnnnnnnnnnnnnnnnnnnnnnnnnnnnnnnnnnnnnnnnnnnnnnnnnnnnnnnnnnnnnnnnnnnnnnnnnnnnnnnnnnnnnnnnnnnnnnnnnnnnnnnnnnnnnnnnnnnnnnnnnnnnnnnnnnnnnnnnnnnngtggccctcgaggccaagaattcggaacgaggagtgtacttgttagtaaggaataacataaactaatctgtaccttnnnnnnnnnnnnnnnnnnnnnnnnnnnnnnnnnnnnnnnnnnnnnnnacatggtaatgatttattgctatgccccagatccttaatgtagttctcatcctccgcatgccctcagccacaagcgggtgactgactgttccctgatgatttggcccacctcctgtgtttggacctctagggaggagggttttggtcatactctccttatcctcgtgcacagaaatgctcagggtccccatgtgcctgttgttcagccctctctcttgttccctttctgagcatgtggtccttccccaggctgtgggacagctgccttcccacgaaagtgtaaagcagtattaagatcattactgcatgtgccctaaaaacccaagttttctattcccttaggacagaaaattgcatgtgaggtgggataatcgagtttcagtgacccacgtcagttacacattaaagccagaccccatgataaaattccacaaaatggaaataaaactcaaatttctttagcattgtgtaaataaatctgaatgtgtttaactttgtactggtaattttctgtatatttggaatatttgggttaaaaataaaacagactggactttgttacctgnnnnnnnnnnnnnnnnncgccaacagccgcggccgcaagctttttccctttagtgagggttaatttcggtaaggcactggccgtcgttacc

SEQ ID NO: 69050 - DNA, 1061 bp, Homo Sapiens
tggtaccggctccggaatttcccgggatatcgtcgacccacgcgtcgtatttttttaaacaaaatttcacagttctgtaatgtaggcacttttattttcattgtgatttatatataaggtaatgtagggttatatttgggagtgactgcaagcatttttccatctgtgtgcaactaactgactctgttattgatcccttctcctgccctttcccaggtaatttaaattggtcatggtagatttttttcatagatttgaaaaacttttaggttgttaccaagtatgaagtataaatctggggaagaggttttatttacattttagggtgggtaagaaagccaccttgttacaaattttttaatttccaaaataatctatattaaatgagggtttctgatctgtactttgtgtttagctacctttttatatttaaaaaattaaaaatgaaaattacgttcttacaagcttaaagcttgatttgatctttgtttaaatgccaaaatgtacttaaatgagttacttagaatgccataaaattgcagtttcatgtatgtatataatcatgctcatgtatatttagttacgtataatgctttctgagtgagttttactcttaaatcatttggttaaatcatttggcttgctgtttactcccttctgtagtttttaattaaaaactttaaagataagtctacattaaacaatgatcacatctaaagctttatctttgtgtaatctaagtatatgtgagaaatcagaattggcataatttgtcttagttgatattcaaggctttaaaagtcattattcctgggcttggtaagtgaatttatgagatttactgctctagaaagtatagatggccaaaggaccgttttgtattgcttcctgattaccagtctgattataccatgtgtgctaatatactttttttgttatagattgtcttaatggtaggtcaagtaataaaaagagatgaaataatttataacatataaagaaaaaaagaactaacatacaaacaccgcaaacaactatccaaagagatataaaaaccttgt

SEQ ID NO: 69051 - DNA, 759 bp, Homo Sapiens
  misc_feature (350)..(350): n is a, c, g, or t
  misc_feature (360)..(397): n is a, c, g, or t
  misc_feature (541)..(541): n is a, c, g, or t
  misc_feature (629)..(649): n is a, c, g, or t
ggggttagtatttaactacatctgcctcggctcacaaattccgattagacctttatccagctagtgccaaataattgatcagatgctgaattgagaataagaatttgaggtctacattcttggttgttaatttagagcgtttggttaaagtatgtccttcagctgactccagtataatctcctctgctcattaaactgattccaggagattggatttgctgtgactagatacagatggagcaaatgtcctaacagagaaatagaggtgatgctgctaaagggagaaatgccaggcggacaaagttcagtgtcgggaattttccccgtgacattcactggggcatgagatnttggaagaannnnnnnnnnnnnnnnnnnnnnnnnnnnnnnnnnnnnnattcagctagaatttctggtgggttgatggtagggtataatgtgtctgtgttgcttcaaattggtctgaaaggctatcctgctgaaagtcctgctttcctatctagcatttatttctctggcaaacttttctttcttttccttntttaaagtaaacttgtgtattgagtcctaactggatttcaggattttccagccttatgtgttacattattcccatgatacccaacagnnnnnnnnnnnnnnnnnnnnnaaacaaaaatttccaggttctggtaagggtaggcccttttatttttcattggggatttaatattaaagggaatggtaggggttatatttggggggagggacttggcaagc

SEQ ID NO: 69052 - DNA, 1033 bp, Homo Sapiens
  misc_feature (874)..(874): n is a, c, g, or t
  misc_feature (884)..(884): n is a, c, g, or t
  misc_feature (899)..(956): n is a, c, g, or t
gctcatagaaagtcactttaatagatagggacagtaataaataaatgtacaatctctatatacaagctgagacctttccttttgtctactccaagccttccccctgcgtatgtgggattgagggtcacatcattggcactagtgagagggtagtcagtagccacttctgggaaaggtgggtagtgtggcccaagtgggggactgatgctcccaattgttcatgcttggtgcagattcaccattcggtcaatcagagctcggcgagtcgcctctacttccctggtcaggcgctcgatttcctgcttgagccgttcattctcttcagctagctgtgccactttcctttcattctcctgttctttctccttcatgcgctgctttccagcccgggctggggaatgaccactctgtttccgtttcctggttctcccttggtcttcctcctcttcctcctgagccagggagctctgactggaatctggagagtgagggctctgggaggtgcttgtgacctctgctggttctggctcctcctcagtcagccaagccagagaagcagggtcaagagtggtgaagatttttgattcttcctcttcatttccaggaggtgaaacataggtacccccattttcatctgaagacaggacctcttgcaggtcctcataccaggcttccagctcccagctggacagtgtcccgaaggagaaaggcaatgactcagctgccatctctgcagttggatcagtctggaaaagcacatctgctttcaggtgtggtgatgtatgaagatacacttccttcttgaacactctctcctcaggttccagctctgattttggctctgtcgctgccacccgctcatctttacctcgtngcgattcttnggctcgaggggcaannnnnnnnnnnnnnnnnnnnnnnnnnnnnnnnnnnnnnnnnnnnnnnnnnnnnnnnnnatcgctcaaatttcacacacatagagcgggagcaaagtgtaagctggggtgctatgatgagctatcaataatgcgtg

SEQ ID NO: 69053 - DNA, 741 bp, Homo Sapiens
  misc_feature (609)..(609): n is a, c, g, or t
aacaaaaaaagagaatattctgagcatactattctacaatccggttttttactatttacaatctcaccaacttccaatgatcatgcataaagaccaccctcattctcttaaataactgtatactattagcttatatgatatattggtcaaggttcttagttgtggataacgtaatctcctctggttagtctaggcaaaaaggaatttattaaggagtatatatatagttcacttggaagaacttaagaaatcattttcaaaataagcttccacaaaaattttaccacagaccaggactgacaagggagccactgcctctgccataatcagaaaattgcaacagagctgtagactccagaatcactcgtctcttccaaggtcaagaagctgccaagttaggaaaccagcttgcaaatcaagatgccgcctaacaacttctagctccaatctcttgttgcctctattatgttccatgcaagcaaaataaatgttgtgcattgactctctccttatgtagctctcttctgaatcaaagtatcatgtgaatacacatagtaggtgaaacctaaattgtatgtggaacctttctgcaagagcatgggaaattcnctattagcttttcagcttctatagtgtaagaagacactaaattgttatgagacacttaattgctgtgcttcaccacatagggatagacattatttattgattgtttttggtaacacattacagaggaaacag

SEQ ID NO: 69054 - DNA, 731 bp, Homo Sapiens
  misc_feature (34)..(34): n is a, c, g, or t
ataactatatattatatatgggataaactatatngactgaattgtgagaatataaatgcatcgaaagactctggtgtcatgaaagcacaagaataaggctggagatggtcccagatccaagatgtcccaaaagccttttgtatcagtttctctatttttggtattttgcataatgcatggatccttagttcaaatgagggacaaagtttctcagtcagccccacttcctttctttctaactcctacctttcccttgcagaggaggtagtagagattctggaattgtctatttttatgaattccattattttgtccatggcatctctaatgaaaacaggttctagaataaaggagttgattagtctgaacagtactaattaactacaaaataaacgttagtgatcagcctcttcctctataaacaatgaccaattagacgtttccgtaattccatgtattatgtatagtacactctataaatgtaaatgtaatgcttgtctaaaaagtgcaatttattgtacattgtcccaacaaatgtttacttttataatcgttatgaacttgaattggattagtatcttgtttttatgtgtgaatgaagccttgtgaaataaacaaatgcaactgagaaggtaacaaggtgactgtttttgtgagccagtgatgttttcaatgctttgtgttgcccctttggccccattaagcagtaataaacatttgttctgaagtcc

SEQ ID NO: 69055 - DNA, 1496 bp, Homo Sapiens
gggataatcctaaattaagggagcttctgataattggaggtgttgcagcccgggatcagctctctgttttggaaaatggagtagatatagttgtaggtactccgggaagactagatgacttggtgtcaactggaaagctgaacttatctcaagttagattcctggtcctggatgaagctgatgggcttctttctcaaggttattctgattttataaataggatgcacaatcagattcctcaggttacctctgatggaaaaagacttcaggtgattgtttgctctgccactttgcattctttcgatgtaaagaaactgtccgagaagataatgcattttcctacatgggttgacttaaaaggagaagactctgttccagatactgtacaccatgttgttgtcccagtaaatcccaaaactgacagactctgggaaaggcttggaaagagccacattagaactgatgatgtacatgcaaaagataacacaagacctggtgctaatagtccagagatgtggtctgaagctattaaaatcctgaaaggggagtatgctgtccgggcaatcaaggaacataagatggatcaagcaattatcttctgtagaaccaaaattgactgtgataacttggagcagtactttatacaacaaggaggaggacctgataaaaaaggacaccagttctcatgtgtttgtcttcatggtgacagaaagcctcatgagagaaagcaaaacttggaaagatttaagaaaggagatgtaagattcttgatttgcacagatgtagctgctagaggaattgatatccacggtgttccttatgttataaatgtcactctgcccgatgaaaagcaaaactacgtacatcgaattggcagagtaggaagagctgaaaggatgggtctggcaatttccctggtggcaacagaaaaagaaaaggtttggtaccatgtatgtagcagccgtggaaaagggtgttataacacaagactcaaggaagatggaggctgtaccatatggtacaacgagatgcagttactatctgagatagaagaacacctgaactgtaccatttctcaggttgagccggatataaaggtaccagtggatgaatttgatgggaaagttacctacggtcagaaaagggctgctggtggtggaagctataaaggccatgtggatattttggcacctactgttcaagagttggctgcccttgaaaaggaggcgcagacatctttcctgcatcttggctaccttcctaaccagctgttcagaaccttctgatttttacatttactgaataagatttgagtaatgaaagtctgtagtcttaaaactctaaaacagttgtactgcttccaagcagcagtatttatagtaacgtaagctattaatgctaactcttgcatgtcaagaaacattagtcttaggaattcttcaaaaaatggcatcccaatgaaaataaatttgatgactatattttcatgaaaaaaa

SEQ ID NO: 69056 - DNA, 911 bp, Homo Sapiens
  misc_feature (55)..(63): n is a, c, g, or t
  misc_feature (831)..(846): n is a, c, g, or t
gttaaaatatatcttttagtgtgctttaaagtagatagtatactttacatttatnnnnnnnnntcaaattttgttctttattttgtgtgtgcctgtgatgtttttctagagtgaattatagtattgacgtgaatcccactgtggtatagattccataatatgcttgaatattatgatatagccatttaataacattgatttcattctgtttaatgaatttggaaatatgcactgaaagaaatgtaaaacatttagaatagctcgtgttatggaaaaaagtgcactgaatttattagacaaacttacgaatgcttaacttctttacacagcataggtgaaaatcatatttgggctattgtatactatgaacaatttgtaaatgtcttaatttgatgtaaataactctgaaacaagagaaaaggtttttaacttagagtagccctaaaatatggatgtgcttatataatcgcttagttttggaactgtatctgagtaacagaggacagctgttttttaaccctcttctgcaagtttgttgacctacatgggctaatatggatactaaaaatactacattgatctaagaagaaactagccttgtggagtatatagatgcttttcattatacacacaaaaatccctgagggacattttgaggcatgaatataaaacatttttatttcagtaacttttccccctgtgtaagttactatggtttgtggtacaacttcattctatagaatattaagtggaagtgggtgaattctactttttatgttggagtggaccaatgtctatcaagagtgacaaataaagttaatgatgattccnnnnnnnnnnnnnnnngggcggcgctcgcatctagacggacgcgtgggtcgacgatatcccgggaattccggaccggtacc

SEQ ID NO: 69057 - DNA, 695 bp, Homo Sapiens
agtcagggatccccaaacccttgggccatggactggtactggtctgtggcctgctaggatccagggtgcacagcaggaggtgaatgtaggatgagcaaacattactgcctgagctcaactttctgtcagatcagcagtggcattagattctcataggagcatgaactttattgtgaactgcacatgcaagggatctaggttgcacactccttatgagaatctaatgcctgatgatctgaactggaacagtttaatccccaactccagtccgtgggaaaaatgtcttccacgaaactggtccctggtgccaaaaagttaggggaccactgatttagattatgtcacatgtcccatccactcattaacattaaggctttcatccctgggacctcaagataatggtggtatttagagatgtggttttttaaagaggtgattttaaaatgaggcagttagaatggggccctcattcaatatgactggtttccttataagaagtgaaagagataccagggtagcaggcacagaattttatgtgaagtgaccggaaatggttaccttcaaggcaaagagagattcctggaggagatccttcttttaaggctcattatagaggaaatcatccttatctacactttgatcctggacttccagcctcaaaaattatgagcaaataaatttctgttgtttaagcc

SEQ ID NO: 69058 - DNA, 569 bp, Homo Sapiens
agacagctccgggcggagcgccgagaataggggctgagggagggacgtgaagacagagccccccctggaccactgggccacaggcaacgcccgcgggccagagcggcctcacgtaggcgtggggcgggcaattcgcttctcgcctcaggcggaatcgctcacccgacggcacgtagtcctcgtcctcctccgacgtagagaagtcttcggagtcgaattcctccatgttgctgccgctcgacgctggtcaaactcacaagaccgcagcagccgcctccaacggcaaagctctagggagagaccatagagccccggcggcggcgacggcagctagggcggcccccgacagcgctttgcacatgcgcagagagtactacgtggttgccctacgacacttccggccgatgcctccgggctggcgtccctgaagccctcgctgggagcccgaacccgcccggacgcggtgcatgctggaacttgtagtcttcggcgctgcctcgccgccttaatataataaacctgcttaaataaaattacatatctatggaaatacaggtgaccttcaaaaa

SEQ ID NO: 69059 - DNA, 1558 bp, Homo Sapiens
  misc_feature (1238)..(1246): n is a, c, g, or t
  misc_feature (1366)..(1366): n is a, c, g, or t
  misc_feature (1371)..(1371): n is a, c, g, or t
  misc_feature (1373)..(1376): n is a, c, g, or t
  misc_feature (1379)..(1379): n is a, c, g, or t
  misc_feature (1381)..(1385): n is a, c, g, or t
  misc_feature (1391)..(1391): n is a, c, g, or t
cagtcgacggtaccggacatatgcccgggaattcggccattacggccggggggccggcaagtgtcgtagggcaaccacgtagtactctctgcgcatgtgcaaagcgctgtcgggggccgccctagctgccgtcgccgccgccggggctctatggtctctccctagagctttgccgttggaggcggctgctgcggtcttgtgagtttgaccagcgtcgagcggcagcaacatggaggaattcgactccgaagacttctctacgtcggaggaggacgaggactacgtgccgtcgggtggagagtatagtgaagatgatgtaaatgaattagtgaaggaagatgaagtggatggtgaagagcagacacagaaaacccaagggaaaaaaagaaaggcccagagcattccagccaggaagagaagacaaggtggcctctcattagaagaagaggaagaggaggatgccaattcagaatctgagggaagcagtagtgaggaggaagatgacgctgcagagcaggaaaaaggcattggatcagaggatgccaggaaaaagaaggaggacgaactctgggccagcttcctcaatgatgtgggaccaaaatcaaaagtgcccccaagtacacaagttaagaaaggagaggagactgaagagacaagttcaagtaaattgttggtaaaagcagaagagctagagaaacctaaagaaacagaaaaagttaaaatcaccaaggtgtttgattttgctggtgaagaagtaagggtaactaaggaagtggatgctacatctaaagaggccaaatccttcttcaagcagaatgagaaagaaaaaccacaggctaatgttccttcagctctgccatcactccctgccgggtcagggttaaaaagatcaagtggcatgagcagccttttggggaaaattggtgccaagaagcagaaaatgagcacccttgagaagtccaaactggactgggagagcttcaaggaggaagaggggattggtgaagaactggccatccataatcgagggaaagaggggtacattgaacggaaagccttcctcgaccgagtggatcacaggcagtttgaaattgagcgagatctcaggctgagcaaaatgaaaccttgatgttacgggctaaatcaagagcagcttaatcctgtttacaatgtgagctttttgtgcgtctgtgaaatgttttacagtgtttctcatcatctgtttcccagcaaggtcnnnnnnnnncctacattgaagttctgtctatgtatcttaatcacaaatggtttcattcactttacttttaaaaatttgtccttaaatgaataaataaaataaaagttggtcctgtgagaggataatggngaaanannnnaanannnnnaaaaanaaacatgtcgggccgcctccggccctcggaaaaacttttctaaacccattcgttttgggggcgcgggccccaggtagggtaaagggaacatgggccaatagcctgttttccctagggaaaaaccctggtccatggaccaagggggctttggaaattccccacccaat

SEQ ID NO: 69060 - DNA, 932 bp, Homo Sapiens
  misc_feature (221)..(233): n is a, c, g, or t
gcaggctggtaccggtccggtattcccgggatatcgtcgacccacgcgtccggtatgatctatatttgaccctaaaaatgttggattaatttaacaaatatggcagatttttcataactaagtcttaagtcttctaaaaggaagctgttacccttctgtttttaattacattaattgaaatgtgttttaagagatacaatttcagcatattttatatattnnnnnnnnnnnnnggattagtattgagccagtggccaaaaggtaatattactaccatgtagactgttatagttcaaattgtcccacttcacccagaattttagaaactagaagtctgggaggtactatatcagctgtagttgggtaattccaagtgctgatagtactattcatcttttttattattgtgtcagatgaaacaaatgccaagttgcaaaatatgcagatttttattatataatggttttaggcataaattattaacaagccatgccttatgtgtttcatcttatatttttctttagaactaaactataacagattttggaaaatgatttgacgtgcttgctcacttgattgacttggtcagatatttgaatgatggtattacctagattctaatccttgattctagttatataataaataatatagaatatgaaaatatgtttgggcatttactgtttatattatgtagtagcctccatcatgacacacttactacatttatgaattgagcagttctgtaattgtaattattattgctgttcatgtaacaaaacatgcttatgataatagcaaacaaatagaaatgccccccaaaatgctatttttttaattcagttataactgttactcttgtagttgtgtatgacgcaataaaatttgtaaaaaaatttcagcatgaaaaataaaatttgtatcacttatgt

SEQ ID NO: 69061 - DNA, 753 bp, Homo Sapiens
agccttataagctgagggagtggagaggcccggggccaggaaagcagagacagacaaagcgttaggagaagaagagaggcagggaagacaagccaggcacgatggccaccttcccaccagcaaccagcgccccccagcagcccccaggcccggaggacgaggactccagcctggatgaatctgacctctatagcctggcccattcctacctcggaggtggaggccggaaaggtcgcaccaagagagaagctgctgccaacaccaaccgccccagccctggcgggcacgagaggaaactggtgaccaagctgcagaattcagagaggaagaagcgaggggcacggcgctgagacagagctggagatgaggccagaccatggacactacacccagcaatagagacgggactgcggaggaaggaggacccaggacaggatccaggccggcttgccacaccccccacccctaggacttattcccgctgactgagtctctgaggggctaccaggaaagcgcctccaaccctagcaaaagtgcaagatggggagtgagaggctgggaatggaggggcagagccaggaagatcccccagaaaagaaagctacagaagaaactggggctcctccagggtggcagcaacaataaatagacacgcacggcagccacagcttgggtgtgtgttcatccttgttctttgtgtgattaggtcagggcatgtgtgtgttgctgtgctgaaattcatgagcctgagag

SEQ ID NO: 69062 - DNA, 783 bp, Homo Sapiens
gcggccgcccaagggggaaaagaaaaatgtgccagaaaagcacacgagagaggctcagaaacaagcctcagaaaaagtttccaacaaaggcaagaggaagcataagaatgaagatgataaccgagccagtgagagcaagaaacccaaaacggaggacaagaattcagcaggccataagccatccagcaacagagagtcatctaagcagagtgctgcaaaagaaaaggatttgttgccttctcccgctgggcctgttccttcaaaagatccaaaaacagagcatggctctcggaagaggactattagtcagtcttcttccttaaagtcaagcagtaacagcaacaaggagacgagtggcagcagcaaaaacagttcctccacatcaaagcagaagaagaccgaagggaagacttccagtagctccaaggaggttaaggtaaagtgttgggggcctggggcttttgaaaatcattcaacttgccatgtgacttttccagggtgacactgtgctttgaaattattgtaacatctcagtaaatatataggcctatgtcttttaccctctatatgtaataatcctgataaatgaatacagtgatataagactgtgaaggcggtaagtcagctggtcacatacatattgaaagaaaaacccttgggtacagtggctcatacctgtagtcccagctatttgggaggctaagatggaaggatcatttgaggaatttgagtccagcctgggcaatgtggtgagaccctgtctgtaaaagaactttaaaattt

SEQ ID NO: 69063 - DNA, 471 bp, Homo Sapiens
  misc_feature (102)..(155): n is a, c, g, or t
gaaagaaagatgatgtgatacatatcacatatttcctaacacccccaaccaaacacatttatgcatatgcataaagcagacgaggaaagattctaaataggnnnnnnnnnnnnnnnnnnnnnnnnnnnnnnnnnnnnnnnnnnnnnnnnnnnnnnccagggctgttctgagaatctgatgcctcccattgcactggtgagcctggcacaggcacaggtcccaccccaggccctttgaactggctgttcctttggcctggaacattcctccccagatacctcctgagagggctccctcacttccttcaaggcactgctcaaatgctacctcttcacagaggctttccctgaccaccccgtctctttcctcttcctgcatagcctctgtcacctgacattttatgtcataaattactcatttattaatttactgccctcccacagtggcacccgagctctgtgaggagcaagc

SEQ ID NO: 69064 - DNA, 759 bp, Homo Sapiens
gcttttaggaagaggctgaatttaagacaaagaaaacttgaatgttaaatatttaaaggattataaaagagcagcaacattcttggtctatttttgtaggcaatagatatgaggattaggttctgactggaatcctgagtgtcacggagacagcccccacatgtgacccacctgtagttttccaacaggcatttttccaagagtgagttttggaacattaaattaagagcaaattaaattttctcaggctttgaggggcctgggctgaatttttttaatgtatagagtttagaatcaacgatttaaagctcagtgtcccctatatgggtctaattatgaacatgccactatgtccacattagaattgaactgattttgtaacaagttattttctatgaaaccctggaaggtggtgaatgagggaaagtgcccaaaacatgtaaacaagaaaaaaggaactagagacgaggggaatgctttaaactgtaaaagctgtaacatcagctctgacagtttatttacacgtaatgagaaacggatgtggggtgagctgagccacaggtgaggttccttctctctctgtaacacaacagcaaacaatgatgtcatggaactacagaacttaaaacaccaaagtcagatgctaggcaaaaggaaataggaaaacattaaaaagaatgaacatttcaattttcagtgaatgacataaaatgataaagatcttacaaaccttaatgcactcatctacattttgcatca

SEQ ID NO: 69065 - DNA, 717 bp, Homo Sapiens
acaatgtataggtacacagcaaaattaaacaaatccaacaatttctgaagcttagtgtaattgagtggtggttgttattcaataaaattattcccaaaagtgtttctcctaagagtgcagttcccatgagtcacttcctgaacccattgaccaaaggtggacagagacaatcctgtagaccttgacattcagaaagatgtgagctgcttactgatcatatatgcatacgtttctttacagcagaggaaaccattgtccacaaaactgatgttcttttggggttttatgtacagacttgtccaatcatgtgtgtggttcctgcgagttgctgatgactccgcattgaagctctctgagttctttgattttaagttgggtttatggaattttttcaaatgttggaaggcgtgtggttcttcctgccctccctccccttttggaaatatgaaagcaaatgtttagaagaattccttttgaaaagctgtgtcgtgttccctgtgaaactgagcaggtgtgtgttggcgcgctaagtgccacatgcttgtgtgtagaggaggaggtggccctgccggctccgcgctgctgtgcctgtgatccctacctgctccccgctcctgttgccagcagcactcactgcactcctttgtcatatactctgcatcactgtcatactcacaacttcgtgaataaagttgtgtgctttattcgtaaaaaaaa

SEQ ID NO: 69066 - DNA, 442 bp, Homo Sapiens
  misc_feature (31)..(31): n is a, c, g, or t
  misc_feature (299)..(299): n is a, c, g, or t
  misc_feature (304)..(304): n is a, c, g, or t
  misc_feature (420)..(420): n is a, c, g, or t
tggccccaaatcaatgtgtggtgggtccccngccgaagttgcctgaatgaacccccgcattggaaagctcccctgaagttcctttgaattttaaaagttggggtttaagggaattttttccaaaatgttgggaaggcgtgtggttccttcctgccctccctccccttttggaaatatgaaagcaaatgtttagaagaattccttttgaaaagctgtgtcgtgttccctgtgaaactgagcaggtgtgtgttggcgcgctaagtgccacatgcttgtgtgtagaggaggaggtgccctgncggtnccgctgctgtgcctgtgatccctacctgctccccgctcctgttgccagcagcactcactgcactcctttgtcatatactctgcatcactgtcatactcacaacttcgtgaataaangttgtgtgctttatttcgtatt

SEQ ID NO: 69067 - DNA, 1038 bp, Homo Sapiens
  misc_feature (181)..(181): n is a, c, g, or t
  misc_feature (190)..(190): n is a, c, g, or t
  misc_feature (233)..(233): n is a, c, g, or t
ccgcttatcctttttccaaaaagagctgcagtgaacgcaaacaatcatcacgtcatgaagctttgttaactgtgcttgccagtgctcctccagttccccctgagtgtgacatatatctgtgtagcatgtagatttcagcaatctctatgtataaaatgtagtactaatctgttctggattntgtgtgttntgtctgtttacaggatgctatccccctcctttcctccctcctntccatccttcatcctttatcctcccttttggaacaagtgttcagagcagacagaagcagggtggtggcaccgttgaaaggcagaaagagccaggagaaagctgatggagccaggacagagatctggttccagctttcagccactagcttcctgttgtgtgcggggtgtggtggaattaaacagcattcattgtgtgtccctgtgcctggcacacagaatcattcatacgtgttcaagtgatcaaggggtttcatttgctcttgggggattaggtatcatttggggaggaagcatgtgttctgtgaggttgttcggctatgtccaagtgtcgtttactaatgtacccctgctgtttgcttttggtaatgtgatgttgatgttctccccctacccacaaccatgcccttgagggtagcagggcagcagcataccaaagagatgtgctgcaggactccggaggcggcctgggtgggtgagccatggggcagttgacctgggtcttgaaagagtcgggagtgacaagctcagagagcatgaactgatgctggcatgaaggattccaggaagatcatggagacctggctggtagctgtaacagagatggtggagtccaaggaaacagcctgtctctggtgaatgggactttctttggtggacacttggcaccagctctgagagcccttcccctgtgtcctgccaccatgtgggtcagatgtactctctgtcacatgaggagagtgctagttcatgtgttctccattcttgtgagcatcctaataaatctgttccattttgatgacaaaaa

SEQ ID NO: 69068 - DNA, 1350 bp, Homo Sapiens
  misc_feature (1195)..(1195): n is a, c, g, or t
  misc_feature (1305)..(1305): n is a, c, g, or t
  misc_feature (1322)..(1322): n is a, c, g, or t
aaaccaagcgacccccgtgcacgttttaatatcggcccgaggctctgtgagtttccggtgcacgcgagtgcttctgaaacgtcagctgcgctcccctaggagtgctgagcccgcggaaccgcagccatgttgtcctgggaccaagacaaattcgcctaagataaggagttacgtagaagacagggcgtcctggtgtacgggctggccctggacgtcacttccgctggcggcagtggcgtcacttcctgctcttgggtggcggggcatccgtgtccttgcggtgctgggcagcagaccgtccaaaccgacacgcgtggtatcctcgcggtgtccggcaagagactaccaagacagacgctatgactgaggctgatgtgaatccaaaggcctatccccttgccgatgcccacctcaccaagaagctactggacctcgttcagcagtcatgtaactataagcagcttcggaaaggagccaatgaggccaccaaaaccctcaacaggggcatctctgagttcatcgtgatggctgcagacgccgagccactggagatcattctgcacctgccgctgctgtgtgaagacaagaatgtgccctacgtgtttgtgcgctccaagcaggccctggggagagcctgtggggtctccaggcctgtcatcgcctgttctgtcaccatcaaagaaggctcgcagctgaaacagcagatccaatccattcagcagtccattgaaaggctcttagtctaaacctgtggcctctgccacgtgctccctgccagcttcccccctgaggttgtgtatcatattatctgtgttagcatgtagtattttcagctactctctattgttataaaatgtagtactaaatctggtttctggatttttgtgttatttttgttctgttttacagggttgctatcccccttcctttcctccctccctctgccatccttcatccttttatcctccctttttggaacaagtgttcagagcagacagaagcagggtggtggcaccgttgaacaggcagaaagagccaggagaaagctgatggagccaggacagagatctggttccagctttcagccactagcttcctgttgtgtgcggggtgtggtggaattaaacagcattcattgtgtgtccctgtgcctggcacacagaatcattcatacgtgttcaagtgatcaaggggntttcatttgctctgggggggattaagtatccatttggggaaggaagcatgtgttcctgtgaggttgttccgcctatgtcccaagtgtcggtttactaatgttaccccctngctgtttgctttttggnaaatggggatgtttgatgcttctccccc

SEQ ID NO: 69069 - DNA, 902 bp, Homo Sapiens
gggggggccatttccgctgctgcttctgtgagtttttccggtgcacgcgagtgcttctgaaacgtcagctgcgctcccctaggagtgctgagcccgcggaaccgcagccatgactgaggctgatgtgaatccaaaggcctatccccttgccgatgcccacctcaccaagaagctactggacctcgttcagcagtcatgtaactataagcagcttcggaaaggagccaatgaggccaccaaaaccctcaacaggggcatctctgagttcatcgtgatggctgcagacgccgagccactggagatcattctgcacctgccgctgctgtgtgaagacaagaatgtgccctacgtgtttgtgcgctccaagcaggccctggggagagcctgtggggtctccaggcctgtcatcgcctgttctgtcaccatcaaagaaggctcgcagctgaaacagcagatccaatccattcagcagtccattgaaaggctcttagtctaaacctgtggcctctgccacgtgctccctgccagcttcccccctgaggttgtgtatcatattatctgtgttagcatgtagtattttcagctactctctattgttataaaatgtagtactaaatctggtttctggatttttgtgttgtttttgttctgttttacagggttgctatcccccttcctttcctccctccctctgccatccttcatccttttatcctccctttttggaacaagtgttcagagcagacagaagcagggtggtggcaccgttgaaaggcagaaagagccaggagaaagctgatggagccaggaacaaaaatctggttccagctttcagccactagcttcctgttgtgtgcggggtgtggtggaattaaccagcatcattgtgtgtcctgtggctg

SEQ ID NO: 69070 - DNA, 474 bp, Homo Sapiens
tttgttattcagaatattttattttaaactacaaattagcacagctaatttgaatatttaaatttccgtaagcactgtaaattgaatacattttttcttaatgatatagtttttttcctaaaaatcctaggcatattcagacttaattcaaatgggttgtctaaaaccagacaatacagatgtggagccatttgtggtagatggacgtgtatatcttgcagaagtctccaatggccttaaaaagcattattattggacatcaacttatggagaatcttatgaccactcatctaatgcaggttttgctcttgttccagtaggtcaacagccatgaaaaagtagctgtaaaataattttcatacacttgtcttattgtttcacagagattaatattctatagcctattttcttttataaattaaaacaagttacttttttcaaatgtgtaaaagataatgactgtattaaactttg

SEQ ID NO: 69071 - DNA, 454 bp, Homo Sapiens
gcttccatcttgctccttttattatatggtgaagcatccttagtgtgaaattaatggttagatatataaatgcatggcataacatgagaaaatctaggagaaaatatcctcattttaatctaagactatggaattatcaattccaattagacttaatcagcaacttacctttttcaaaaaaagcaaatgcacaaataggcttgataatttaactcttcttaactattaaggctctaggatgtccttaacttttttaaaagatcattttaaaaccaaagcactaatttctatacacagtaaaaacagtacaaatatctgaatttcagatctggcttttgctagatagatcctaaaaatgaagaaaacattttccctttccagatactttaataatttaaaatataaataattgtattaagtcccactgaataaagaatgtgaaagtttttgtatt

SEQ ID NO: 69072 - DNA, 732 bp, Homo Sapiens
  misc_feature (41)..(41): n is a, c, g, or t
cgcgtgctgagcctgtctgtgtggcaccgcgaaagcctggntcgcaacatctttctgggcgaagttgaagtgcccctggacacgtgagactggggctctgagcccacctggctccccctgcagccccgggtcccaccctctcccgacgaccttccgagccgcgggttactcgccctgtccctcaagtacgtccccgccggctccgagggcgcaggactgcccccgagcggggagctgcacttctgggtgaaggaggctcgggacctcctgccgctgcgggcaggatccctggacacttacgtacaatgcttcgtgctgcctgatgacagccgggccagccgccagcgtacaagggttgtgcgacgcagcctcagccctgtgttcaatcacaccatggtgtacgatggctttgggcctgctgacctgcgccaggcttgtgccgagctctccctctgggaccatggggccctggccaaccgccagctggggggcacacgcctcagcctgggcaccggcagcagctatgggctgcaggtgccctggatggattccacacctgaggagaagcagctgtggcaagccctcctggagcagccgtgcgagtgggtggatggccttctacccctcagaaccaacctggcccccaggacgtagccccaccaagcctctctctctggacccccatctcagggcctgcccttggctaaagtcaataaagtctattctaagagc

SEQ ID NO: 69073 - DNA, 854 bp, Homo Sapiens
  misc_feature (74)..(74): n is a, c, g, or t
  misc_feature (127)..(127): n is a, c, g, or t
cagtcgacggtaccggacatatgcccgggaattcggccattacggccgggagacacctagtctaatggcctttntgggaaaaaacaaatcactaactcataatcatttatatccattattttctgcnataaatgtaatgctattgtacagggtttggtagaataaatattcagactgactaaactgttctaaatcctcacaaaaaagtccccaaacaacatgcctcctaaaaaacattttcctatcttttacaagaggtatgaacatttgtagggttccacatttgcatctagaaatccaatgctctttagaatgttattacgaatagaaagatggccaggatgacctttagtgttacatgatgttcagcaaattttaattcaaaccttgatatgcctggacactgaaaagtaaacgcatcacctcctattttataccctaccttctggttcccaattgggagagcacatagagggaaggagacaatatagaaactacggagtccgctggtagtgggctgcatggtgtgacagagcccttctctgtaaaatggaaatgacaccactagccatctcaatagttacaagaattaaaagagatacagtacctgaagtgcttagcgcatggtagcatttcataaatgtttagtgtcaatactaatgctctaataatgtaaattgttaataatttatttccctaatatcaggaaatcccagttgtctatgtggcccagtgcttaaaaacgccttcttgcatgaggggattgaactatacaatgtttgttaactttgtatttgtattttttcctataaaatcttaaaataaaattaggagatgtgttctgatgtaacagt

SEQ ID NO: 69074 - DNA, 941 bp, Homo Sapiens
  misc_feature (337)..(394): n is a, c, g, or t
  misc_feature (399)..(448): n is a, c, g, or t
  misc_feature (609)..(686): n is a, c, g, or t
ggaattactaaattttatttttccccagaactcttaaacttcagcttcaccaagtaacaggctgacttttggaataacaactctttcccaggctgttgttaactctttccaagagacagaatttattaaaaaacatggttccaggatatttccaccccagaattctaaatcagtcacagaatcataccttcttaggtcttgattagaatgaaacaatctatagacacacgtaacagaatcaaaatattatgtaatgttttttgccttctcttgctcaatacacttccctcttttcccccaaagagtttgttactcaaagatagatagatatgtaagnnnnnnnnnnnnnnnnnnnnnnnnnnnnnnnnnnnnnnnnnnnnnnnnnnnnnnnnnncaatnnnnnnnnnnnnnnnnnnnnnnnnnnnnnnnnnnnnnnnnnnnnnnnnnncttgaatttactgaacaccaagcactatgttgaatccatgcaaatgaagtgatgtgtaggtattttattaggcataagtcatcatcttcagatgatttaaagtacacaggaggatgtatgtaggttatatgcaaataccatataacccattctctataatnnnnnnnnnnnnnnnnnnnnnnnnnnnnnnnnnnnnnnnnnnnnnnnnnnnnnnnnnnnnnnnnnnnnnnnnnnnnnntattgcccttttcaagaaagcatctatcagctctcattcgtgactcactcagaataaggaattccttattcaaaaaacaatgtaagtattccgagctaactgttctcagccatgaacaaattaaacttggccaggtgtggtggctcatgcctgtaatctcggcactgtggaagtcaaggtgggaggactgcttaagcccaggagtttgagaccaggctgagcaaccaatgagaccccctccccggccaaaaaaaa

SEQ ID NO: 69075 - DNA, 941 bp, Homo Sapiens
  misc_feature (250)..(327): n is a, c, g, or t
  misc_feature (494)..(537): n is a, c, g, or t
  misc_feature (542)..(564): n is a, c, g, or t
ttggccggggagggggtctcattggttgctcagcctggtctcaaactcctgggcttaagcagtcctcccaccttgacttccacagtgccgagattacaggcatgagccaccacacctggccaagtttaatttgttcatggctgagaacagttagctcggaatacttacattgttttttgaataaggaattccttattctgagtgagtcacgaatgagagctgatagatgctttcttgaaaagggcaatannnnnnnnnnnnnnnnnnnnnnnnnnnnnnnnnnnnnnnnnnnnnnnnnnnnnnnnnnnnnnnnnnnnnnnnnnnnnnattatagagaatgggttatatggtatttgcatataacctacatacatcctcctgtgtactttaaatcatctgaagatgattacttatacctaataaaatacctacacatcacttcatttgcatggattcaacatagtgcttggtgttcagtaaattcaagttttgcnnnnnnnnnnnnnnnnnnnnnnnnnnnnnnnnnnnnnnnnnnnnattgnnnnnnnnnnnnnnnnnnnnnnntcatctgaagatgattacttatacctaataaaatacctacatatctatctatctttgagtaacaaactctttgggggaaaagagggaagtgtattgagcaagagaaggcaaaaaacattacataatattttgattctgttacgtgtgtctatagattgtttcattctaatcaagacctaagaaggtatgattctgtgactgatttagaattctggggtggaaatatcctggaaccatgttttttaataaattctgtctcttggaaagagttaacaacagcctgggaaagagttgttattccaaaagtcagcctgttacttggtgaagctgaagtttaagagttctggggaaaaataaaatctagtaattccagccta

SEQ ID NO: 69076 - DNA, 470 bp, Homo Sapiens
  misc_feature (137)..(214): n is a, c, g, or t
ttatgttgaatccatgcaaatgaagtgatgtgtaggtattttattaggtataagtaatcatcttcagatgatttaaagtacacaggaggatgtatgtaggttatatgcaaataccatataacccattctctataatnnnnnnnnnnnnnnnnnnnnnnnnnnnnnnnnnnnnnnnnnnnnnnnnnnnnnnnnnnnnnnnnnnnnnnnnnnnnnntattgcccttttcaagaaagcatctatcagctctcattcgtgactcactcagaataaggaattccttattcaaaaaacaatgtaagtattccgacccaactgttctcagccatgaacaaaaaaaactatggccaggtgtggtggctcatgcctgtaatctcggcactgtggaagtcaaggtgggaggactgcttaagcccaggagtttgagaccaggctgagcaaccaatgagaccccctccccggccaaaaaaaa

SEQ ID NO: 69077 - DNA, 986 bp, Homo Sapiens
cagtcgacggtaccggacatatgcccgggaattcggccattacggacggggatggcatcaaaagaataagagtattctattgagcattgaaacgcctttctggtaggcattgagggagatctagagagatgaaagatacatggaaatcatattatattgaaatataatatgatttgcattattgtgtgaggctttggctaaataacgttactgattgtaagcacctgaaggcaagggtttatccaccacatctttgtctgccatagcatttagtcctctgcatacaatgggctgtccataattactgtagattggactgaaaatcaaaaagtaccacaagataaatgcaaactcttggtgagcagagggagaacatgtactgagtttcttaggtttcatggctaatgcattggcacagctttcagtgtatccctgcagtccttccagatagtccctgccccatgcattgcagatggttgccaaagcccccctctgtcctggcacccagtgttcctccatcctgactccacgtattgcccccttgccactgcctgagtgcaccatagtgtccccatccccccactgcctggagttccccttgtgtacccccttatcagggcacgacctaactgtgccctgctggctgtgacctcctgaagacagacctggcttctccctgcatccagttccccagtatgtgctgtgggcatcctgagaagcctgaaaaagacagggccaggttaggcttgggtgagctgctttctgccttcttggtacacacagtaagcagtggagaggcgtgttacaccgtatctgttctatcctcatctaaatactgagaggctagttgggatagtaaatctttcttactacatatgcattaagtttaagtaaaatagaatattgtgtgaaaaaatgcactgttactaataaatggaataaacagatccatgaaataaaagaaaacatattttactgaaaaaaac

SEQ ID NO: 69078 - DNA, 1576 bp, Homo Sapiens
  misc_feature (339)..(427): n is a, c, g, or t
  misc_feature (1040)..(1040): n is a, c, g, or t
cgtcgctcttcctctcttttcagtttttgcctcccattaataatgcaaatagtacagaaaatgaccctcagcagttgttacccagatcttccaactcctctgtcagtggcaccaagaaagaagattctacagcaaagattcatgctgtcactcactcatcaacaggagagccgctggcttatatcgctcagccaccactcaaccgcaagacttgtccaagctctgctgtcaactcagatcgaagtaaagggaatgggaaatctaatcacaggacacagtctgcatatatctcaccagtgacttcaacatactgtctttcccctcgacagaaagaactannnnnnnnnnnnnnnnnnnnnnnnnnnnnnnnnnnnnnnnnnnnnnnnnnnnnnnnnnnnnnnnnnnnnnnnnnnnnnnnnnnnnnnnntgacatagtatttaaagcgtggttgcaaaagaaaagagagcaggtcttagaaatgaggagaattcagcgagcaaaggaaattgaagacatgaacagtagacaggaaaacagagatccacaacaagcttttcgattatggcttaaaaaaaagcacgaagagcagatgaaagaaagacagacagaagaactaagaaagcaagaggaatgtttattcttccttaaaggaacagaaggccgggaaagggcctttaaacaatggttaagaaggaaacggatggaaaaaatggcagagcaacaagctgtcagagagagaactagacagctccgactagaagctaagcgttctaaacagttacagcaccacctatatatgtcagaagccaaaccttttcgttttactgatcattataactgaaagtttctattaaatatttcagtgggcagctgctatcaaaattttggatatgatttcttagggtctgtgtactttggttgtattctaaattatggaaatggtatttatcttttattgacagtgaatttgtttttttaatactagaacaaaataaatttttttctcacaagtgttgtatgtgttgtgccatctcttagnctgtgcaacaaattgaacaacgaatgaattctatgtccttctacttctaaattattttattaacgtttttaggaaaaaacacaagaaagggacagatttctattcatacttcctattatttttaaaaaattacaatggaacatttcataaggctgaaggagtgactccttaaacaagcctggttcaaggccttaaagccctatttatgtcaactttggatttgaataatcatggcaagctaagcaatagggtaggcctaattccacccgttagtcccttaaaaaatacaccctatatgtgagagctaaacattgtgtattcatggacataaagatgtccccagtagacactggggactcctgggggtgagggaagggagcaagggttgaaaaactaactattgggtactatgttctttacctgggtgatgggaccaatcatacccggaccctcagcaacatgcaacatacccatgtaactaacgcacatatgtatccccgaatctgaaataaaacttgaaatgataaaatagcaaa

SEQ ID NO: 69079 - DNA, 681 bp, Homo Sapiens
  misc_feature (320)..(350): n is a, c, g, or t
tggagacgggggaggggctggcagcccctcgcccaccagcgcctcccctcaccgactttggcctttttagcaacagacacaaggaccaggctccggcggcagcgggggtcacatacgggttccctcaccctgccagccgcccgcccgcccggcgcagatgcacgcggctcgtgtatgtacatagacgttacggcagccgaggtttttaatgagattctttctatgggctttacccctcccccgcggaactccttttttacttccaatgctagctgtgacccctgtacatgtctctttattcacttggttatgatttgtannnnnnnnnnnnnnnnnnnnnnnnnnnnnnnaatttataacagtcccactcacctctatttattcatttttgggaaaacccgacctcccacacccccaagccatcctgcccgcccctccagggaccgcccgtcgccgggctctccccgcgccccagtgtgtgtccgggcccggcccgaccgtctccacccgtccgcccgcggctccagccgggttctcatggtgctcaaacccgctcccctcccctacgtcctgcactttctcggaccagtccccccactcccgacccgaccccagccccacctgagggtgagcaactcctgtactgtaggggaagaagtgggaactgaaatggtattttgt

SEQ ID NO: 69080 - DNA, 2150 bp, Homo Sapiens
  misc_feature (2023)..(2057): n is a, c, g, or t
tagagctgagaataaatcatgtgaaacctgtaacattttatttgttaaaaatgaacagcttcagaatagatctaaatgtaacttttccaaaaaacaccaaaaagtacagtgtaaagcacctcctcgttaaatacaaactttcatttggtgatgcacggcaccaatgttttgcatataccttgatgcaaagaaaagtttaagttgcatcctgtttttaaaaaaaaccgaaacttaagaactgaacaaggattacaaccacattccaataaagaaaattttccttcaacaaagcatattgttttgtttatatacaatatgtgaccaccaagagttttaatttagttgtaccaaaggcaaaacattatacttaaaattaaattacagatgcatgaagaataaaagtttaatgtatcaaagataatttgttatttaatgcactcaatgtcagtatttggggcaatttttaaagttttcccaaaaaatggcatgaatagctctatacaataataggtaagaacaggaaaatgaaaacacctttataccatattttcacaaaccattctaaagacagcaaacttgagctcagctgcttttccttgctttaaaataagctaccagtaattctaaatcagactaaaatgtactgttcctagaccaaatacaggcattcatccttgcaaaaatgttttgcaatgagttcttggcctatatgaaaagcatcaaatagctaaggagagactagaatttatttccaaattctgtgactgacttccaataatcccttatcagtacgagtaccaggaaaatatcagatattaaagatcagatttaattctttggtataagcatgaaactgttactgatagctttccatggcgagcataaaccatgaagcaactcaagaagcatgagagacaacaatgaaatctagtatacaatgcagggcaggccaagaacgatgtctgctttacaggaaaagtcaacactaacaatctactcctgagaaactaacacctatttagatgtttttaacataatggcaaactaaaatgtcaagcttcaaaatgaccaaacttgtaacgtacagctggaagattttgctgcatttggcattatactgtaatttacagtatacaacatctggggactcagtactatcttagcacagactaacttctcccactccgtcagaggtggcaggtggcgggtcggtggggagggccttttctccccataaatgcctgaactttaatttataccatataagaaatcagtgaaaggtaaacaacaaggttaatgtaactctattataaattttgcattttttttctctgtgacatatacaagtatatttttgtttttggagctataaattatttaatttagcaatcttcaaagctcataaatttcaacttttcaaataagaaattttaacttcaaataagaagtctaggactttatggctattaattttactatcaaaatatccaagggactccattcaatgtaatagttataattcttctaaataatcattttgaataattctttgtggacgctagactcaagactatgctacatccaaacagtacatctataaccagggttttgaagtgtttcatctcaactacctgtccttcaacttgctacttacttcctctcatgccttcatttattaaacacaaactgtcattttttaaaactggaccttctcctccaaggccctatcagataactttgtgaatatgcatttacagtctctaaacaccaacattttaaactaagactaatacctagggccacatttcctgttaaaagctcagcactaaagctgtgtaattccaggggactttacaccgtctgaaagaggaagcacgttctggatgtccccctaagtcttcaaacccacagctggaaattctaatacattgttctgtgtctctaatgaagaaaaggcaacggcactgactaccccggccgtaatggccgaattcccgggcatatgtccggtaccgtcgactgnnnnnnnnnnnnnnnnnnnnnnnnnnnnnnnnnnncgccgcttcctcgctcactgactcgcttggccggcttccgggttccgtttcacgggctaataaaaaccgggccgcaatgccgctcgccatatg

SEQ ID NO: 69081 - DNA, 1083 bp, Homo Sapiens
  misc_feature (58)..(68): n is a, c, g, or t
agaaccccaggtctacttttgaaattttgtattataattgtaatgttgcccatggttnnnnnnnnnnngtgttcagtgatctatgtctcctactactcctatttctctgtttttcctctgcaggagcttgctgctgttaacagttattcttccaagttgttttctttgtggggagatgggaggtgggaggaaatataaacatatatgtatagatctttcaaaatatatgacggtatacccgtatgttctgagtcttgctgtttttacctggtaatatttagaaacatttattttgagataaaggagagcacttttaagttgaacctgtagttttaaaaagtacatttcaagtaagccaaagcagagaagtaaatgtatttttcattgttgtatcagaattttgaatttactattttaaaaattcaagagttttgtagctgatctatttcttcccctcagccatcccaaataggtcatttgtcaacagatttaagaatgtttagaaacaacaactttgggaaacgggaaacaatttggtataagtgggtgtgccataacctctctcgtagccattcattcccggatacataccctagagaaactcttacacatgcgtaccaggggatggatttaagcatttgtgtgtaataggaagaaaagaagaaaaaacccgggaagatcccaagtgtccaccaacagtgtgttggataaatactgtggtatattccaacagtggaattccacagaagtgaaactgaactgcagctatgtatgtgaacatggacaaaactcaacaatagaaggatcaaaaaaagcaagtcacagaagaatacatcactatggttccatttcaatgaaagtcaaaaacaggctgtcaaatacatgataaaaggaaacgattaagacaaaatttaatgttagccgttttgatggagggagaggtgatcatgagggcacaggggtcttcagaagaactggtgagggtctgtttctgaagcctgtgggcatttccttttttaatctgtatgtttatgtgcttttgtatgtatgatatttcttaataaaatttaaaaagaagaatgg

SEQ ID NO: 69082 - DNA, 1513 bp, Homo Sapiens
tcaacattcaggctaggtacgaggcctgggtggtgaattcggcacgaggcggcggccggtgagggggaagcaagtctggtctctgtgattgaagaagtcggctctgggctccagtgcgggaatcacacacatacctcagaatgccgggtctaagttgtagattttatcaacacaaatttcctgaggtggaagatgtagtgatggtgaatgtcagatccattgctgaaatgggggcttatgtcagcttgctggaatacaacaacattgaaggcatgattcttcttagtgaattatccagaaggcgtatccgttctatcaacaaactcatccgaattggcaggaatgagtgtgtggttgtcattagggtggacaaagaaaaaggatatattgatttgtcaaaaagaagagtttctccagaggaagcaatcaaatgtgaagacaaattcacaaaatccaaaactgtttatagcattcttcgtcatgttgctgaggtgttagaatacaccaaggatgagcagctggaaagcctattccagaggactgcctgggtctttgatgacaagtacaagagacctggatatggtgcctatgatgcatttaagcatgcagtctcagacccatctattttggatagtttagatttgaatgaagatgaacgggaagtactcattaataatattaataggcgcttgaccccacaggctgtcaaaattcgagcagatatttgaagtggcttgttatggttatgaaggcattgatgctgtaaaagaagccctaagagcaggtttgaattgttctacagaaaacatgcccattaagattaatctaatagctcctcctcggtatgtaatgactacgacaaccctggagagaacagaaggcctttctgtcctcagtcaagctatggctgttatcaaagagaagattgaggaaaagaggggtgtgttcaatgttcaaatggagcccaaagtggtcacagatacagatgagactgaacttgcgaggcagatggagaggcttgaaagagaaaatgccgaagtggatggagatgatgatgcagaagaaatggaagccaaagctgaagattaactttgtgggaaacagagtccaatttaaggaacacagagcagcgcttcctggctgtaaatcctagacttgaaagttttccagtattgaaaacttcaaagctgaatattttttatttctaagtatttaaatgttctaacagatcagaacatgaaatgccctcctaaatgtcagctgttgtcacacagtagctccaacactttgagcatttttaagggagtggcctcatttcactagagacaaatctttaagaatagttctaaaattgggcttgtgatttccatttctgatgtctccagattggcacccctttctagttcaatgcctcacgagatttgccaggggcatccaaggcaaacaatcccaatctttctatataaaatgtattcaagcaaacatcaaataaatttctgggatatttaaaaaa

SEQ ID NO: 69083 - DNA, 611 bp, Homo Sapiens
accaaggacaactctgcatgagatgtagacttaagctttatccctactaggcttgctccactttcatcctccactatagatacaacggactttgactaaaagcagtgaaggggatttgcttccttgttatgtaaagtttctcggtgtgttctgttaatgtaagacgatgaacagttgtgtatagtgttttaccctcttctttttcttggaactcctcaacacgtatggagggatttttcaggtttcagcatgaacatgggcttcttgctgtctgtctctctctcagtacagttcaaggtgtagcaagtgtacccacacagatagcattcaacaaaagctgcctcaactttttcgagaaaaatactttattcataaatatcagttttattctcatgtacctaagttgtggagaaaataattgcatcctataaactgcctgcagacgttagcaggctcttcaaaataactccatggtgcacaggagcacctgcatccaagagcatgcttacattttactgttctgcatattacaaaaaataacttgcaacttcataacttctttgacaaagtaaattacttttttgattgcagtttatatgaaaatgtactga

SEQ ID NO: 69084 - DNA, 1546 bp, Homo Sapiens
  misc_feature (122)..(131): n is a, c, g, or t
taagtctatgaagaggccccggcttatccccgagaggcctgagtgccccgcgccggtggcgagggggttagccaatgttcctggctgcggcgccactccctcggttccacgagaggaagagnnnnnnnnnnccagacgcttccgccggctcgcgccctccgggcccagcctcccgagccttcggagtcgggctgcctgtcccagcccagctccggggaaacgcgatgcctgcgatgcctggggggtgctcccggggccccgccgccggggacgggcgtctgcggctggcgcgactagcgctggtactcctgggctgggtctcctcgtcttctcccacctcctcggcatcctccttctcctcctcggcgccgttcctggcttccgccgtgtccgcccagcccccgctgccggaccagtgccccgcgctgtgcgagtgctccgaggcagcgcgcacagtcaagtgcgttaaccgcaatctgaccgaggtgcccacggacctgcccgcctacgtgcgcaacctcttccttaccggcaaccagctggccgtgctccctgccggcgccttcgcccgccggccgccgctggcggagctggccgcgctcaacctcagcggcagccgcctggacgaggtgcgcgcgggcgccttcgagcatctgcccagcctgcgccagctcgacctcagccacaacccactggccgacctcagtcccttcgctttctcgggcagcaatgccagcgtctcggcccccagtccccttgtggaactgatcctgaaccacatcgtgccccctgaagatgagcggcagaaccggagcttcgagggcatggtggtggcggccctgctggcgggccgtgcactgcaggggctccgccgcttggagctggccaacaaccacttcctttacctgccgcgggatgtgctggcccaactgcccagcctcaggcacctggacttaagtaataattcgctggtgagcctgacctacgtgtccttccgcaacctgacacatctagaaagcctccacctggaggacaatgccctcaaggtccttcacaatggcaccctggctgagttgcaaggtctaccccacattagggttttcctggacaacaatccctgggtctgcgactgccacatggcagacatggtgacctggctcaaggaaacagaggtagtgcagggcaaagaccggctcacctgtgcatatccggaaaaaatgaggaatcgggtcctcttggaactcaacagtgctgacctggactgtgacccgattcttcccccatccctgcaaacctcttatgtcttcctgggtattgttttagccctgataggcgctattttcctcctggttttgtatttgaaccgcaaggggataaaaaagtggatgcataacatcagagatgcctgcagggatcacatggaagggtatcattacagatatgaaatcaatgcggaccccagattaacgaacctcagttctaactcggatgtctgagaaatattagaggacagaccaaggacaactctgcatgagatgtagactta

SEQ ID NO: 69085 - DNA, 1828 bp, Homo Sapiens
  misc_feature (149)..(158): n is a, c, g, or t
  misc_feature (175)..(267): n is a, c, g, or t
  misc_feature (343)..(351): n is a, c, g, or t
  misc_feature (377)..(390): n is a, c, g, or t
  misc_feature (399)..(543): n is a, c, g, or t
  misc_feature (1642)..(1668): n is a, c, g, or t
tgggggaaaaattatttttccccaacgcgccccaagggttttttatatcccgggggggttttaagggtttattaaacccgttgtgggggggttccccaccgggcgggaaaacttttaaagattccccccagttctccaaaaaaagccannnnnnnnnnaattttaaataagaccnnnnnnnnnnnnnnnnnnnnnnnnnnnnnnnnnnnnnnnnnnnnnnnnnnnnnnnnnnnnnnnnnnnnnnnnnnnnnnnnnnnnnnnnnnnnntggggaaaccaacccccagcttttacccgggtttttttgggaccacgatagccccttttccctttcctccgggggnnnnnnnnnaaacaaaagttttaaaaaattttttnnnnnnnnnnnnnnccgccaaannnnnnnnnnnnnnnnnnnnnnnnnnnnnnnnnnnnnnnnnnnnnnnnnnnnnnnnnnnnnnnnnnnnnnnnnnnnnnnnnnnnnnnnnnnnnnnnnnnnnnnnnnnnnnnnnnnnnnnnnnnnnnnnnnnnnnnnnnnnnnnnnggaatgattaaagatgtctttataaagtttttttcaagacttcattctaaatacacagaataaaaaatggtgtcagctcacttgtaagacaccaaccagattttccttatactgtctcaaaatttaaagatcaatttccccagagggtgtgcaatgcatcataaaatggcccttttttgaggatgggagaggaagggttgggcaggatggaatattaaattgtaacatgataaacatgcaagactgttatccaatctagataatttatatacattttgatgacttaggaaaacaaagcaatcatttgtgacaagcctaaaaagcttgacatatttaacatacttaggaactttttttgtgcggtgggaattctctaattgtatcatgtgggccttttgaaagtaacaaacagaaggccagtctgttgcaagtttgctgctgaacatcacattccaccctaagaaaacacaaggtggattgcatcgagggtggataccttaccttagcacagaaggaaaaagtatgtcagtgcaaagtatggactaaactgctttcaggaaaaaagttgtaaaaattgatacaggttggaaaagggaattttccttcccggcttggagtcctcccaatttaaggcagaacccatccactccaatttctgcagtttaaaactttctctacttatttagttttctcctctgagttcaaccgctgctggattcgtttggcataactttgtgccatggagttaatgatagataggatgaagtaacacaccatgacaacgaccaacttttcaaacatccaggacaaccagttttctccctgtggtgtgcccatttcgcttttgtggtgaagcttctgccgttgagcctccaggtactcctgaaatggcttctgcagagatggacctatgccggggacagcactggaagcagggtacagtagcccaaagaaaaagacacatttgggaagaaaagcaggaaaaacgttaaagaaaatgtacttaccacctggactcaaaaggcagggattggataggaagaggaataaaatataaaaatcagagaactgctgaaattctgtgacccctttttagttnnnnnnnnnnnnnnnnnnnnnnnnnnntttactccatctaacaaccccttaaaaaccaaaatctctcccaccaacatgtctgggagaaaccaagagctgtaaatcagaaaccgcttccagcaaaagagttagtcctcagagtaaggtcagctcagctgatactgtactttggtatggcacaaagaat

SEQ ID NO: 69086 - DNA, 679 bp, Homo Sapiens
gacgttggattcatttatttccatatgcaatgtaatgtttaggcacgctgcttgggatgctacttctaaaaaaattgttggccatttttcagaatatccttttggttttaaatactggtcaggaaaaacaaatgatgtaaaaatacgtgaataattttctattacagaaatgaaaaactgatttgcatctaaaagtgcaagaggtgaagtaatttaaccctttcaccagacgatatggcaatatacaatatattgcttgagctgtttgagaaggctgtgatgtatttttgtattgacatagaaaattataaattacattgaattagtatccataatcactatatatatacacaaaccagttctaaaaaaatacactggtttaaatttatgagtgaaaacctcacaaggtacagtaaacaattagcatgcttcggtgccagattttgatttctacttttaaaatactagcctgtaaaatgaacgcactctaattccattagcagcacgagcattttcaactgacttgcctaataggatttattttaggtctgttaaatatgcagattgctctgaaatgttcattggtgatgcttgttaacaaggtaaattttggtgaatgggttaaaaggcagatgaactaccaaatgaaacaaataatcaaacaaaaacaaaagccaaa

SEQ ID NO: 69087 - DNA, 729 bp, Homo Sapiens
ttatttctgatttcctttttcattttaagtggtgtggagattccagcactcccaggacagtggagtcagcagtaagccctgggacaggtggcaagggtgggtcccttgacctttgcacgccttctcaggaaccccctttcccgggtgagcccctctctgaagagactgtccttgggcctcctctggaagcagcacccccagaggacagggctcctcctgcttgcctcagggctgcctgacttgaatggcgttggacctcggggattactggtagataatatgctctggtctcgcctggtggtgagttttgccagccatggccagggtttggctccactggtggcacacgtggcctccgtggtatggacctggtggcttctccatcccactgtggcctctgtggtatggacctggtggcttctccatcctacccaaggtaacagtgtcttgcttcatcccactgactgctgggagagagcctctgggacttttctttggggcatcattttgttttgtctttcgtagcagggaaaggatatgacaatggggaggacagttcttttggaggttggaggggccaagccaaggacaggagcaagtgtgccctcattttgtttctacttttaatttctgtgtgttggccatactgaattatgagactaacagatgtctacaatacaatacctgtattcaaaataacaaaaataaagcctgattctttgtttctag

SEQ ID NO: 69088 - DNA, 1022 bp, Homo Sapiens
  misc_feature (536)..(545): n is a, c, g, or t
  misc_feature (701)..(710): n is a, c, g, or t
acattgtactatgaacagctggtacaaaaagcaggctggtacggtccggaatccgggataatcgtcgacccacgcgtcgccacattatccagttggaattacttattaaggagaattggaaatacatatgcccatgcttaaattttatagctttaatttgtgttatttctttattgacgggaagaggtacatctttttttccttactgaaaacaaatatggattaattgcctcaaattgtataagtgatggctagtgattcttgttttcagaagggagagtggtatagatagaaaatgacaaagatggcaatatacacttaatgttgttattgtatgttgttactgaagtacttagatttttaaaatttcaaatcctaaatcacttcttgtaggagggttttcattaactgcagtatatacagttcactacatatgggttgtttgagtttttgtgtgctgtatttctttctgttttttaatacctggttttgtacatatctaactctgttctcttttggttgttcagaaactggannnnnnnnnncttaagcagtgcttaatttgtgttttttaattttgattcagaagtagtcccagctcataggtgttcatactgttacatccagaacatttgtcaggctctctgtcagctttcatgtacatatggtatagaaaccatggagttaggcacttcctggannnnnnnnnnatgagaaaaatactgtatttaaaatgtaaaataaacttttaaaaagcaggcactaatatatatttcttccagcctttgattacaaatttgtccttgcacatgttaagatgaattatctcctaaaaatatcattgttcttgggagcagtgtatgttactttacatagcagcggttcctgtcatgtgttcatgtcagaatatttttggttttaaactttcttattgcctttggctgttgattagtacagtacaagtgcgatttcaaaaagatcttgaaagtaatatatttaatcaattaaaatgtttatctgta

SEQ ID NO: 69089 - DNA, 1207 bp, Homo Sapiens
gaggagcccggctgagggaggatgcgccgctgacgcctgcgggagccgcgcgcctggggcgggaggatgctccagaggggcctctggccgtggcgcacgcggctgctgccgacccctggcacctggcgcccagcgcgcccgtggccgctgccgcctccgccccaggttttgcgtgtgaagctgtgtggaaatgtgaaatactaccagtcacaccattatagtaccgtggtgccacctgatgaaataacagttatttatagacatggccttcccttggtaacacttaccttgccatctagaaaagaacgttgtcaattcgtagtcaaaccaatgttgtcaacagttggttcattccttcaggacctacaaaatgaagataagggtatcaaaactgcagccatcttcacagcagatggcaacatgatttcagcttctaccttgatggatattttgctaatgaatgattttaaacttgtcattaataaaatagcatatgatgtgcagtgtccaaagagagaaaaaccaagtaatgagcacactgctgagatggaacacatgaaatccttggttcacagactatttacaatcttgcatttagaagagtctcagaaaaagagagagcaccatttactggagaaaattgaccacctgaaggaacagctgcagccccttgaacaggtgaaagctggaatagaagctcattcggaagccaaaaccagtggactcctgtgggctggattggcactgctgtccattcagggtggggcactggcctggctcacgtggtgggtgtactcctgggatatcatggagccagttacatacttcatcacatttgcaaattctatggtcttttttgcatactttatagtcactcgacaggattatacttactcagctgttaagagtaggcaatttcttcagttcttccacaagaaatcaaagcaacagcactttgatgtgcagcaatacaacaagttaaaagaagaccttgctaaggctaaagaatccctgaaacaggcgcgtcattctctctgtttgcaaatgcaagtagaagaactcaatgaaaagaattaatcttacagttttaaatgtcgtcagattttccattatgtattgattttgcaacttaggatgtttttgagtcccatggttcattttgattgtttaatctttgttattaaattcttgtaaaacagaaaaaaaa

SEQ ID NO: 69090 - DNA, 999 bp, Homo Sapiens
cagtcgacggtaccggacatatgcccgggaattcggccattacggccgggtctgagggaaggtgagggagtgggaagggggatggagagctcgaggggacagtgtgtttgagctggagtgctgcgggcagcctttctcatggaatgacatgaatcaacttttttctttgtttcatcttttaagtgtacgtgcttgcctgttcgtgcatgtgttcataaactcaacactttaatcatggtttcatgagcattaaaaagcaaagggaaaaaggatgtgtaatggtgtacacagtctgtatattttaataatgcagagctatagtctcaattgttactttataaggtggttttattaacaaacccaaatcctggattttcctgtctttgctgtattttgaaaaacacgtgttgactccattgttttacatgtagcaaagtctgccatctgtgtctgctgtattataaacagataagcagcctacaagataactgtatttataaaccactcttcaacagctggctccagtgctggttttagaacaagaatgaagtcattttggagtctttcatgtctaaaagatttaagttaaaaacaaagtgttacttggaaggttagcttctatcattctggatagattacagatataataaccatgttgactatgggggagagacgctgcattccagaaacgtcttaacacttgagtgaatcttcaaaggaccctgacattaaatgctgaggctttaatacacacatattttatcccaagtttataatggtggtctgaacaaggcacctgtaaataaatcagcatttatgaccagaagaaaaataatctggtcttggactttttatttttatatggaaaagttttaaggacttgggccaactaagtctacccacacgaaaaaagaaatttgccttgtccctttgtgtacaaccatgcaaaactgtttgttggctcacagaagttctgacaataaaagatactagctaaaa

SEQ ID NO: 69091 - DNA, 2231 bp, Homo Sapiens
tggaccggtccggattcccgggatatcgtcgaccacgcgtccggggacataaatctcaacttgctcaaagacaaaggctataccacccttcaggatgaggccatcaagatattcaattccctgcagcaactggagtccatgtctgacccaattccaataatccagggcatcctacagacagggcatgacctgcgacctctgcgggacgagctgtactgccagcttatcaaacagaccaacaaagtgccccaccccggcagtgtgggcaacctgtacagctggcagatcctgacatgcctgagctgcaccttcctgccgagtcgagggattctcaagtatctcaagttccatctgaaaaggatacgggaacagtttccaggaaccgagatggaaaaatacgctctcttcacttacgaatctcttaagaaaaccaaatgccgagagtttgtgccttcccgagatgaaatagaagctctgatccacaggcaggaaatgacatccacggtctattgccatggcggcggctcctgcaagatcaccatcaactcccacaccaccgctggggaggtggtggagaagctgatccgaggcctggccatggaggacagcaggaacatgtttgctttgtttgaatacaacggccacgtcgacaaagccattgaaagtcgaaccgtcgtagctgatgtcttagccaagtttgaaaagctggctgccacatccgaggttggggacctgccatggaaattctacttcaaactttactgcttcctggacacagacaacgtgccaaaagacagtgtggagtttgcatttatgtttgaacaggcccacgaagcggttatccatggccaccatccagccccggaagaaaacctccaggttcttgctgccctgcgactccagtatctgcagggggattatactctgcacgctgccatcccacctctcgaagaggtttattccctgcagagactcaaggcccgcatcagccagtcaaccaaaaccttcaccccttgtgaacggctggagaagaggcggacgagcttcctagaggggaccctgaggcggagcttccggacaggatccgtggtccggcagaaggtcgaggaggagcagatgctggacatgtggattaaggaagaagtctcctctgctcgagccagtatcattgacaagtggaggaaatttcagggaatgaaccaggaacaggccatggccaagtacatggccttgatcaaggagtggcctggctatggctcgacgctgtttgatgtggagtgcaaagaaagtggcttccctcaggaactctggttgggtgtcagcgcggacgccgtctccgtctacaagcgtggagagggaagaccactggaaatcttccagtatgaacacatcctctcttttgggggcacccctggcgaatacgtataagatcgtggtcgatgagagggagctgctctttgaaaccagtgaggtggtggatgtggccaagctcatgaaagcctacatcagcatgatcgtgaagaagcgctacagcacgacacgctccgccagcagccagggcagctccaggtgaaggcgggacagagcccacctgtctttgctacctgaacgcaccaccctctggcctaggctggctccagtgtgccatgcccagccaaaacaaacacagagctgcccaggctttctggaagcttctggtctgagggaggtgtctccgaggatccttttgcctgccgccttcattgatcctgtattaagctgtcaactttaacaagtctgcacagtttccaaagctttactactcttagaggacacatgccttaaaaaaggaggggaggaaccacgctgccaccaaagcagccggaagtgccttaacttgtggaaccaacactaatcgaccgtaactgtgctactgaagggaactgcctttcccccttctgggggagacttaacagagcgtggaaggggggcattttctgtcaatgatgcactaacctcccaacctgatttccccgaatttgagggaaggtgagggagtgggaagggggatggaaagctcgaggggacagtgtgtttgagctggagtgctgcgggcaccctttttcatggaatgacatgaatcaacttttttctttgtttcatcttttaagtgtacgggcttgcctgttcgggcatgtgttcataaactcaacactttaatcatggtttcatgagcattaaaaagcaaaggg

SEQ ID NO: 69092 - DNA, 584 bp, Homo Sapiens
atctcagctatgctgaaacctgtttggaaaaacatgatttaactttagaaaataaaacttttaatacttaagagataacatgatgcaaacgttgcttgttggcctgactttccaggactaagaccctctgggaatcaactggggctcggtgacatggcgtaacctgctactggggtgtggtctcagacacaaaatcacactggatgttggtctacagaggcaggattctctcattgctggatgactcttgaaatgaagcctttgcctttgttacacatttggctttacaatcttcattgacaaatagttcggcaaagagtagaggagcacggccacgaagagcagcaggataagcaggaacagcacctccagaacagtgccccggatgaccagaggccccttgaaaaggaggggtttggggacagggactgtgtccatgaaacattccatcttcttggtgaaggcaaggggttggttcttcacgtcaggatgttaatggagctggaagttcagaaaaagcctggtgaagtgacccttggcctttcacttcttgagaaacatacttctttgctgggcaaaaaaaa

SEQ ID NO: 69093 - DNA, 2259 bp, Homo Sapiens
cagaatttgagggcctgacagacttctcagatacgttcaagttgtaccgaggcaagtcggatgaaaatgaagatccttctgtggttggagagtttaagggctcctttcggatctaccctctgccggatgaccccagcgtgccagcccctcccagacagtttcgggaattacctgacagcgtcccacaggaatgcacggttaggatttacattgttcgaggcttagagctccagccccaggacaacaatggcctgtgtgacccttacataaaaataacactgggcaaaaaagtcattgaagaccgagatcactacattcccaacactctcaacccagtctttggcaggatgtacgaactgagctgctacttacctcaagaaaaagacctgaaaatttctgtctatgattatgacacctttacccgggatgaaaaagtaggagaaacaattattgatctggaaaaccgattcctttcccgctttgggtcccactgcggcataccagaggagtactgtgtttctggagtcaatacctggcgagatcaactgagaccaacacagctgcttcaaaatgtcgccagattcaaaggcttcccacaacccatcctttccgaagatgggagtagaatcagatatggaggacgagactacagcttggatgaatttgaagccaacaaaatcctgcaccagcacctcggggcccctgaagagcggcttgctcttcacatcctcaggactcaggggctggtccctgagcacgtggaaacaaggactttgcacagcaccttccagcccaacatttcccagggaaaacttcagatgtgggtggatgttttccccaagagtttggggccaccaggccctcctttcaacatcacaccccggaaagccaagaaatactacctgcgtgtgatcatctggaacaccaaggacgttatcttggacgagaaaagcatcacaggagaggaaatgagtgacatctacgtcaaaggctggattcctggcaatgaagaaaacaaacagaaaacagatgtccattacagatctttggatggtgaagggaattttaactggcgatttgttttcccgtttgactaccttccagccgaacaactctgtatcgttgcgaaaaaagagcatttctggagtattgaccaaacggaatttcgaatcccacccaggctgatcattcagatatgggacaatgacaagttttctctggatgactacttgggtttcctagaacttgacttgcgtcacacgatcattcctgcaaaatcaccagagaaatgcaggttggacatgattccggacctcaaagccatgaacccccttaaagccaagacagcctccctctttgagcagaagtccatgaaaggatggtggccatgctacgcagagaaagatggcgcccgcgtaatggctgggaaagtggagatgacattggaaatcctcaacgagaaggaggccgacgagaggccagccgggaaggggcgggacgaacccaacatgaaccccaagctggacttaccaaatcgaccagaaacctccttcctctggttcaccaacccatgcaagaccatgaagttcatcgtgtggcgccgctttaagtgggtcatcatcggcttgctgttcctgcttatcctgctgctcttcgtggccgtgctcctctactctttgccgaactatttgtcaatgaagattgtaaagccaaatgtgtaacaaaggcaaaggcttcatttcaagagtcatccagcaatgagagaatcctgcctctgtagaccaacatccagtgtgattttgtgtctgagaccacaccccagtagcaggttacgccatgtcaccgagccccattgattcccagagggtcttagtcctggaaagtcaggccaacaagcaacgtttgcatcatgttatctcttaagtattaaaagttttattttctaaagtttaaatcatgtttttcaaaatatttttcaaggtggctggttccatttaaaaatcatctttttatatgtgtcttcggttctagacttcagcttttggaaattgctaaatagaattcaaaaatctctgcatcctgaggtgatatacttcatatttgtaatcaactgaaagagctgtgcattataaaatcagttagaatagttagaacaattcttatttatgcccacaaccattgctatattttgtatggatgtcataaaagtctatttaacctctgtaatgaaactaaataaaaatgtttcacctttttaac

SEQ ID NO: 69094 - DNA, 951 bp, Homo Sapiens
  misc_feature (729)..(729): n is a, c, g, or t
  misc_feature (756)..(757): n is a, c, g, or t
  misc_feature (767)..(767): n is a, c, g, or t
  misc_feature (837)..(837): n is a, c, g, or t
tctttttatttttattttagattctggggtacatgtgcaggcttgttacatgagtatattgtgtgctgctgaggtttggacttctaacgaacccatcacccaaatagggaacatagtattcaataggtagctttttaacccctgcccctcttcctccttgccccccttttggagtcctcagtgtttatttctccagtctttatgtccaagtgcacacttattttaaacctagtttccagaccttgtggttgtcccatcagatgggtatgaaggtaccatggaacccataaggcatctgcacaggtacctctgctcggcccagctcttcaaagttcttggcatccaaaactaggagaaaattgctttcattctggttgggagtgatcaccacagaaagaataaccccaccatcttcttcattggttcctggtgctggaacaaaaacaggttctgagggataaaagccatcttctctccaaaccttcagtgtcttattcaccacatcaaccttgatcagagaatcccccactaaatgccgaaagccacagccataaaagaaatgatactttttgccactgaatcgatcatagtagatctgaggaaattcaatgcctccttccttttctaggtcctcctgatgtagattttcatgagagaacagatcgttcatcagcctgtttcacagcactggctgaagtataggaaatggactcaggttgtctccctcangggcattcaactgacattttaaggcannacaacttcgnaggaagattgggtgctgattatggactgataagccttcccagcttctgagatctgtactggtaactctanggtctccctcgtgcgattctggctcgaggcaatcctaaggagtcgataatcgtatcagcaactgttctgtgtgatgtatcgtcacatcaacacaacagcggacataggtagctg

SEQ ID NO: 69095 - DNA, 4216 bp, Homo Sapiens
  misc_feature (70)..(125): n is a, c, g, or t
  misc_feature (1742)..(1756): n is a, c, g, or t
  misc_feature (2156)..(2165): n is a, c, g, or t
  misc_feature (3201)..(3215): n is a, c, g, or t
  misc_feature (3840)..(3840): n is a, c, g, or t
  misc_feature (3931)..(3931): n is a, c, g, or t
  misc_feature (3938)..(3938): n is a, c, g, or t
  misc_feature (3951)..(3951): n is a, c, g, or t
  misc_feature (3994)..(3994): n is a, c, g, or t
  misc_feature (4042)..(4042): n is a, c, g, or t
  misc_feature (4049)..(4049): n is a, c, g, or t
  misc_feature (4205)..(4205): n is a, c, g, or t
tccttcggctgcgggccggctcggctacgcgctctgctccgagccgctcactgcatggtagagtctggtnnnnnnnnnnnnnnnnnnnnnnnnnnnnnnnnnnnnnnnnnnnnnnnnnnnnnnnntcctgccctgcagccaccgccaccgcctgtgtcgccgccgcctcgggaccggctgtatgattaggccacaatcttcaatgagtaaacatattcctcaattctgtggtgttcttggtcacacatttatggagtttctgaagggcagtggagattactgccaggcacagcacgacctctatgcagacaagtgaactgtagaaactgattactgctccaccaagaagcccccataagagtggttatcctggacacagaagtgttgaattgaaatccacagagcattttacaagagttctgacctggatggggtaaacctcagtgcacttcttttctgttggcctcagtattactggattgaagaattgctgcttcttgttaggaggttcatttcacttatcattacttacaacttcatactcaaagcactgagaatttcaagtggagtatattgaagtagacttcagtttctttgcatcatttctgtattcaatttttttaattatttcataaccctattgagtgttttttaactaaattaacatggctcgaatgaaccgcccagctcctgtggaagtcacatacaagaacatgagatttcttattacacacaatccaaccaatgcgaccttaaacaaatttatagaggaacttaagaagtatggagttaccacaatagtaagagtatgtgaagcaacttatgacactactcttgtggagaaagaaggtatccatgttcttgattggccttttgatgatggtgcaccaccatccaaccagattgttgatgactggttaagtcttgtgaaaattaagtttcgtgaagaacctggttgttgtattgctgttcattgcgttgcaggccttgggagagctccagtacttgttgccctagcattaattgaaggtggaatgaaatacgaagatgcagtacaattcataagacaaaagcggcgtggagcttttaacagcaagcaacttctgtatttggagaagtatcgtcctaaaatgcggctgcgtttcaaagattccaacggtcatagaaacaactgttgcattcaataaaattggggtgcctaatgctactggaagtggaacttgagatagggcctaatttgttatacatattagccaacatgttggcttagtaagtctaatgaagcttccataggagtattgaaaggcagttttaccaggcctcaagctagacagatttggcaacctctgtatttgggttacagtcaacctatttggatacttggcaaaagattcttgctgtcagcatataaaatgtgcttgtcatttgtatcaattgacctttccccaaatcatgcagtattgagttatgacttgttaaatctattcccatgccagaatcttatcaatacataagaaatttaggaagattaggtgccaaaatacccagcacaatacttgtatatttttagtaccatacagaagtaaaatcccaggaactatgaacactagaccttatgtggtttattccttcaatcatttcaaacattgaaagtagggcctacatggttatttgcctgctcactttatgtttacatctcccacattcataccaatatacgtcaggtttgcttaaccattgannnnnnnnnnnnnnnaccaagtcttacagtgattattttacgtgtttccatgtatctcactttgtgctgtattaaaaaaacctccattttgaaaatctacgttgtacagaagcacatgtctttaatgtcttcagacaaaaaagccttacattaatttaatgtttgcactctgaggtgcaacttaacagggagggcctgagaaaagaatgggagggggctattaattatttttagcaaaatgttgcctttgtcttgtgcaaacatgtagaatatgctctttaatttagtaaaatatttttttaaaaggtagagatgctttgttattgtaatcataaacttcctgaaattcttgtaatttttttcccatacttatcagaagtgtgtttaccaacttatttttgtttgaaagtgtgannnnnnnnnnccttcccaacctctcttgcaaaaaaagaaatgggtttctgctaatgaattgagcagacatctaatattttatatgccttttgagctgtgtaacttaatatttggatacttgacaatttgttttattatgtaattgataaaatggtgatgtgtattaatgttagttcaaccatatatttatactgtctggggatgtgtggttatagttctgtgggagaaataattttgtcagtgttcaccagcttgtaaaaacttagtgcgagagctgaaacatctaaataaataatgacatgcatttatcatcattgagattgggttgcttaaaattaacttattttgtagaagacaaaatgaattgcacttcacttaatgtgtgtcctcatctttttacaaataaatgaaggattataaatgatgtcagcattttagtaaacttttagacaaaatttgttagggtcattcatgaaaactttaatactaaaagcactttccattatatactttttaaaggtctagataattttgaaccaatttattattgtgtactgaggagaaataatgtatagtagaggacagccttggtttgtaaagctcagttccactagttcatggttttgtgcaacttctgagcctcagttttctcctttgcaaattaataattacatacctttatagattttgaaattaatttaaatattagtatttggtacatgaaggcttaatgttaagtttcctttaatgatccacaataatccctttgatcacgttaatctaaatctagatgtctttgtctaattttttttgaatagcagttataaatgtaaaggactcaaagtttaagtaaaaagtgatactccaccttgtgtttcaaagaatttagttccacctcttcataccagtttaacacttaatatatttcattggattttagacagggcaaaaggaagaacaggggcctctggaggcccttggttatttaaatcttggattatttgtgatagtaatcacaaatttttggctaatttttaacctgaggnnnnnnnnnnnnnnnaaaggaaatgcagcctagtcttgagaacataattttatataatcaattactaaatgttaaactattaccacacagcccataaaacagcatttgcgtttattgagagagaggatgtgccatcatgattaatgaaaactatcttttgagtttgaaaagaaattaatttgcagtgtttggattgtatatatggtgctaaaaataaattaatttactttataaaccttatctgtacattatacgatgtgatgaaatttgctttttatccaaatattttgtatcttgtaaatatggctaattataggaatgcctataatacatcttagattccttatatctaataagagttcaaagagttatgagttgaagtcttgaatgcaggaaactatctgatagtgttctaaaatttggttacttgggtttggatacccttagtgggatgatgtaaatagaggctagctacctaggcttgtctatagcaaccataatgttgatgtaagtaatgcggttactgaatcataagaaaatgccatctctttttaagttgaaggaaaactctggaaataagcggccattggtcattctgcagtgcactgcaaccattgtttcccctagtgccctcttttcnctagggcattgctctcctattcccacgccttaacacagctctatacctagaagcagccagcccaggcatgcagtcacatttaatcacatcncccttcntagagtgcttcanaatgatgtagtccctcaactttggctaagatctcaatctcttngaatttatttttttatgtcatatcatctggtaatactactgtttgcangcattangatatggcaagacataaagatgggtcacagattttggtcacatgataccgaccgttgctcgtgcgattctggctcgaggcaatccctaaggagtcgataatcgtatcagcaactgttctgtgtgatgtatcgtcacatcaacacaacagcggaganaatgtagctgg

SEQ ID NO: 69096 - DNA, 1555 bp, Homo Sapiens
caatacaaggccccacactggacagggcagctgctgggttgctactctcgcctccgccatgattccgcccgcagactctttgctcaagtacgacaccccagtgctggtgagccggaacacggagaaacggagccccaaggctcggctactgaaagtcagcccccagcagcctggaccttcaggttcagccccacagccacccaagaccaagctcccctcaactccctgtgtcccagatcctacaaagcaggcagaagaaatcttgaatgccatactacccccaagggagtgggtggaagacacgcagctatggatccagcaggtgtccagcacccctagcaccaggatggacgtggtgcacctccaggagcagttagacttaaagctgcagcagcggcaggccagggaaacaggcatctgccctgtccgcagggaactctactcacagtgttttgatgagttgatccgggaggtcaccatcaactgtgcggagagggggctgctgctgctgcgagtccgggacgagatccgcatgaccatcgctgcctaccagaccctgtacgagagcagcgtggcgtttggcatgaggaaggcactgcaggctgagcaggggaagtcagacatggagaggaaaatcgcagaattggagacggaaaagagagacctggagaggcaagtgaacgagcagaaggcaaaatgtgaagccactgagaagcgggagagcgagaggcggcaggtggaggagaagaagcacaatgaggagattcagttcctgaagcgaacaaatcagcagctgaaggcccaactggaaggcattattgcaccaaagaagtgataatttccacatgattaatttccaacaagacacctgggagttatttactgtgttcctctggcagccaataaaatcatcataagccctttgtaataaaaagctagtttcctgagtgaacaagccataacctcccctaaacaccacctaggtatttgttagaagtcacactattactccaatgtcatcagacacctaaggtctgccagccaggctcctggctgggcaatggaagatggtgtggccctgttagtctccgtgtgtggcttactagccagccttgggaactgccaactcaaattctaagaaagccactgctttctcatcatcactctataccaatacttatttctggccaaatgaatctgcttctctgcccctcaaacttttagttcacaattcatcttctaccttaacttgggcttcttgggcctctggccttcctaacttaatgtcttctttaccctactctaatgcatttctaactcacttaggagcttaggttttctaatgtattatccccacttgccagtcaactggaccccttcctcctcggtttcagactgcctacattaggaaacaatggcagtcaaacccatggctttggagaaagtaaatgtttgccagaaaggaatactagtcacagtggcctttgtgagttgtctgcaactcagctcttcccccagcacagatctgttccccttatcctgcagaaaatcaagc

SEQ ID NO: 69097 - DNA, 1550 bp, Homo Sapiens
  misc_feature (1025)..(1151): n is a, c, g, or t
  misc_feature (1159)..(1174): n is a, c, g, or t
  misc_feature (1214)..(1268): n is a, c, g, or t
  misc_feature (1284)..(1379): n is a, c, g, or t
  misc_feature (1394)..(1404): n is a, c, g, or t
ctggaccggtccggaatgcccgggatatcgtcgacccacgcgtccgcccacgcgtccgactttataaaccttatctgtacattatacgatgtgatgaaatttgctttttatccaaatattttgtatcttgtaaatatggctaattataggaatgcctataatacatcttagattccttatatctaataagagttcaaagagttatgagttgaagtcttgaatgcaggaaactatctgatagtgttctaaaatttggttacttgggtttggatacccttagtgggatgatgtaaatagaggctagctacctaggcttgtctatagcaaccataatgttgatgtaagtaatgcggttactgaatcataagaaaatgccatctctttttagttgaaggaaaactctggaagtaggtgccattggtcattctgcagtgcactgcaaccattgtttcccctagtgccctcttttccctagggcattgctctcctattcccacgccttaacacagctctatacctagaagcagccagcccaggcatgcagtcacatttaatcacatcccccttctagagtgcttcaaaatgatgtagtccctcaacttggctaaagaatctcaatctcttgaaatttatttttttaatgtcatattcatctggtaaatatctactgtttgccaggcatttaagaatatggcaaagaacataaaagatggtgtcaccagattttggtcaccaatgagtacccgacccgttgccatgattaagagagaatgctttctattggagtttcaggaaatataatttgagaatactttaaagggaagtggaagtataagtgaatgatatttttcttttacatgtaaacaatgaagttatttcaaagttaagttttaaacaaaatacatgaagtagtgtctgccatacatgttaatattctacattcttgcttccttaaattaatatgtttgtgtgtatatatgtgcctcacacctgaattgaaaattaaagactggtttaaaagtggnnnnnnnnnnnnnnnnnnnnnnnnnnnnnnnnnnnnnnnnnnnnnnnnnnnnnnnnnnnnnnnnnnnnnnnnnnnnnnnnnnnnnnnnnnnnnnnnnnnnnnnnnnnnnnnnnnnnnnnnnnnnnnncctttggnnnnnnnnnnnnnnnnaaaaaattttttaaaacctttttttgggccccgggccccnnnnnnnnnnnnnnnnnnnnnnnnnnnnnnnnnnnnnnnnnnnnnnnnnnnnnnngggtttgatttccccnnnnnnnnnnnnnnnnnnnnnnnnnnnnnnnnnnnnnnnnnnnnnnnnnnnnnnnnnnnnnnnnnnnnnnnnnnnnnnnnnnnnnnnnnnnnnnnnctcaaaataaatttnnnnnnnnnnntgccctttttggaaaaaggtgtgaaattttaaaaactttcgcccgagagggaaccccctccaaggggttttaaaaactttattcccccggggaaaaccacctttgggccctttggaaaaaaatttcccccggggaaaaacgggggg

SEQ ID NO: 69098 - DNA, 693 bp, Homo Sapiens
  misc_feature (605)..(622): n is a, c, g, or t
tcctttccacaccctattaaaggccccatgacctccctaagatttctgcagatcccctgagaaggtatgttttcatggtctccttgctcgaaaaagaccaactcacccgagggtctggcaggagatggaagtggcggcaggtttacatcacagcagcacgcatgacctcagctttgaatcgtttaactctgagacgtccttcttgaaggcccttgccacagtttccctggccacgccaccccatcccacctctggtcatctccccagccctttatgccccgtcgccctccacccctacatcagctcctccaaaactgagctcccagttcattttgcatatcctaactcaaaatgctcagctaatccaaggggactttctttaccaggattcaaccctagtagagagctgttatggtttcaatagtcatatttatttcttgtaaaacagttgccaggtgctctccagcaataacgttttgtcagtcatgtttcatgttttaacttaggtgtattcatgtgtgacacttccatgttgacaggcccggaaaggcctcatttttaactaaaagatgttttataaacccaggtttaattgtggtgttctnnnnnnnnnnnnnnnnnngcctacagccgcggccgcaagatattccctttagtgaggttaattttagcttgcacgtggccgtcgttacc

SEQ ID NO: 69099 - DNA, 1553 bp, Homo Sapiens
  misc_feature (47)..(81): n is a, c, g, or t
  misc_feature (409)..(461): n is a, c, g, or t
  misc_feature (839)..(861): n is a, c, g, or t
agcgaacgaccgagcgcagcggagtagttgagcgaggaagcggccgnnnnnnnnnnnnnnnnnnnnnnnnnnnnnnnnnnncagtcgacggtaccggacatatgcccgggaattcggccattacggccgggggttttcatgggaacatgaggcagcaaatctattgctaagactttaccaggctcaaatcatctgaggctgatagatatttgacttggtaagacttaagtaaggctgtggctcccagggcataagcaacagtttcttgaatgtgccatctgagaagggagacccaggttgtgagttttcctttgaacacatggtcttttctcaaagttcctgccttgctagactgttagctctttgaggacagggactatgtcttatcaatcactattattttcctgtnnnnnnnnnnnnnnnnnnnnnnnnnnnnnnnnnnnnnnnnnnnnnnnnnnnnngtcttctaaaagactcctctgattgggagaccatatctataattgggatgtgaatcatttcttcagtggaataagagcacaacggcacaaccttcaaggacatattatctactatgaacattttactgtgagactctttattttgccttctacttgcgctgaaatgaaaccaaaacaggccgttgggttccacaagtcaatatatgtgggatgaggattctgttgccttattgggaactgtgagacttatctggtatgagaagccagtaataaacctttgacctgttttaaccaatgaagattatgaatatgttaatatgatgtaaattgctatttaagtgtaaagcagttctaagttttagtatttgggggattggnnnnnnnnnnnnnnnnnnnnnnngaaaaatactgagggatcttttgataaagttagtaatgcatgttagattttagttttgcaagcatgttgtttttcaaatatatcaagtatagaaaaaggtaaaacagttaagaaggaaggcaattatattattcttctgtagttaagcaaacacttgttgagtgcctgctatgtgcacggcatgggcccatatgtgtgaggagcttgtctaattatgtaggaagcaatagatctcggtagttacgtattgggcagatacttactgtatgaatgaaagaacatcacagtaatcacaatatcagagctgaattatcctcagtgtagcttcttggaattcagtttctggaactagagatagagcatttattaaaaaaaactcctgttgagactgtgtcttatgaacctctgaaacgtacaagccttcacaagtttaactaaattgggattaatctttctgtagttatctgcataattcttgtttttctttccatctggctcctgggttgacaatttgtggaaacaactctattgctactatttaaaaaaaatcagaaatctttccctttaagctatgttaaattcaaactattcctgctattcctgttttgtcaaagaattatatttttcaaaatatgtttatttgtttgatgggtcccaggaaacactaataaaaaccacagagaccagcctgg

SEQ ID NO: 69100 - DNA, 1806 bp, Homo Sapiens
  misc_feature (1082)..(1106): n is a, c, g, or t
  misc_feature (1538)..(1745): n is a, c, g, or t
ggttaaaacaggtcaaaggtttattactggcttctcataccagataagtctcacagttcccaataaggcaacagaatcctcatccaacatatattgacttgtggaacccaacggcctgttttggtttcatttcagcgcaagtagaaggcaaaataaagagtctcacagtaaaatgttcatagtagataatatgtccttgaaggttgtgccgttgtgctcttattccactgaagaaatgattcacatcccaattatagatatggtctcccaatcagaggagtcttttagaagacattcattcattcattgaacaaatatgtgttatacccattcaagtaactggatatttaattcattctatgcaatgaacagtcaaatgctgggaaggccccatagttctttggccttcttgtaaagcaacatatgtcttttctgcaggaatgtctgagttgcacagtcaagatcgttgctgttcattgttctttttctcagctctttcagtaactgttacttgacaacactaagttaaacctttacagaggtgaccaagccaggcagaaataaaaatggatttggttgcaccttcagaaagttattcatgtgtgctccaagatcactacctagaatggttctcattgtaattaggacaaatttttaattcttcttacttccagcctcatgaatatattacaaacactttgcaacctttgaatatgaattgctcacctctaccaggtatgacactgtggtaggtgctctattagttgatgaagagcactccttcttatggatacatgtcttcatttgcatattattgctggagaaagagaggtagaatagaggagcaagccaaggacatgagagagccaaaaagaaaagctgcaaaagggatgagaacattcaaatccattttcaaagtgtctacttattcctgtgcttcccagattgcatggctcaatggtaagtctccaggacccccagaacaattcctctattgaagaagaagcttttaactccttggtgacaattgtgcctgagctgagttttctgtttatttttttcatcctttctttcctttcttnnnnnnnnnnnnnnnnnnnnnnnnnttcctctgagtacaaatctaggcaataaaccgttcacctgggatcagttcagatgagacagtaaacagataatccaaaagacaaaaaattataagaattaatacctgcaaagaggattttccctggaaattcttttcttggtgtttccttctacaatataattttaattctgctttgtaattccagtgaaaatgtcttctattgtagttcctgctacattactatgcttactttatctgacattggctctcatctggggttctgaaaagaagctcctctagctatttcaacttattgtccctaacatttaaaacataaagataggttgaggttgaagtcttgcttttgcttcactctaaggagctaaaagaccttacatatctttttcttctgagaataaaccaccatcctcatattgactagctaaactgnnnnnnnnnnnnnnnnnnnnnnnnnnnnnnnnnnnnnnnnnnnnnnnnnnnnnnnnnnnnnnnnnnnnnnnnnnnnnnnnnnnnnnnnnnnnnnnnnnnnnnnnnnnnnnnnnnnnnnnnnnnnnnnnnnnnnnnnnnnnnnnnnnnnnnnnnnnnnnnnnnnnnnnnnnnnnnnnnnnnnnnnnnnnnnnnnnnnnnnnnnnnnnnnttggactatagggatacaagagcaactcttcagccatttccacaccaccgtctcctttttc

SEQ ID NO: 69101 - DNA, 1668 bp, Homo Sapiens
  misc_feature (44)..(78): n is a, c, g, or t
  misc_feature (1440)..(1456): n is a, c, g, or t
tcagaaacgagcgcagcgaagtagtttagcgaggaagcggccgnnnnnnnnnnnnnnnnnnnnnnnnnnnnnnnnnnncagtcgacggtaccggacatatgcccgggaattcggccattacggccgggagcccagctacttccctatttttgtggggagaagagggcctgattagaactgttctggttgtgtttggcgggaggggaataatttttgttcagtccttcttagtgaccaaactttaatttttaagaataatatattgacttactgaactgaagcattctgagttgaaaggagctccagaggagtggagttctgtgttgctcacatgttaaaatcttgctcaccttcagagcagagggaatacctatcttcagatatccgtccattttcatctcttaattgtagtcaaaagtatgacttgagagtgttgctctggtattctgggttctgaagtctggtattctggtattctgggttcaaaagtatgacttgagagtgttgctctggtattctgagagttgctctgtattctgggttctgaagattatttgaaaaataactcctactacattgaaatgcagacttaaaaatttaaacattggattaggcagtcaaaaaaaccaagcaagcataaaaggtcaataagttgtaatcttgatagtaaaggtggaaaacttattataaatggaaagaaagttttatttccttttttgtttgatgggcagtatgccatattatacccaaagttcttttaaaaaatatttccatcaaccatttttatttaaaataaacatttgagggaagttaccaaggcagcttttttcctcaaaagtaacctgttcctctttggaatagcacattttaggggcatggttaatacctgagatttttactcagtaaatcctgatggttactgtgtgtaaaatatctttaagtaggattgaaggcctctgtgggggaataaaatattaccaaagtctataaaaataaattttacatgttctcttttatgacagagagcagcactggttctgttatttttaaaatgaataattgatttcttgataggtgtttaatatttcttccctcactgctgattcttagatagaaaccattctttatatttgatagactgctttcagaaaacccttatcaacaagtgtacaatacttatctaaaactatacatttagaatggagcagtttaatactagatctcagaagttttgaaaaatagcaaagaagactggatttggaaagcatggtctacaattggttgttaaattctgaagctatgaagaataaatgtttcaactttggattatgaaaccccatttatgattttttaaatacacttgaaataaaaatgattaaactaaattttggtccagtgacattactttgcactgcataatccattatacgttgtacgacnnnnnnnnnnnnnnnnnaatttattaatgaaagccttgggtggagctacagcatatctaaaccagagaatttctggattccttataccggcgattatattatattggaggcctttggagtgcgacctgaaaaactggattcttggctttttgggaaaccggatcagggactaaagggccgttaaaaaaactttctggaagcaatggataagctcttaatgggacgcaaa

SEQ ID NO: 69102 - DNA, 1343 bp, Homo Sapiens
  misc_feature (60)..(92): n is a, c, g, or t
  misc_feature (358)..(379): n is a, c, g, or t
  misc_feature (419)..(439): n is a, c, g, or t
  misc_feature (649)..(711): n is a, c, g, or t
  misc_feature (1006)..(1104): n is a, c, g, or t
cctaacaagtacccttgatctgaatgggcaccagcatttgtgtcagtattggtttcatcnnnnnnnnnnnnnnnnnnnnnnnnnnnnnnnnntcccatagcccagttcagggatgcaaaggtctttaaaacttctggacaatctctggtacaatgaggtgtctgataactgataaatcctatgatgccagataggtgtaaaattttttagaattggcgtaatccattatagtgacttctagcttataaaattaacagataccatgatttcattttagtcatgtgctttgataacagaaaataattaattagcatttaatgtagttaacatattgtggtaaaagcaccattacatttgnnnnnnnnnnnnnnnnnnnnnnaatttccttcagtttttaaagggatacaagtttaacaatnnnnnnnnnnnnnnnnnnnnntagctcccctttttcttgcaaggctgttttttaccccaataatttagagtcctggggtgaaaggactagaaaaacaaaaatagaattttcaacaatctctatcttacaaagatatttagctatccaatgaaattgcactttactcaattcaaaattcgattgttttgattgattcctgtcagtttctgtcaaaacagaccatcttccccnnnnnnnnnnnnnnnnnnnnnnnnnnnnnnnnnnnnnnnnnnnnnnnnnnnnnnnnnnnnnnnaaatgtaaatgcagcatttcaaaacttttaaaaaactgaacagtagtagtagtagtttgccattttcggaattgttctgcaatgtgagtggattcattgtccttgcgggccatgttatatacttaactgctgactgctgaaccaaaacaaactaaaggaacaaataaaaaaggaatataactgcattttctttttccaatatgttacagaaaaacattgccctttgactgtcccgttatatattgcagatctcagctactacaaaagatttagttctccatgtgcctcctcgtgnnnnnnnnnnnnnnnnnnnnnnnnnnnnnnnnnnnnnnnnnnnnnnnnnnnnnnnnnnnnnnnnnnnnnnnnnnnnnnnnnnnnnnnnnnnnnnnnnnnaattcacacaacatacgggcgggagcataaagtgtaaatcttgggtgcctatgagtgagtaactcaattaatgtgttgcgtcattgccgcttccattcggaaactgcccttcagtgcataatgacccgcaatctcgggagaggcggtgtgtatgggcgtttctgttcctggtatgaccttgccccgtctttggtggggagcgtacgtcatcaatgggttacgttataatatcgggaacg

SEQ ID NO: 69103 - DNA, 987 bp, Homo Sapiens
  misc_feature (549)..(569): n is a, c, g, or t
  misc_feature (609)..(629): n is a, c, g, or t
  misc_feature (895)..(927): n is a, c, g, or t
gaactaaatcttttgtagtagctgagatctgcaatatataacgggacagtcaaagggcaatgtttttctgtaacatattggaaaaagaaaatgcagttatattccttttttatttgttcctttagtttgttttggttcagcagtcagcagttaagtatataacatggcccgcaaggacaatgaatccactcacattgcagaacaattccgaaaatggcaaactactactactactgttcagttttttaaaagttttgaaatgctgcacttacatttaaaaaaacaacaacaacattttttcaacaatttcaacaatgacacaaaaattcacatggaaatggggaagatggtctgttttgacagaaactgacaggaatcaatcaaaacaatcgaattttgaattgagtaaagtgcaatttcattggatagctaaatatctttgtaagatagagattgttgaaaattctatttttgtttttctagtcctttcaccccaggactctaaattattggggtaaaaaacagccttgcaagaaaaaggggagctannnnnnnnnnnnnnnnnnnnnattgttaaacttgtatccctttaaaaactgaaggaaattnnnnnnnnnnnnnnnnnnnnncaaatctaatggtgcttttaccacaatatgttaactacattaaatgctaattaattattttctgttatcaaagcacatgactaaaatgaaatcatggtatctgttaattttataagctagaagtcactataatggattacgccaattctaaaaaattttacacctatctggcatcataggatttatcagttatcagacacctcattgtaccagagattgtccagaagttttaaagacctttgcatccctgaactgggctatgggannnnnnnnnnnnnnnnnnnnnnnnnnnnnnnnngatgaaaccaatactgacacaaatgctggtgcccattcagatcaagggtacttgttaggg

SEQ ID NO: 69104 - DNA, 961 bp, Homo Sapiens
  misc_feature (224)..(237): n is a, c, g, or t
  misc_feature (823)..(831): n is a, c, g, or t
actctgaggctgaagaggaggagaaagcccctgtgttgccagagagtacagaagggcgggagctgacccagggcccggcagagtcctcctctctctcaggctgtgggagctggcagccccggaagctgccagtcttcaagtccctccggcacatgaggcaggtcctgggtgccccttctttccgcatgctggcctgggcaacaagagtgaaactacgtctcacnnnnnnnnnnnnnnttgaatagccctataaactacaacggaaattgaattcatagttttaaaactccccaaaaacgaaacctctaggtccaaatggtttcactgcggaattctaccagacgtttaaaaaaggaatgaacaccaattctagaccatcttttgcagaaaatagatgtaacacttccctattaatttcacaaaactgattttactctgacactaaaaacaaagacaatacaaaaaaaggaaaagtacaaaccaatagcctttataaatatataagcaaaactcctcaacaaaataccagaaaatagaatttcaacaatatacgaaattgtgtatgtgtacgtttataaagtatatatacatcatggccacatggggtttattccagggatgcaaggcttgctctgtattcaaaaacaaatcagtgtactccaccatttaatagggtaaagaagagaaaccacgtgattatagcagttgatgcagaaaaaccatttgacagaattcaacacccatacatatttaaaaactctcagaaaaataggaattgaggaggacttcctcaacttgttaaagagcacgtgaacacacaccnnnnnnnnncccacaactaatgttatacttaagggcaaaaggtcgaaggccttgttccttagattaggaacaaagcagtaatgtctcttctcaacattaatcaacatattgatggaagttctagccagtgcagtaaagc

SEQ ID NO: 69105 - DNA, 846 bp, Homo Sapiens
cacttcaaaatggatttatcattatagttgatagaaagatttccagggtgtaagaaaacaattcaacagtttgattaatatgccacagactgctaaaaatatattcatgcattttagacaataaatttcaggatatagacatacactcatgctatttgagatccttttttcctaccattgcaagaggctgctttagctaatgcaacagctggctaggttattgcttcaacaatataattcataatgcaaaagcagctcttttccaaacattttagagcaactcaagttgtttacatctcctgtaggtgattttcctataactttgtgccaattggtgtcatactatttggtaaaaatctacattaaatcaagacaactgcacttggttaaatttctgtcatacagagaattatagaaaaattacagctgatttgaacttatcatcattaagtatatacagggttttagaaaatgaatgcaaactacaaaaatggagttgtataattaaacattaaatagtccaagtaataaaagtcatagattaattgtctctcagttctagtcagatcctttaaatactgtctcacaacttgagcattggttctttcatcggaagagtgcctatccttaaagttgggaaatttcagctcctttggagcaccgatcatctgtaaaaagtaattggcatcttcttccaaagtctcaaatttccctacaaaatcatagttgatcaaacacggatagcagagtttgctgaccttttcccagtgaatgtccattcctactggacggtgggaatccagcaagtagtggataaactctttgaacttgactccagatccatta

SEQ ID NO: 69106 - DNA, 1103 bp, Homo Sapiens
tctaaatgaccaaaacaaagcattaaaatcagaagttcagaagctacagactcttgtttctgaacagcctaataaggatgttgtggaacaaatggaaaaatgcattcaagaaaaagatgagaagttaaagactgtggaagaattacttgaaactggacttattcaggtggcaactaaagaagaggagctgaatgcaataagaacagaaaattcatctctgacaaaagaagttcaagacttaaaagctaagcaaaatgatcaggtttcttttgcctctctagttgaagaacttaagaaagtgatccatgagaaagatggaaagatcaagtctgtagaagagcttctggaggcagaacttctcaaagttgctaacaaggagaaaactgttcaggatttgaaacaggaaataaaggctctaaaagaagaaataggaaatgtccagcttgaaaaggctcaacagttatctatcacttccaaagttcaggagcttcagaacttattaaaaggaaaagaggaacagatgaataccatgaaggctgttttggaagagaaagagaaagacctagccaatacagggaagtggttacaggatcttcaagaagaaaatgaatctttaaaagcacatgttcaggaagtagcacaacataacttgaaagaggcctcttctgcatcacagtttgaagaacttgagattgtgttgaaagaaaaggaaaatgaattgaagaggttagaagccatgctaaaagagagggagagtgatctttctagcaaaacacagctgttacaggatgtacaagatgaaaacaaattgtttaagtcccaaattgagcagcttaaacaacaaaactaccaacaggcatcttcttttccccctcatgaagaattattaaaagtaatttcagaaagagagaaagaaataagtggtctctggaatgagttagattctttgaaggatgcagttgaacaccagaggaagaaaaacaatgaaaggcagcaacaggtggaagctgttgagttggaggctaaagaagttctcaaaaaattatttccaaaggtgtctgtcccttctaatttgagttatggtgaatggttgcatggatttg

SEQ ID NO: 69107 - DNA, 1994 bp, Homo Sapiens
  misc_feature (1554)..(1563): n is a, c, g, or t
  misc_feature (1870)..(1877): n is a, c, g, or t
  misc_feature (1879)..(1885): n is a, c, g, or t
  misc_feature (1887)..(1888): n is a, c, g, or t
  misc_feature (1891)..(1901): n is a, c, g, or t
gggaacttattaaaaggaaaagaggaacagatgaataccatgaaggctgttttggaagagaaagagaaagacctagccaatacagggaagtggttacaggatcttcaagaagaaaatgaatctttaaaagcacatgttcaggaagtagcacaacataacttgaaagaggcctcttctgcatcacagtttgaagaacttgagattgtgttgaaagaaaaggaaaatgaattgaagaggttagaagccatgctaaaagagagggagagtgatctttctagcaaaacacagctgttacaggatgtacaagatgaaaacaaattgtttaagtcccaaattgagcagcttaaacaacaaaactaccaacaggcatcttcttttccccctcatgaagaattattaaaagtaatttcagaaagagagaaagaaataagtggtctctggaatgagttagattctttgaaggatgcagttgaacaccagaggaagaaaaacaatgaccttcgggagaaaaactgggaagcaatggaagcattggcatcaactgaaaaaatgctgcaggacaaagtgaacaagacttccaaggaaaggcagcaacaggtggaagctgttgagttggaggctaaagaagttctcaaaaaattatttccaaaggtgtctgtcccttctaatttgagttatggtgaatggttgcatggatttgaaaaaaaggcaaaagaatgtatggctggaacttcagggtcagaggaggttaaggttctagagcacaagttgaaagaagctgatgaaatgcacacattgttacagctagagtgtgaaaaatacaaatccgtccttgcagaaacagaaggaattttacagaagctacagagaagtgtgagcaagaagaaaataaatggaaagttaaggtcgatgaatcacacaagactattaaacagatgcagtcatcatttacatcttcagaacaagagctagagcgattaagaagcgaaaataaggatattgaaaatctgagaagagaacgagaacatttggaaatggaactagaaaaggcagagatggaacgatctacctatgttacagaagtcagagagttgaaggcacagttaaatgaaacactcacaaaacttagaactgaacaaaatgaaagacagaaggtagctggtgatttgcataaggctcaacagtcactggagcttatccagtcaaaaatagtaaaagctgctggagacactactgttattgaaaatagtgatgtttccccagaaacggagtcttctgagaaggagacaatgtctgtaagtctaaatcagactgtaacacagttacagcagttgcttcaggcggtaaaccaacagctcacaaaggagaaagagcactaccaggtgttagagtgaagtaattgggaaactgttcatttgaggataaaaaaggcattgtattatattttgccaaattaaagccttatttatgttttcaccctttctactttgtcagaaacactgaacagagttttgtcttttctaatccttgttagactactgatttaaagaaggnnnnnnnnnngccaactctgtagacaccttcagagtttagttttataataaaaactgtttgaataattagacctttacattcctgaagataaacatgtaatcttttatcttattttgctcaataaaattgttcagaagatcaaagtggtaaagacaatgtaaaatttaacattttaatactgatgttgtacactgttttacttaacattttgggaagtaactgcctctgacttcaactcaagaaaacacttttttgttgctaatgtaatcggtttttgtaatggcgtcagcaaataaaaggatgcttattattcacnnnnnnnncnnnnnnncnncannnnnnnnnnnaaaactccaggcttctattgccgggggcggaaaaaaaggtaatggaaaggcccctgggccatagcgggtttcctgaacccagctttctttgaa

SEQ ID NO: 69108 - DNA, 1446 bp, Homo Sapiens
  misc_feature (49)..(88): n is a, c, g, or t
  misc_feature (92)..(126): n is a, c, g, or t
  misc_feature (1270)..(1270): n is a, c, g, or t
  misc_feature (1280)..(1280): n is a, c, g, or t
  misc_feature (1283)..(1284): n is a, c, g, or t
  misc_feature (1286)..(1286): n is a, c, g, or t
cacaccacccaaatgtatagatcactatagggcgccagctcgctcgagnnnnnnnnnnnnnnnnnnnnnnnnnnnnnnnnnnnnnnnnccgnnnnnnnnnnnnnnnnnnnnnnnnnnnnnnnnnnncagtcgacggtaccggacatatgcccgggaattcggccattacgtgccggggcatgcacatgctgtctggccctggggatcttcccacaggagggccagcgctgtggaccttacaacgccgaggtgcactgcattcctgtgccctagatgcactgtggggcccacttgctcgtggacttgtgcttggtgcatcacggatggtgcatgggctcgcccgtgtcatcagcctctgccagctgccaaaacaagccaaagagcctcccaccagagccgggaggaaaaggcccctgcaatgtggtgacacctccccctttcacactggatccatcttgagccacagtcacttggattgactttgctgtcaaaactactgacagggagcagcccccgggccgctggctggtgggcccccaatgacacccatgccagagaggtggggatcctgcctaaggttgtctacgggggcacttggaggacctggcgtgctcagacccaacagcaaaggaactagaaagaaggacccagaacggcttgctttcctgcatctctgtgaagcctctctccttggccacagactgaactcgcagggagtgcagcaggaaggaacaaagacaggcaaacggcaacgtagcctgggctcactgtgctggggcacggcgggatcctccacagagaggaggggaccaattctggacagacagatgttgggaggatacagaggagatgccacttctcactcaccactaccagccagcctcagaaggccccagagagaccctgcaagaccacggagggagcgacacttgaatgtagaataggcagggggccctgccccaccccatccagccagaccccacgctgaccatgcgtcaggggcctagaggtggagttcttagctatccttggctttcagagccagcctggctctgccccctcccccatgggctgtgtcctaaggcccatttgagaagctgaggctagttccagaaaacctctcctgacccctgcctgttggcaggcccactccccagccccagccccttccatggtactgtagcaggggaattccctccccctccttgtgccttctttgtatataggcttctcacggcgaccaataaacagctcccagtttgtaaaaaangcacccgaanccnncnaactccagggctcctatgtcgggggcgggaaaaagaagtaatgaaaacggcacatgggcaattagcttgttccctgcaaccagcttttcttggaacaaaggggggaaaatcgggccgggtccccccaaaaggggggtccctattaaatttccataagccc

SEQ ID NO: 69109 - DNA, 1504 bp, Homo Sapiens
tgctattagtgaatatagaacagtgggttcacaaaagcaggctggtaccggtccggaattcccgggatatcgtcgaccacgcgtccgctggggacaggccatcatccccacagcgcaggcggcgacagctggatccagggggaggccagggccccccacctgtcactctggctgctgccaaaaaagccaagtctgagactgtgctgacctgtgccacagggcgtgcccactgtgtgtggctagagtgccccatccctgatgcccccgttgtcaccaacgtgactgtgaaggcacgagttgtggaacagcaccttcatcgaggattacagagactttgaccgagtccgggtaaatggctgggctaccctattcctccgaaccagcatccccaccatcaacatggagaacaagaccacgtggttctctgtggacattgactcggagctggtggaggagctgccggccgaaatcgagctgtggctggtgctggtggccgtgggtgcagggctgctgctgctggggctgatcatcctcctgctgtggaagtgcggcttcttcaagcgagcccgcactcgcgccctgtatgaagctaagaggcagaaggcggagatgaagagccagccgtcagagacagagaggctgaccgacgactactgagggggcagccccccgcccccggcccacctggtgtgacttctttaagcggacccgctattatcagatcatgcccaagtaccacgcagtgcggatccgggaggaggagcgctacccacctccagggagcaccctgcccaccaagaagcactgggtgaccagctggcagactcgggaccaatactactgacgtcctccctgatcccaccccctcctcccccagtgtcccctttcttcctatttatcataagttatgcctctgacagtccacaggggccaccacctttggctggtagcagcaggctcaggcacatacacctcgtcaagagcatgcacatgctgtctggccctggggatcttcccacaggagggccagcgctgtggaccttacaacgccgagtgcactgcattcctgtgccctagatgcacgtggggcccactgctcgtggactgtgctggtgcatcacggatggtgcatgggctcgccgtgtctcagcctctgccagcgccaaaacaagccaaagagcctcccaccagagccgggaggaaaaggcccctgcaatgtggtgacacctccccctttcacactggatccatcttgagccacagtcactggattgactttgctgtcaaaactactgacagggagcagcccccgggccgcctggctggtgggcccccaatgacacccatgccagaagaggtggggaatcctgcctaagggttgtctacggggggcacttgggaggacctggcggggctcagaccccaacagcaaaggaaactagaaaagaaggacccccagaaacgggcttggcttttccttgcatcctcttggtgaaagccctcc

SEQ ID NO: 69110 - DNA, 2413 bp, Homo Sapiens
  misc_feature (2278)..(2316): n is a, c, g, or t
tagggggagagggtatgaagtcgacggcgcgccgaattcggcacgaggggaccaaggaaacctctatattgggtacacgatgcaggtaggcagcttcatcctgcaccccaaaaacatcaccattgtgacaggtgccccacggcaccgacatatgggcgcggtgttcttgctgagccaggaggcaggcggagacctgcggaggaggcaggtgctggagggctcgcaggtgggcgcctattttggcagcgccattgccctggcagacctgaacaatgatgggtggcaggacctcctggtgggcgccccctactacttcgagaggaaagaggaagtagggggtgccatctatgtcttcatgaaccaggcgggaacctccttccctgctcacccctcactccttcttcatggccccagtggctctgcctttggtttatctgtggccagcatcggtgacatcaaccaggatggatttcaggatattgctgtgggagctccgtttgaaggcttgggcaaagtgtacatctatcacagtagctctaaggggctccttagacagccccagcaggtaatccatggagagaagctgggactgcctgggttggccaccttcggctattccctcagtgggcagatggatgtggatgagaacttctacccagaccttctagtgggaagcctgtcagaccacattgtgctgctgcgggcccggcccgtcatcaacatcgtccacaagaccttggtgcccaggccagctgtgctggaccctgcactttgcacggccacctcttgtgtgcaagtggagctgtgctttgcttacaaccagagtgccgggaaccccaactacaggcgaaacatcaccctggcctacactctggaggctgacagggaccgccggccgccccggctccgctttgccggcagagagtccgctgtcttccacggcttcttctccatgcccgagatgcgctgccagaagctggagctgctcctgatggacaacctccgtgacaaactccgccccatcatcatctccatgaactactctttacctttgcggatgcccgatcgcccccggctggggctgcggtccctggacgcctacccgatcctcaaccaggcacaggctctggagaaccacactgaggtccagttccagaaggagtgcgggcctgacaacaagtgtgagagcaacttgcagatgcgggcagccttcgtgtcagagcagcagcagaagctgagcaggctccagtacagcagagacgtccggaaattgctcctgagcatcaacgtgacgaacacccggacctcggagcgctccggggaggacgcccacgaggcgctgctcaccctggtggtgcctcccgccctgctgctgtcctcagtgcgcccccccggggcctgccaagctaatgagaccatcttttgcgagctggggaaccccttcaaacggaaccagaggatggagctgctcatcgcctttgaggtcatcggggtgaccctgcacacaagggaccttcaggtgcagctgcagctctccacgtcgagtcaccaggacaacctgtggcccatgatcctcactctgctggtggactatacactccagacctcgcttagcatggtaaatcaccggctacaaagcttctttggggggacagtgatgggtgagtctggcatgaaaactgtggaggatgtaggaagccccctcaagtatgaattccaggtgggcccaatgggggaggggctggtgggcctggggaccctggtcctaggtctggagtggccctacgaagtcagcaatggcaagtggctgctgtatcccacggagatcaccgtccatggcaatgggtcctggccctgccgaccacctggagaccttatcaaccctctcaacctcactctttctgaccctggggacaggccatcatccccacagcgcaggcggcgacagctggatcccagggggagggccagggccccccacctgtcactctggctgctgccaaaaaagccaagtctgagactgtgctgacctgtgccacagggcgtgcccactgtgtgtggctagagtgccccatccctgatgcccccgttgtcaccaacgtgactgtgaaggcacgagtgtggaacagaaccttcatcgaggattacagagactttgaccgagccgggtaatggctgggctacctattcctcgaacgagatcgcagcatcaacatgagaacaagacaagtggtctctgtggaattgatcgaagcgtggaggagtgcgtgaaatcgannnnnnnnnnnnnnnnnnnnnnnnnnnnnnnnnnnnnnnataacctcgggggactggtttttaagagcgatggccgttgagtaggcagggcacgagacgaaaaagtgaaaattacagagattcacagcaacaagga

SEQ ID NO: 69111 - DNA, 1066 bp, Homo Sapiens
  misc_feature (990)..(990): n is a, c, g, or t
aggaagcgaggcctgggtggcgatccaagacgagggtaggaagccccctcaagtatgaattccaggtgggcccaatgggggaggggctggtgggcctggggaccctggtcctaggtctggagtggccctacgaagtcagcaatggcaagtggctgctgtatcccacggagatcaccgtccatggcaatgggtcctggccctgccgaccacctggagaccttatcaaccctctcaacctcactctttctgaccctggggacaggccatcatccccacagcgcaggcggcgacagctggatccagggggaggccagggccccccacctgtcactctggctgctgccaaaaaagccaagtctgagactgtgctgacctgtgccacagggcgtgcccactgtgtgtggctagagtgccccatccctgatgcccccgttgtcaccaacgtgactgtgaaggcacgagtgtggaacagcaccttcatcgaggattacagagactttgaccgagtccgggtaaatggctgggctaccctattcctccgaaccagcatccccaccatcaacatggagaacaagaccacgtggttctctgtggacattgactcggagctggtggaggagctgccggccgaaatcgagctgtggctggtgctggtggccgtgggtgcagggctgctgctgctggggctgatcatcctcctgctgtggaagtgcggcttcttcaagcgagcccgcactcgcgccctgtatgaagctaagaggcagaaggcggagatgaagagccagccgtcagagacagagaggctgaccgacgaactactggagggggcagccccccgcccccggggcccaactgggtgtgacttcttttaagcggaccccctattatcagatcatgcccaagtaccacgcagtgccggaatcccgggaaggaagaaccgctacccaccctccaggggagcacccctgcccacccaagaagcacctgggntgaccagcctgggcagaactcggggacccaataactactggacggtccttcccctgatccccaccccccctccctc

SEQ ID NO: 69112 - DNA, 1523 bp, Homo Sapiens
cagtcgacggtaccggacatatgcccgggaattcggccattacggccgggggcagtcccggctcctggcggcgtgttcctcttttcctcggttcccagtgttctggcaggtaaggaacgccggctcttcgcctctcagcgcggcttgtcctttgttccggacgcccgctcctcagccctgcggctcctggggtcgctgctgcatcccgcacgcctccaccggctgcagacccatggccgagcgcggggaactcgacttgaccggcgccaaacagaacacaggagtgtggctagtcaaggttcctaaatatttgtcacagcaatgggctaaagcctctggaagaggtgaagttgggaaactgcggattgccaagactcaaggaaggactgaggtgtcatttactttgaatgaggatcttgcaaatattcatgatattggtggaaaaccagcttcagtcagtgctcctagagaacatccatttgtcttgcaaagtgttggaggacagacattaacagtatttactgagagctcatcagataagctgtcattggaaggaatagtggtacaaagagctgaatgccgaccagctgccagtgaaaactacatgcgattaaaaagattgcaaatagaagagtcttccaaaccagtgaggctatcacaacagctggacaaagttgtaacaaccaattacaaacctgttgctaatcatcaatacaatatcgaatatgaaaggaaaaagaaagaagacggaaagcgagctcgagctgataaacaacatgttttagacatgctattttcagcctttgagaaacatcaatactataatcttaaggacttggtggacatcacaaagcaacctgtggtgtacctgaaggaaatcttaaaagaaattggtgttcagaatgtaaaagggatccacaaaaacacatgggagctgaagccagagtacagacactatcaaggagaagaaaagagtgactaagaagactcctagccagcatgctagtgaaacgactagcagcgatgctatgcaaaaggcgctgatactggaaggcttgaacaccgtatgttaataggggttaagtgacagtactttgatttctctcggtaaattttttaaacctgtaattcttgtaaagtttcttaactgtttttttgaggagaaagaacagatttatttatagacttaacttgtattaaaccagattattcacagtaggaataggggttggaggattaagagggtttttcttaaatattagcttttaatgtgtacaattaggaaatttttttaagtgaggactctctacccttgccgtatctaaggagctgaggtaatacagatccaaggagaattgtatagcaagaaaaaaacagtcaactacagaaactcttaaaaggaataaaaacccaaagttccttattttgaaattgtcaaagaacaaagcggtgtttttcttttaaacaggtgatcacgtttcgtgttcatactcaacgttaataaaaggagagagtttgtagtg

SEQ ID NO: 69113 - DNA, 1698 bp, Homo Sapiens
  misc_feature (750)..(792): n is a, c, g, or t
  misc_feature (1040)..(1048): n is a, c, g, or t
  misc_feature (1580)..(1588): n is a, c, g, or t
ccatttttactgcacagccaaatacaatgttgggcaggatgtttggatctggccgagaacataactttacacgacccaatgagaaaggagagtatgaggtggcagagggaattggttccactgtgtttcgagcgattctggattactataaaacaggaataatccgttgtcctgatggcatatctattcctgaactgagagaagcatgtgactatctttgtatctcttttgaatatagcactattaaatgtagagatctcagtgccctaatgcatgagttatcaaatgatggtgctcgtagacaatttgaattttatctggaagaaatgatcctccctctcatggtagctagtgcccagagtggggaacgggaatgtcatatagtggtgcttacagatgatgatgtggttgattgggatgaagaatatccaccacagatgggagaagaatattcacaaattatttatagcacaaaattatatagatttttcaagtatattgaaaacagagatgtggccaagtcagttttgaaggagaggggtcttaagaagattagattgggaatagaaggttatcctacctacaaagaaaaagtaaagaaaaggcctggaggccgcccagaagtgatctacaactatgtccaaagaccctttattcgaatgtcctgggagaaggaagaaggaaagagtcggcatgtagactttcagtgtgtaaagagtaaatctatcaccaatcttgcagcagctgcannnnnnnnnnnnnnnnnnnnnnnnnnnnnnnnnnnnnnnnnnnaagtggatgagctggatattctccctatccatcccccttctggcaacagtgacctcgatcctgatgcacagaatccaatgctgtgatgctgatcttccttgaaaccataccatgctactcttcacagtgacgttgtactctcctcattctgcactgcaaggccactcttcttcattgtgagatgcacataacaatgtttaggatattgcagtgtaggctttttgaaagaccaaaggtacctgaatggnnnnnnnnnaaatgagtacaactctagcattttgaagttccagttgtaaatgtatttgtttaccagtaggtttgtgaaattggttctttgtatgggggatggtcctttttcacacagctaggtcttttcagaagtggtggaaattggcagctggggtactttcagtttggactgatattcatcacacctcagataaaatgcagagtaatatatagttgcactttataaatggtggttaaatggaaatgttcaagccattttatagttgtgatgcacaatataatttaagtgcttctgtcaaagtattcctccagtacaatttgtatagtttgctgcccttgatgagcaaaaagtatttatcttgggcttatctgaatgatcaggatgagatttaatgcccatatcttaccagttcagttatctccagagccatttcaccctttagagtgagtcacatgcagggagtgtgaatgtcagaggtggtttattatccagtctgccttacccttaatctgttcacagatatttatttactaatgcnnnnnnnnncttaagagttatgggataggaaaatgaagtgtttgctcttcatttactaaatgattgtaaacttgagtttttcatcaaaataaaattccattgttttaatgtttctgacc

SEQ ID NO: 69114 - DNA, 2143 bp, Homo Sapiens
  misc_feature (23)..(23): n is a, c, g, or t
  misc_feature (188)..(188): n is a, c, g, or t
  misc_feature (193)..(194): n is a, c, g, or t
  misc_feature (198)..(198): n is a, c, g, or t
  misc_feature (208)..(209): n is a, c, g, or t
  misc_feature (220)..(222): n is a, c, g, or t
  misc_feature (224)..(224): n is a, c, g, or t
  misc_feature (226)..(226): n is a, c, g, or t
  misc_feature (233)..(238): n is a, c, g, or t
  misc_feature (240)..(240): n is a, c, g, or t
  misc_feature (430)..(439): n is a, c, g, or t
  misc_feature (1443)..(1459): n is a, c, g, or t
  misc_feature (1578)..(1657): n is a, c, g, or t
  misc_feature (1659)..(1661): n is a, c, g, or t
  misc_feature (1812)..(1835): n is a, c, g, or t
  misc_feature (1956)..(1967): n is a, c, g, or t
aagtattttggcccttcaatttngaggagggcaaaagttggaagtaagaagttttattttaagtactttcagtgctcaaaaaaatgcaatcactgtgttgtatataatagttcataggttgatcactcataataattgactctaaggcttttattaagaaaacagcagaaagattaaatcttgaattnagtcnngtcngggggggaanngcccccgccgnnngngntttagannnnnnanggaaattctacccagaatgcaaaattgggggtatacgaattacatagcatgttgttgggattttttttaatgtgcagaagatcaaagctacttggaaggagtgcctataatttgccagtagccacagattaagattatatcttatatatcagcagattagctttagcttagggggagggtgggaaagttnnnnnnnnnnttgtgaagatttagggggaccttgatagagaactttataaacttctttctctttaataaagactggtcttacaccgtgctgccattaaaggcagctgttctagagtttcagtcacctaagtacacccacaaaacaatatgaatatggagatcttcctttacccctcaactttaattggcccagttatacctcagtggttgtagcagtactgtggatacctggcacagtgcttggatcttacgatgccctcgtgtactgacctgaaggagacctaagagtcctttccctttttgagtttgaatcatagccttgatgtggtctcttgtttaatgtccttgttcctaatgtaaaagtgcttaactgcttcttggttgtattgggtagcattgggataagattttaactgggtattcttgaattgctttaacaataaaccaattttataatctttaaatttatcaactttttacatttgtgtattttcagtcagggcttcttagatctacttatggttgatggagcacattgatttggagtttcagatcttccaaagcactatttgttgtaataacttttctaaatatagtgcctttaaaggaaaaatgaacacagggaagtgactttgctacaaataatgttgctgtgttaagtattcatattaaatacatgccttctatatggaacatggcagaaagactgaaaaataacagtaattaattgtgtaattcagaattcataccaatcagtgttgaaactcaaacattgcaaaagtgggtggcaatattcagtgcttaacacttttctagcgttggtacatctgagaaatgagtgctcaggtggattttatcctcgcaagcatgttgttataagaattgtgggtgtgcctatcataacaattgttttctgtatcttgaaaaagtattctccacattttaaatgttttatattagagaattctttaatgcacacttgtcaaatatatatatatagtaccaatgttaccnnnnnnnnnnnnnnnnnagatgtaagagcatgctcatatgttaggtacttacataaattgttacattattttttcttatgtaatacctttttgtttgtttatgtggttcaaatatattctttccttaaactcttannnnnnnnnnnnnnnnnnnnnnnnnnnnnnnnnnnnnnnnnnnnnnnnnnnnnnnnnnnnnnnnnnnnnnnnnnnnnnnnannncccttgtcgggccgccctcggcccttcagaaaagtttctctaaacccattcgttggggggccggggcccccagaagggaaaggtgaacatgggccaataccgtgttccccaaggaaaatcccggggccatgaacaagggccttggaatttnnnnnnnnnnnnnnnnnnnnnnnngggggggaaaaccgaagggttttcttaaaccaaatcccaaaaggggaattcctggagggccttttactgggattctatccacaggggaagcccaaaggcgaaccctcaaatttaaaattannnnnnnnnnnnttgccaatttttttgaaaaaaaggggtggaaattccattaaaaaatttccgccccgcacttgggaaaccccttccccaaccggggtttgaaaggaaccctttaaattccgccaggggggattttaaaacccttggttccccccttggccgaaaataattttttcgccccaagtggg

SEQ ID NO: 69115 - DNA, 985 bp, Homo Sapiens
  misc_feature (801)..(802): n is a, c, g, or t
agagaactggttgatgagaaagctctgaagcacataacggaaatgggcttcagtaaggaagcatcgaggcaagctcttatggataatggcaacaacttagaagcagcactgaacgtacttcttacaagcaataaacagaaacctgttatgggtcctcctctgagaggtagaggaaaaggcagggggcgaataagatctgaagatgaagaggacctgggaaatgcaaggccatcagcaccaagcacattatttgatttcttggaatctaaaatgggaactttgaatgtggaagaacctaaatcacagccacagcagcttcatcagggacaatacagatcatcaaatactgagcaaaatggagtaaaagataatcatctgagacatcctcctcgaaatgataccaggcagccaagaaatgaaaaaccgcctcgttttcaaagagactcccaaaattcaaagtcagttttagaaggcagtggattacctagaaatagaggttctgaaagaccaagtacttcttcagtatctgaagtatgggctgaagacagaatcaaatgtgatagaccgtattctagatatgacagaactaaagatacttcatatcctttaggttctcagcatagtgatggtgcttttaaaaaaagagataactctatgcaaagcagatcaggaaaaggtccctcctttgcagaggcaaaagaaaatccacttcctcaaggatctgtagattataataatcaaaaacgtggaaaaagagaaagccaaacatctattccctgatatttttatgacagggaatcnncaacaataaataatgaagcctttcagtggtataaaaatttgaaaacatttctaatgtaaatactggattatcagaaatccagttccgaagtaataggtttccatggggggtccccaaatgggagaaataaaaaaatgcccactgaaaagggaagaacaattagggaccctatttaagcccggc

SEQ ID NO: 69116 - DNA, 865 bp, Homo Sapiens
  misc_feature (98)..(107): n is a, c, g, or t
  misc_feature (310)..(329): n is a, c, g, or t
  misc_feature (332)..(435): n is a, c, g, or t
atgtgctactgcgcccaaccaaaaatctcatttttaactaaaacttattgtagataacaaaacaggtaatcatcacatgaaataattagtttagaacnnnnnnnnnncaagattccacttcagaacactctgtagaacactccatataactctgtatataaatattgatggctgaagattcaactttcagtattttaattctgtaaagttatgttgtaaactcaagtaaggaagtctaatgtagagcccaaactcctcaaatgttaaaaaaaatctaggttattttttagccaccacagttggctattannnnnnnnnnnnnnnnnnnnccnnnnnnnnnnnnnnnnnnnnnnnnnnnnnnnnnnnnnnnnnnnnnnnnnnnnnnnnnnnnnnnnnnnnnnnnnnnnnnnnnnnnnnnnnnnnnnnnnnnnnnnntgtgtctggaagtgatctagcttcttcctgctaaaattttataaagtttggagcagattgtttaactaccctaggtctctatttttctgtagaatgatgctgcattttcaaagtctcttaatagagtttctgtcaacattttctataaaaaaaagtcaaaggagattaaacctagaaataggtaatacttcacctaagaagttcagcatctcagaagaaacacgtacttctgaaaagcaaaactgactcacccttatttggagttctcagttggaacatgtctcttacgtctgccttgggttactccacagccttcaaagagtagctaaggaatcagtgtaaactccaaccccatgttactgttttgatatatagtgatttctgctccaaaacattgtaggtaaaaaggaatagtggttcactatcaaaa

SEQ ID NO: 69117 - DNA, 2295 bp, Homo Sapiens
  misc_feature (1868)..(1868): n is a, c, g, or t
  misc_feature (2239)..(2239): n is a, c, g, or t
ggtagggagagaaaaaggaggcgtcggcggggcgcgagcgaccagggcgctaagtgccgcctcacagtcctgccagagacaggagacgccgggccgcccgcgccgtctgtcccaagagctcctcctggacatccgcttgactctccgtcgtctccaattggccgtcggggaacggaagccgaagcaaactagtgaacccggaagtgcttcgcggcggaggcccgggcaactcttttgaatggaatcgggctgattcatcgccggtttgcagacagagccgcgtcgggtgtgcgccgctgctgctgttgcctctgtcttcgcgtcaccacagaggcaagacaagggtccatatcgcggcatccggctcccgcccgtcttcaggagagaaagaaaaaataaaatatacttggggaagttgtacctgccagaattagcaagagctttctttaagaagacatttgtcaaactcaacaaattgaaggttaacaccttaagagttgtagttactgaccagaaatatggacagacttcttagacttggaggaggtatgcctggactgggccaggggccacctacagatgctcctgcagtggacacagcagaacaagtctatatctcttccctggcactgttaaaaatgttaaaacatggccgtgctggagttccaatggaagttatgggtttgatgcttggagaatttgttgatgattataccgtcagagtgattgatgtgtttgctatgccacagtcaggaacaggtgtcagtgtggaggcagttgatccagtgttccaagctaaaatgttggatatgttgaagcagacaggaaggccggagatggttgttggttggtatcacagtcaccctggctttggttgttggctttctggtgtggatatcaacactcagcagagctttgaagccttgtcggagagagctgtggcagtggttgtggatcccattcagagtgtaaaaggaaaggttgttattgatgccttcagattgatcaatgctaatatgatggtcttaggacatgaaccaagacaaacaacttcgaatctgggtcacttaaacaagccatctatccaggcattaattcatggactaaacagacattattactccattactattaactatcggaaaaatgaactggaacagaagatgttgctaaatttgcataagaagagttggatggaaggtttgacacttcaggactacagtgaacattgtaaacacaatgaatcagtggtaaaagagatgttggaattagccaagaattacaataaggctgtagaagaagaagataagatgacacctgaacagctggcaataaagaatgttggcaagcaggaccccaaacgtcatttggaggaacatgtggatgtacttatgacctcaaatattgtccagtgtttagcagctatgttggatactgtcgtatttaaataaagcaacgaaaaacgctattaatgatgccttcagtgtatattcctctgttgttcctaatgctcaaaatcaagggacctctgaaggtgtacttggctaaatgtaagacatctggcatcatttgcagcactgtaacaccttcagtctcagttgtgcaattacttctgtttctttagtcagggtctttgcagattctaaagttatacatgaatacatcaaagtggacaaattttgttaagatcccatttaatatttgaaaaaatcagtagcacaaatatattttgattgtcacttacaaaataaaatacatttaccagtccccacaaacaccaccctaaccacacgccacttgcccggcccccctccggccctcgaacaactttctctaaacccatctcgttgggcgtgcccgggcccagntacgccaagcgccaccatgccccatcaccctggttttccctaaggaaaatctttggcccatgcactaccggccttggcattcctccccaattaacaaaaaccccccggcgcccaaccccaccggttctgaacaaactgcccaatgggaccttctaaaggcctttacctggcatttttccccccgtattcccaaaccgaccctcgatttcaaattcacctgcctcccccccgtaaacccccttcgaacccctggtggccccttcctttaatacctttcctcctcaactatggcaatccctccccaaaccgttttctgatgacaccctcacactcgctagccccgcctctacggcccctgtttacccccccgnatttataacttgcgcccctatggccgaaaaacacgggcgcaaatacaaacttgtat

SEQ ID NO: 69118 - DNA, 849 bp, Homo Sapiens
ttccctaagacccatcataattagccatggatcaatcggaagggcatcaattaacaaccctttcctttttacactctgaatggggatcccacaacccactgcccacagctctctccgacaaggcttcaaagctctgctgagtgttgatatccacaccagaaagccaacaaccaaagccagggtgactgtgataccaaccaacaaccatctccggccttcctgtctgcttcaacatatccaacattttagcttggaacactggatcaactgcctccacactgacacctgttcctgactgtggcatagcaaacacatcaatcactctgacggtataatcatcaacaaattctccaagcatcaaacccataacttccattggaactccagcacggccatgttttaacatttttaacagtgccagggaagagatatagacttgttctgctgtgtccactgcaggagcatctgtaggtggcccctggcccagtccaggcatacctcctccaagtctaagaagtctgtccatatttctggtcagtaactacaactcttaaggtgttaaccttcaatttgttgagtttgacaaatgtcttcttaaagaaagctcttgctaattctggcaggtacaacttccccaagtatattttattttttctttctctcctgaagacgggcgggagccggatgccgcgatatggacccttgtcttgcctctgtggtgacgcgaagacagaggcaacagcagcagcggcgcacacccgacgcggctcagtctgcaaaccggcgatgaatcagcccgattccattcaaaagagttgcccgggcctccgccgcgaagcacttccgggt

SEQ ID NO: 69119 - DNA, 822 bp, Homo Sapiens
gaaagaaagcagcagcatgatcctgacatgacagatgtgggagacccacagcctgcagacactgtgggctggaaggtgggaagggaggggccggtggaggtggagctgtttgaaagtgacacagcagcagtagaagcagtggtgggcgaagcccaggtgaccctcagaacgttgcacaagaacatcagggaaaagaaccagaatcctttaaggaaaatgttcttcatgtatgagagactaaagtgatttttctaagaaagttcagcccttctctgacttacctggacatttctagatacttccaaaggaccctctgggaatccatagcttcctaatctggagatgggaggtcataagggagacgctgtggggttccttgaagtttcttgggttcacagaggagccccctcacttggtgttctcccgtgagccagcctccacctgccaaagacactctggtcctcgtatagtgagtaatggggctcagggcctctccaacaacagagaggagctgatgctgtagggctgaccccgtgacttcctgagtcctcaccctgtccagtgctttgagattcttcccacctccccatcctcaccagccggatcgggcgctgtgcagtgtggtcagcatggtgaagaaagtcatttcctcggtgggcagtattcctctttatctctcattacactggaaatgttatttctgctgtatcatccgtgctcaacgttttagtctgtcaggctcaccttctctctggaaagaatttgcttaacttgacattccatgtgccgctaataaaatatattttgaaagaataaaaaaaa

SEQ ID NO: 69120 - DNA, 1118 bp, Homo Sapiens
ggtccttttcagcccgaggcctgacagacgcgggcagtgatgagccctgttctggagtggaaagagcacgatagagcaccaggctaagaggcacgagatcaaggcggtagtcacttccgctctgcagctagcatttcaaccatatgtggatcctttcatttctcagctccctggattccttcccctaaattaggacctattatttacctgtaggaaagcaagctactgtagctcatctgaggtatctgacagctgttttctgtagcctcagattgcctatctgctagccgtgagaacaggtagatgaaaactaaactgatgcctaggcccagggtcagtctcagatggaagctggacctgggtggggaggctagcatgcgtggctccctgggtatttctgtcagtccccatggcaagcagtgatttagtaaaacaccccagagtcagggaagccaaccaccttgaaacctttagaacatctctgctttggagaaagacccagagatcaggcagaggtgcagattcaatcattactcataacctttgagagatggcaaatgggaggagtgttagtctttgttttggaattggaccattcttgcaaccaaaaggacttagagcagtttgctcataaagacatcctttattataaaaggaagtatttaaaggatgatagagaccatcagatagaagcagggaaggtagataacttttaggaccttgatgtgaggaaaagataaaatttaaacaataaatttgccacttagattttctagcagcaaagtccgaaaagatagttatatacaaaattctgttttctgaaaacaaaattgtgattcaccttcagaattggccattttttttgtgagtttccttgcatcaaggacactgagaaacacagtcattgtcttaggtgttctatgggaggaagtgaatagagcctttaggaacttcctggtcaagcttatggtgcttattttgatctgggccacttccctccttccagtcatgagtaatcatcaaggagcaagttggagtgtttcaggtgtatattttgtagaacccaaaagattggagccttaacaataaacatcagcactaagtgacctgttaaaaaa

SEQ ID NO: 69121 - DNA, 673 bp, Homo Sapiens
  misc_feature (569)..(607): n is a, c, g, or t
cacaagcaaaaatgttgcggctgtgcagccaatgaaacgaggaccaaagatggaggtgacacgagcagtgatgaggataaagaagaacatgaaactcctgtggaagtagaactcatgactcaggttgaccaagaggatatcactcttcagagtggcagagatgaactaaatgaggagctcattcaggaagaaagctctgaagacgaaggagaatatgaagaggttagaaaagatcaggattctgttggtgaaatgaaggatgaaggggaagagacattaaattatcctgatactaccattgacttgtctcaccttcaaccccaaaggtccatccagaaattggcttcaaaagaggaatcttctaattctagtgacagtaaatcacagagccggagacatttgtcagccaaggaaagaagggaaatgaaaaagaaaaaacttccaagtgactcaggagatttagaagcgttagagggaaaggataaagaaaaagaaagtactgtacacattgaaactcatcagaacacaagcaaaaatgttgcggctgtgcagccaatgaaacgaggacnnnnnnnnnnnnnnnnnnnnnnnnnnnnnnnnnnnnnnnaccaggatgaagaagaccgtgaacttatcatgaagttgctggggtctgcagtttcaaacaaagaag

SEQ ID NO: 69122 - DNA, 1042 bp, Homo Sapiens
  misc_feature (597)..(597): n is a, c, g, or t
ggtaccggtccggaattcccgggatatcgtcgacccacgcgtccgctaattataggtggacgagatcagcaacagaatgaaataattgtgaaaagatacttgacaccaggagacatttatgtacatgctgatcttcatggagctactagctgtgtaattaagaatccaacaggagaacccatccccccacggaccttgactgaagctggcacaatggcactttgctacagtgctgcttgggatgcacgagttatcactagtgcttggtgggtgtaccatcatcaggtatctaaaacagcaccaactggagaatatttgacaacaggaagcttcatgataagaggaaaaaagaattttcttcctccctcatatctaatgatggggtttagcttcctttttaaggtagatgagtcttgtgtttggagacatcagggtgaacgaaaagtcagagtacaggatgaagacatggagacactggcaagttgtacaagtgaactcatatcagaagaaatggaacaattagatggaggtgacacgagcagtgatgaggataaagaagaacatgaaactcctgtggaagtagaactcatgactcangttgaccaagaggatatcactcttcagagtggcagagatgaactaaatgaggagctcattcaggaagaaagctctgaagacgaaggagaatatgaagaggttagaaaagatcaggattctgttggtgaaaatgaaagatgaaggggaagagacattaaattatcctgatactaccattgacttgtctcaccttccaccccaaaaggtccatccagaaattggcttcaaaagaggaatcttctaatttctagtgacaggtaaatcacagagccgggagacattttgtcagcccaagaaaagaggggaaatgaaaaaggaaaaacttcccaagtggactcaggagattttagaaaccgttaaagggaaaggcattaaggaaaaaggaaaggtccttgtacccattggaaacctcatccgaaccccaagccaaaaatgattgcgggcg

SEQ ID NO: 69123 - DNA, 1234 bp, Homo Sapiens
  misc_feature (65)..(111): n is a, c, g, or t
ccaggctgtattccggggtcaaagcaacactaactcacctctctgctcatttcagacagcttgcnnnnnnnnnnnnnnnnnnnnnnnnnnnnnnnnnnnnnnnnnnnnnnnctatcttggtttccaccaaggtgttagatttctcctcctcctaaccaggtggccctgtgaggccaacgagggcaccagagcacacctgggggagccaccaggctgtccctggctggttgtctttggaacaaactgcttctgtgcagatggaatgaccaacacatttcgtccttaagagagcagtggttcctcaggttctgaggagaggaaggtgtccaggcagcaccatctctgtgcgaatccccagggtaaaggcgtgggtcattgggtttgctccccttgctgctgctccatccctgcaggaggctcgcgctgaggcaggaccgtgcggccatggctgctgcattcattgagcacaaaggtgcagctgcagcagcagctggagagcaagagtcacccagcctgtgcgccagaatgcagaggctcctgacctcacagccagtccctgatagaacacacgcaggagcagagtcccctccccctcccaggctgccctctcaacttctccctcacctccttcccctaggggtagacagagatgtaccaaaccttccggctggaaagcccagtggccggcgccgaggctcgtggcgtcacgccccccccgccagggctgtacctccgtctccctggtcctgctgctcacaggacagacggctcgctcacctcttccagcatgctgctcttacaggcactgatgatttcgctggaaagtgtggcgggcagctttgcctaagcgtggatggctcctcggcaattccagcctaagtgaaggcgctcaggagcctcctgctgaaacgcgaaccatctctcccaggaccccggggcatcttaagggtcattgagaaatactgtgggatcagggttttgttcttccacactgtaggtgaccccttggaataacggcctctcctctcgtgcacatacctaccggtttccacaactggatttctacagatcattcagctggttataagggttttgtttaaactgtccgagttactgatgtcattttgtttttgttttatgtaggtagcttttaagtagaaaacactaacagtgtagtgcccatcatagcaaatgcttcagaaacacctcaataaaagagaaaacttggcttgtg

SEQ ID NO: 69124 - DNA, 824 bp, Homo Sapiens
  misc_feature (194)..(294): n is a, c, g, or t
  misc_feature (672)..(728): n is a, c, g, or t
aaaatgtggaactagtattcattttttattcaaatattttataaattatcatattggaggccctatagtgtggtagtttacagcatgaactctgtattccaagtgctcacgttcaacttacagtctataatctcaggcaaggagcttaaccactttgtgccttagtttttttaatccatagagtgaggataagnnnnnnnnnnnnnnnnnnnnnnnnnnnnnnnnnnnnnnnnnnnnnnnnnnnnnnnnnnnnnnnnnnnnnnnnnnnnnnnnnnnnnnnnnnnnnnnnnnnnngcttattatcataagtctctaatattctgacatctgaagcctttggggttctaaattagctgttttttatgctgcccacttaaggtgttttttatttttcaacgtctctgatctttgattgtgagctcatatttggaggatctttgggaatcctgaggctctaaatttgggaaattttcctccagaccatctgcaatttgagaccacatttactgccatcagttatccctgcttcatgtaggagccctggttcagctcccttgtcttcagtgtgtccaggtttagctccactgccagccttcatataggtctcgacccaagattttagtgtattgctcccagatcatcaccttagtttccactcacagttctgatggnnnnnnnnnnnnnnnnnnnnnnnnnnnnnnnnnnnnnnnnnnnnnnnnnnnnnnnnnaggaattctgttgtttcctaagaacctagtacagtatgaacaagtatatttcatctaggatctgacttaactatagcaagacagtcctcagaaaac

SEQ ID NO: 69125 - DNA, 1446 bp, Homo Sapiens
  misc_feature (62)..(62): n is a, c, g, or t
  misc_feature (65)..(65): n is a, c, g, or t
  misc_feature (68)..(68): n is a, c, g, or t
  misc_feature (80)..(80): n is a, c, g, or t
  misc_feature (87)..(87): n is a, c, g, or t
  misc_feature (121)..(121): n is a, c, g, or t
  misc_feature (483)..(499): n is a, c, g, or t
  misc_feature (637)..(646): n is a, c, g, or t
ttatgtatatatagacatatctatataaattgtctgctgagggcaggccttcagctatcatntgntanataaatacattntagtatntgcatttcctactgcctgcagagtttcaggtgcntgttgtgtgaaagttctgtagatgtgtgcaaatttaacgaaatgaaattgtatgtgtaaaaatgtacgatttttcactgtgcaactgtaaattataaataaaaaatatttttgctattcatggagtgtaatatttatgcacaccatcaaatagtttctgtactttttattgggtaaaaatggaattgaacagcaacctcaacataagattttttttctagtagcctcccactgattaaagaagcaagtttgaggtttcatccttcaaaagggggttccgagagagcaccgtagggcttttctcaaatagaaaagccagattttgaaaaaattttaaagataaaataggacatattttgcagnnnnnnnnnnnnnnnnncacaaacacatctccaggtatagagaaccatccagatgttcacttttgaaaatatctaatgatgcaaagttttattcttgaacttggacactgatgccatcaaacaattaacaaatatatttaagtactaaaggtgannnnnnnnnnaaagactttttcaaattgtcaaatgatttaatgcagatgaacatatttctattttaagtaacgggaatctgtaagaatgtttgcttgagatatggttaacttttttcttttgttggttttgacttagatggacaccatgagatgttaatattcatacatgtaataaatagaatgatgaagaaactttgtttgtacttctttatttcttgaaaagctttagaatgtgactttcttgttgtctttcatctgttttttgaaacatgaacatggtacttgctatgagccaggcactctgagacaggttagtcttttctgccatttattggagataggcatataaaacactgagttttattgagcacatagtatgtggcaggcactagcactttctacatgtattttctctggtattcacatctaataactacatggtagatggtgtccccactttacagatgaaattaagccactcactttaaaatttttataagaatttgaacgtggctttgtttcctctaattccatacaatttctgcaattttaaaagatacccccaaattgattgttaggatagaaataagcacaccaaactactggaaggtggctaaggaagattctacaaaagtggtgacatttgagtcttggaggataaccaggagtggagtccatactgatgggaagggtatctttggaaaatgaacagcaaatgtaaaggcttaaaatacttttgtgttttcaaaaattgacttcttatggttaaaactcagtagttttgaatagattatgatgagccattaatt

SEQ ID NO: 69126 - DNA, 408 bp, Homo Sapiens
  misc_feature (323)..(334): n is a, c, g, or t
aagttttctaagcaatatttttcaagccagaagtcctctaagtcttgccagtacaaggtagtcttgtgaagaaaagttgaatactgttttgttttcatctcaaggggttccctgggtcttgaactactttaataataactaaaaaaccacttctgattttccttcagtgatgtgcttttggtgaaagaattaatgaactccagtacctgaaagtgaaagatttgattttgtttccatcttctgtaatcttccaaagaattatatctttgtaaatctctcaatactcaatctactgtaagtacccagggaggctaatttctttnnnnnnnnnnnntctatccatctacttctctcttacctgatttatgtgttagaataaattcatgaaattcgattccaagcataaaa

SEQ ID NO: 69127 - DNA, 993 bp, Homo Sapiens
  misc_feature (42)..(82): n is a, c, g, or t
  misc_feature (86)..(120): n is a, c, g, or t
aagacttttgtttatgctatagggcgctagctcgactatatnnnnnnnnnnnnnnnnnnnnnnnnnnnnnnnnnnnnnnnnnccgnnnnnnnnnnnnnnnnnnnnnnnnnnnnnnnnnnncagtcgacggtaccggacatatgcccgggaattcggccattacggccgggggcacgaacgcacggccgcgcagcatctgtcttgctggaagctttttcctagaggttgagcggtttgcacaatgtcggaaatggctgagttgtccgagctgtatgaagagagcagtgacctgcagatggatgtgatgcctggcgagggtgaccttccgcagatggaggtaggcagcgggagccgggagctatccctgcgtccctcccgcagcggggcccaacagctcgaggaggaaggcccaatggaggaggaggaggcccagccaatggcggcgccagaggggaaacggagccttgctaacgggcccaacgctggggagcagccaggccaggtggcgggcgcagacttcgagagcgaggacgagggcgaggaatttgatgactgggaggacgactacgactatcccgaagaggagcagctcagtggtgccggctacagagtatcagccgctcttgaagaagccgacaagatgtttctgagaacaagagaaccagccctggatggcgggtttcagatgcattatgagaagaccccgtttgatcagttagcttttatcgaagagcttttttcactgatggttgtcaatcgtctgaccgaagaactcggctgtgatgagattattgatagagagtagttagatgctgttaaaagaggaggaaactacttgaggagggacccaactttccgctatcttttgggttcattccaaatagttttgtgccattgaaaaacttgaccttcaaaaaaatttgtttttcagaatagaacacaataggacagtgactgcacagttgtgaaaaaggaagagaatcattaaagaaa

SEQ ID NO: 69128 - DNA, 1082 bp, Homo Sapiens
  misc_feature (888)..(892): n is a, c, g, or t
  misc_feature (894)..(905): n is a, c, g, or t
  misc_feature (907)..(912): n is a, c, g, or t
  misc_feature (914)..(915): n is a, c, g, or t
  misc_feature (954)..(954): n is a, c, g, or t
aatcattaagaaaagaaaaagattttaagaccgtgaatcaattatcaagaacgtcctaaaacacctatggctttgactttgttattgatccagattattttccttgcattggggaaaatatctttcatatttgtttgctgtaaagatggttttgcaagaataagtcatgaccaagacaaactgccaatacaaaagcccactgatactaattatataatgagaaaaaaatgtatccaactaggacacatatcttttgagttatttggactgaaagcttaagaaaacttggaaaattctattttgtgatctagtcaagccacagttatcaaaggctacattttcagtgtaagataaatggatgagtaaactcaaatatgtatcacgtgtgctttgtatcttaagatgtgtttccaagagcatctgaaattttgtttgtacatgtatcttgatcatttataaagccactgtgatctataaatcaagaaaatccattgtcataaccatttttaaaagtcaaaaattaagacatccttaattaaaaagtttcaaatctagacactaaatgtgtgtgaatgtacaaagaaaacaaaccattgcttatgctgttatatactagagaaattttgttttgcttgctgttttaacttgacagatgaaggactttagttgaacttcatattgtaagaactgttaataaaagttgtcaagtaaaaagcgctatatctaaaaagactttatgaacagttattctatcaacttttaaaggttttaaacctgcccagaaattaccttggtatctgaagtttccctctgtctcctcctctaattaagcttgttatttgtcatgcaccagcattggagataataaaatttcttgttctgtgtacnnnnnannnnnnnnnnnnannnnnnannaacatggtcggccgccctcggcccctcgaagaagctttnctagacccattcggtttggccgcgcgggcccccattaggggtaagtgaaacatgggtccataggctgtttcccctagggaaaatcctgggccatggacctaaaggccttgggaattcctcccccaaat

SEQ ID NO: 69129 - DNA, 878 bp, Homo Sapiens
  misc_feature (798)..(798): n is a, c, g, or t
  misc_feature (808)..(808): n is a, c, g, or t
ccggtaaccctttggttttatttctttttattcttgatgggcaaaaagcctcctttaaaaaacattattcttaagaaacctgggagagaaaaaaatgccagtgagaggaagacaaagaaaaattagaggcagtacattccatatttcagaactttagctttccagacagtccaattttgttttgtttacaaattcatcttgcagtacaaggtgaagccaaatggtacaaagtccacagaattgaaaagccattcatatttatcattcaattttttgatcttcaaatgttatgaattctccaaaaaggtaacagggaacagatatccctttggtctcactttatagacagggaaattaccaaaagaaaaatcttggctctaccatctctacttacagaaggtaaaacacttaacagagacagatttctgttggagttagactagatttcttttcacagcccttaatctcacgaggtgagaaggagtggaagttgccaagttgttggctaccagacccatcagtctgtttaactctggctaaaagcagagaataatgggcaagttaccaagtttcccccttcagctctggcgtgcattctgaaattgtggaagatcctcatgtaacacacacgctgcaacctgcatttgccacacagtccagggcatatagagcattgtgattcttcacagtccgcagagacaagaccaaaaatgaggactaaaaactaaaggtagctgagtttttcagatggattttcactctggcaaactcagtagttcactccctcccacccctcanatcatttaangtaaatgttcttccaataaacataaattgagctcttcatctgttatccatcacattctgccagttcttta

SEQ ID NO: 69130 - DNA, 737 bp, Homo Sapiens
  misc_feature (25)..(25): n is a, c, g, or t
  misc_feature (78)..(78): n is a, c, g, or t
gtaattgaattcttccatgaaaggnacaaggaatcaaggaagccatatagcatcaatgataatgacaaatgtttgtgntgaaaagagtgtgtataccattgtggttttggaagagttttcagaccttagtatgttcacacatcaccagactgtatctcaggagaaggtttgtgtttgtgaacaaggtgcccattattcccccaccacatgccatccaaagagatcgaggttaaaagaatcagacacactaaaaacacagtggaagcatgtctaggcataatatatcagccttttgagatatttattaaaaacttgttcttatacactattttaatatgtctaaagtgacacataccttaatttaagtgcctaagattttaattaatataatttttaattacaaacacttttactttttaataaacacgaatattttaacttaccaaaagatttagagatcacattaataatgtggctcatgtatagagaaatctgaatgtttagttttgaatggttaactgattaacattcagttatcataacagttaaccagtggttaactgaatggttacattactactgaatggttctataaaatgaaaaacatatttactttgtcttttcatttgactggcttttctctttcatctcatacacctgacagattacccaggtttgcaacagtctcataatctgatcctgtataacctttaaaataaaattctgaagccaaaacc

SEQ ID NO: 69131 - DNA, 692 bp, Homo Sapiens
aataagttaaagttaatacaaatataaaaaggggaaagtcctctagattcaatgacatccacaaattgtacattatttacaccaaaagcacagggctcgtgtgggtgaacagtctgcagtcaaagccgatgctgggtgtcctgtagtgtagcagcccccgcgccgtggcacggctcaactgagggttttgtcattttcaagtctgaaagtggctgttctcctgcctttgttgtttcatcttttcctggcgtctgggtttttcacccaatggggtgggtggtttgtgtcccgattcactgctagtcccagaaggtgtccagccgagactctttcgggaggaggctcttcgtgctggtacaggtgttgtgatcggaacgtgtcgatcccctcttctcatcactgctgcaccaactggatttattactccgggaatggtcagagccttggttggagcctaagagaatggaggagggcgtctctctggagccagaaaggtcaagggtcgagccactactccttgcttttctcagctgacgtcatccttcactttggaggcgctggcgtattcagaaggtgctgaatgtgtgctcgaggagctccctgggaggacttatttagtgtttctgtgttcacctcagcatccgcttcctgctgaggagcagtagctgactgggtgcaggacttcatgtgct

SEQ ID NO: 69132 - DNA, 717 bp, Homo Sapiens
aataagttaaagttaatacaaatataaaaaggggaaagtcctctagattcaatgacatccacaaattgtacattatttacaccaaaagcacagggctcgtgtgggtgaacagtctgcagtcaaagccgatgctgggtgtcctgtagtgtagcagcccccgcgccgggggctcaggctcaactgagggttttgtcattttcaagtctgaaagtggctgttctcctgcctttgttgtttcttcttttcctggcgtctgggtttttctcccaatggggtgggtggtttgtgtcccgattcactgctagtcccagaaggtgtccagccgagactctttcgggaggaggctcttcgtgctggtactggtgttgtgatcggaacgtgtcgatcccctcttctcatcactgctgctccaactggatttattactccgggaatggtctgagggggaaaaccaatgtgtttagcgtgcctgcccacctgcgcctgagcacaactatcctgcaatctgacctgcccctcctgcacaggaaaccaccttcccctcccaattgatggttcaaacactgccaccgctgactgccctgcatctgtgggtctgtagaacagaaaggtagaacaacttattttttaggatttaacgacaaccggttgaaaaaacggtagggtgtcatgctcacagagaataaagatttgtagaaaaggtgctgaactgccaag

SEQ ID NO: 69133 - DNA, 1360 bp, Homo Sapiens
agctgtccagcagaaggagatcacacagagcccatccacgtccaccatcaccctggtgaccagcacacagtcatcgcccctggtcaccagctcggggtccatgagcacccttgtgtcctcagtcaacgctgacctgcccatcgccactgcctcagctgatgtcgccgctgatattgccaagtacactagcaaaatgatggatgcaataaaaggaacaatgacagaaatatacaacgatctttctaaaaacactactggaagcacaatagctgagattcgcaggctgaggatcgagatagagaagctccagtggctgcaccagcaagagctctccgaaatgaaacacaacttagagctgaccatggcggagatgcggcagagcctggagcaggagcgggaccggctcatcgccgaggtgaagaagcagctggagttggagaagcagcaggcggtggatgagaccaagaagaagcagtggtgcgccaactgcaagaaggaggccatcttttactgctgttggaacaccagctactgtgactacccctgccagcaagcccactggcctgagcacatgaagtcctgcacccagtcagctactgctcctcagcaggaagcggatgctgaggtgaacacagaaacactaaataagtcctcccaggggagctcctcgagcacacaatcagcaccttcagaaacggccagcgcctccaaagagaaggagacgtcagctgagaaaagcaaggagagtggctcgacccttgacctttctggctccagagagacgccctcctccattctcttaggctccaaccaaggctctgttaagcaaaaagtgatgacaagcaaactggcctatgcccccaaccaccacagaccatcgacacgttccgatcacaacaacagtaccccgcccagaagtaccattcccggagtaataaatccagttggagcagcagtgatgagaagaggggatcgacacgttccgatcacaacaccagtaccagcacgaagagcctcctcccgaaagagtctcggctggacaccttctgggactagcagtgaatcgggacacaaaccacccaccccattgggagaaaaacccagacgccaggaaaagaagaaacaacaaaggcaggagaacagccactttcagacttgaaaatgacaaaaccctcagttgagcctgagcccccggcgcgggggctgctacactacaggacacccagcatcggctttgactgcagactgttcacccacacgagccctgtgcttttggtgtaaataatgtacaatttgtggatgtcattgaatctagaggactttcccctttttatatttgtattaactttaacttattaaa

SEQ ID NO: 69134 - DNA, 383 bp, Homo Sapiens
  misc_feature (297)..(307): n is a, c, g, or t
ccttttcactgttatggccttttcacatttctaaatcccatcttgatatactatgaatactctagaatgatgtaaagcagataggaatgtatgtgtacatatttattgcatacttgcacatcaaatcgatgtacatagtttaacacgtggtccttttgtgaaacctagaactcagaggattgctttttttctttcagcctattttgagtaacttcagtgctttcttagggaaatgacagggcaaagcaatttttctgttggctttgggctgtatttgtgcactaaatctttattctnnnnnnnnnnntggaaactttaatttttttaaaacgagaatttcatttacagctacattaaaatcttaatgagaaaaataatttaaa

SEQ ID NO: 69135 - DNA, 1291 bp, Homo Sapiens
cagtcgacggtaccggacatatgcccgggaattcggccattacggccggggggtagcttctatcctgggggctgagcgactgcgggccagctcttcccctactccctctcggctccttgtggcccaaaggcctaaccggggtccggcggtctggcctagggatcttccccgttgcccctttggggcgggatggctgcggaagaagaagacgaggtggagtgggtagtggagagcatcgcggggttcctgcgaggcccagactggtccatccccatcttggactttgtggaacagaaatgtgaagtttttgatgatgaagaagaaagcaaattgacctatacagagattcatcaggaatacaaagaactagttgaaaagctgttagaaggttacctcaaagaaattggaattaatgaagatcaatttcaagaagcatgcacttctcctcttgcaaagacccatacatcacaggccattttgcaacctgtgttggcagcagaagattttactatctttaaagcaatgatggtccagaaaaacattgaaatgcagctgcaagccattcgaataattcaagagagaaatggtgtattacctgactgcttaaccgatggctctgatgtggtcagtgaccttgaacacgaagagatgaaaatcctgagggaagttcttagaaaatcaaaagaggaatatgaccaggaagaagaaaggaagaggaaaaaacagttatcagaggctaaaacagaagagcccacagtgcattccagtgaagctgcaataatgaataattcccaaggggatggtgaacattttgcacacccaccctcagaagttaaaatgcattttgctaatcagtcaatagaacctttgggaagaaaagtggaaaggtctgaaacttcctccctcccacaaaaaggcctgaagattcctggcttagagcatgcgagcattgaaggaccaatagcaaacttatcagtacttggaacagaagaacttcggcaacgagaacactatctcaagcagaagagagataagttgatgtccatgagaaaggatatgaggactaaacagatacaaaatatggagcagaaaggaaaacccactggggaggtagaggaaatgacagagaaaccagaaatgacagcagaggagaagcaaacattactaaagaggagattgcttgcagagaaactcaaagaagaagttattaataagtaataattaagaacaatttaacaaaatggaagttcaaattgtcttaaaaataaattatttagtccttacactgaaa

SEQ ID NO: 69136 - DNA, 864 bp, Homo Sapiens
ggtctatcctgggggctgagcgactgcgggccagctcttcccctactccctctcggctccttgtggcccaaaggcctaaccggggtccggcggtctggcctagggatcttccccgttgcccctttggggcgggatggctgcggaagaagaagacgaggtggagtgggtagtggagagcatcgcggggttcctgcgaggcccagactggtccatccccatcttggactttgtggaacagaaatgtgaagtttttgatgatgaagaagaaagcaaattgacctatacagagattcatcaggaatacaaagaactagttgaaaagctgttagaaggttacctcaaagaaattggaattaatgaagatcaatttcaagaagcatgcacttctcctcttgcaaagacccatacatcacaggtttttgctttgtggtattctgctaacatacagttttaacaaatgcccagggttaaacactcacttaaatttgaatgtttgattgacaaagcgtaatattttagacattgtgagaggcaaaaacataattcatcacatatgaggttcttcttgagagcaacccctggaaacgggcgaattggcgggcatttatggacctggatggcaactccgaggggaccctttctcaagccccgaaatctaccaccgggcaggcacgggcggttaacaccgaagcacacgggcgcgcgcggtgccggcaaaatcgcccccatcggtcccgcggcgcgatcggctcccgcgcccttctgaatattaggcggcgccgagcgcctggctaagtcacggcgcggggtcgacccgggcgcggcgggcagagttgtagccccaccctcgcgcggcgggcggaa

SEQ ID NO: 69137 - DNA, 670 bp, Homo Sapiens
ggtacatgtatatatttgtcctgcattatgttttttacttgatataaatgtatttttactgtgatagtccaagtgccctggggggcaggtgtgctctatgtggttcttcttccattggagagctggcgtagagatctgcagtgttcacaaggatgttggtttggagatgtctgctgctaggacctggggtgtgtgactcagtccatatgagagggacatctgggtggaggagtaaattcctgtgctctgaaatgccacttggtagctctggacaatgaaggacaattgactcaagggtgcctggcttctgctgctgctgggaaaaaattcagtttatagcattcctgcacctcccaaagtagataacctggaggtcattcagttaacaactgtccctgaggactcagttttgggggaggggttatctgggagaagctttagcctgttctgagccattaggagacattagtgaattggagcactggagaatcctacaaatggcctatgtctcagaagagctgggacctccttccagctgctgcagatgctgacaggccctgggaggctgctgtgctctggagaagctggagcagctcatttcttggcctagcctggctgcctcagaaagagcagtcaggacttgagggaagcatcaattctataccctata

SEQ ID NO: 69138 - DNA, 2080 bp, Homo Sapiens
  misc_feature (101)..(157): n is a, c, g, or t
  misc_feature (264)..(284): n is a, c, g, or t
  misc_feature (761)..(769): n is a, c, g, or t
  misc_feature (1015)..(1031): n is a, c, g, or t
gatcatatgcagctgcacgacaggtctcgatggaaagcggcatgagccaacgcagtaatgtgagtagctcactcttaggccccacagcttacatttatgannnnnnnnnnnnnnnnnnnnnnnnnnnnnnnnnnnnnnnnnnnnnnnnnnnnnnnnnacatgatacgaattaatacgactcatataaggaatttggccctcgagaccaagaattcggcacgaggatcacgcgtagggatggtgaggagacgcgtagggatgttnnnnnnnnnnnnnnnnnnnnncctgctggtgcccttgcaccagattgaggcctgactcaccctgcttccccccacaggccctgctttgcttgcctgctttttccagaatcgattttgcaagcttcaagattctgttcccctcttcgcagaagtgaggaaggcaaatactcagggtttgaagggagacctggccggcctgagggctggcagatgtgagggcaggacacctgggatggactcgtaggctgacccaggcccaaagggggctgcctgttcccaactctttcactctgtaacccattttaaaatgagtttttgaatcttgcctcaaattgacctacttggataaaatcagtgcttttcctaacttgattttgtttgacgtggttccctctaagagaatggtaggaattgaaactatttgtatatgttgaaatttgtaggggttcaggaacccatggcagaaacactaaactatttatttacaagtatgactannnnnnnnncaaagtaggcaattctttgtatattttaaggcaaataatcacttcacctctggtgccttccatgcgtcgcataagcactcttgtcaatcatggaattggaaaaaaagatgtacatttagttaaacaagataacactatttttgtagcatgattttagattgtgtccttttaatattgttttcaacaatggtagttttgaggttttggccattttctctttacacttcgtatgtattttaaagaagnnnnnnnnnnnnnnnnnttccctggctattcctctttcctctctgctgctgcttctcctgcatcttgttcctgcttatttaaatagtctgagagtaagagtatatttctgtgaaataattataagtcagtataattgcatttggcattttttaaccacttgctcagtttggagccactgctcacctcaaacagtacaaagaaagtggttccatattttacaaacagaagagtagcatcagagccctgacctcctgtctttgggtgtaaaatggtgagaggccggtgtccggctccttcccctgtggtttgggctggtgaactgagcccaagtgtattctctggcctgggccccttccagaatcagtgcgagcgtcctgcagaggcatggccttcctgccactgcagagtgggaagcttcctgggggacctcagccagctccggggctctcatcttccactcggatctcagattggttcgttgtggatgctctggctaggctcggcggccttttccaggcttcaggcctgaacaaaaacaggctgtttgctgtgaggagctagatgacacccaagacacagcacaacgtactcttcaccgggctcctttttgcttctccttactgcaggacgtgagtcatgtctggtcccaaaacccttgagtaaactagctgagccattgcaaactgaaggtacagcatggattgaaacataaaattgtagctttttggtgtccttctgaagggtccgaactatgtcattcatcttttgataaccaaggaagtccaagtccagatgggctaaagtagtaactttcccatatgatttctccgttggtaactttcatcttggtgggcacttttggggggcacatgttaacaacctattcacatttttactcatccacgtctctttcactttcggcagctttaaagacccattgtgggcttctgaggcgatgccccgttgggccacctacgttctgtgtttgcgtttcacctgacgtgaagcctggttggcgtccctggtgctggctttggtcctctgtttttgctggtgggcccattg

SEQ ID NO: 69139 - DNA, 631 bp, Homo Sapiens
  misc_feature (415)..(576): n is a, c, g, or t
  misc_feature (592)..(592): n is a, c, g, or t
aaacgaggggaagtttctctttactgaaatattgcaggtaataaaagaagaaggagaaacagagaacattatcgttttatggcctctaatggaacaagacatctaggcaatgatgaactatggtcaccaacatcactcaatcaggaacaatcagacactgtgggcccctgaaggaagtaaacaccaccacgtaggaaatattctcaccaaaacttcaaaaacttgaatctgatctagtctttagtttcaactactaatttacaggcaatacggggctcacagggatgtggtaaaatgtcacggaaatataatcagcaaaatccagtacagataataagaagacaaatgatccacacatggaaaggaagaatgtaaagttgtgttggtaaagaaattcacagattaataaaagctnnnnnnnnnnnnnnnnnnnnnnnnnnnnnnnnnnnnnnnnnnnnnnnnnnnnnnnnnnnnnnnnnnnnnnnnnnnnnnnnnnnnnnnnnnnnnnnnnnnnnnnnnnnnnnnnnnnnnnnnnnnnnnnnnnnnnnnnnnnnnnnnnnnnnnnnnnnnnnnnnnttaacaacaacaacanaaagaaagtactacaaaatctgacctcgtgccgaattct

SEQ ID NO: 69140 - DNA, 723 bp, Homo Sapiens
  misc_feature (183)..(242): n is a, c, g, or t
  misc_feature (272)..(272): n is a, c, g, or t
  misc_feature (358)..(358): n is a, c, g, or t
  misc_feature (630)..(645): n is a, c, g, or t
ataaggaagggaactaaaaaatgaatagtagagtaaaggagaatgaaaatggaaaaagaagagagaaagtagtataaaagagtgaaaggtatataaccaatcagagaagtgttatgatagacattaaataaaaaaagaaaactataagatgatgtaagggaataatgtaacggcgatagctgnnnnnnnnnnnnnnnnnnnnnnnnnnnnnnnnnnnnnnnnnnnnnnnnnnnnnnnnnnnntttctagtatgagcattataaacaatgccnatgaatatgagaatgataattcttatcataatgataacattcagacattattcactcttatcctaggtactatgacttgccattgnccagatgcagaatcattagcgaaaataaaatcaaaggccttttcagttgtcatacaggcatccaaatcaagaaggcatcgtcaagtcaaactcgactcttctgactctgattctgcatctggtcaagggcaagtcaaagcaactaggaaaaaagagaagaaagaaagattgaaaccagcaggaaggaagatgtctctcagaaacaaaggcaatgtgcagaatatacacaaggaagataaacctttaagtctgagtatgcctgtaattacagnnnnnnnnnnnnnnnngagcatacagccgcggccgcaagcgtattccctttagtgaggataatttcgagcatggcactggccgtcgttaaaacc

SEQ ID NO: 69141 - DNA, 983 bp, Homo Sapiens
  misc_feature (29)..(29): n is a, c, g, or t
  misc_feature (668)..(668): n is a, c, g, or t
  misc_feature (799)..(880): n is a, c, g, or t
gggatgtggtttaatccatgtaccaatanggggctagtaccacagaggcctcctgtggtgccctcgtatcataccacctgttcctgtggagagggaatgaccgccactgaaggtaccctacaaactggctcatattatccagaggaccttggccccttctaaatctctagtctctctcaatatccttcatcaggtgttttaagatgtctctgagaagccatcaaggcaaaagagaactttaagttccttgttccagcccggagttttgggaaagaaagaaaggaaaggtcacagtgacctaggattggaaccttcctgcccttttggcttgcagactgccttctatcccagaacagctgagaaatctatgaagctgagattctgaaggacccagcttaggttcttccacttaggcctcaattcccttccttttccaggggcagccttagttcccatggccctgaaacacacacatttcccccttcctttcccagaagccactggccccccatagcacccagtgcatcctttttacaagtggaagaactaggatggctttccaaagtcttctagaaatgaagttctttctctgtgcagctttcccccttggagcaggagtgaagatgtttcattatcttgggcctgggaaaccacttccccaggcttcntccctccccccacccccataggaacaggatttggccttagcttctgggcctatcggctgccttccctctacttcctaccacctcttctgccttcctttgagctctgttgggcttggggatcttagttttcnnnnnnnnnnnnnnnnnnnnnnnnnnnnnnnnnnnnnnnnnnnnnnnnnnnnnnnnnnnnnnnnnnnnnnnnnnnnnnnnnnttctgagaaagcatttgcctttcttcctctcccaacataacaatcgtggtaacagaatgcgactgctgatttaccgatgtatttaatgtaagtaaaaaaagga

SEQ ID NO: 69142 - DNA, 543 bp, Homo Sapiens
tcaaccgcctttcctccaactttttcttctttctgtgcttgtcttctgccccctctcttcctggttggaatacccttcccccattccatgctctcattcatggctgactcttaaaataccacttctttcctgaagccttccttcacacagtcaccatcctgacaccaactcccaggtagaatcactttctccttgagccttgaagaactttataaccagaacacccatcacatttcagaagtatctatttcccttgtggactgtgatagcgattttaaagttttaattatctttgtatctccaaagctaaggcaaaagtcaagtgcctagtaagcactcattcaaatgccactgaactgaatttctttaggaaaaagttattaatggtccctgttcaaatctatcctgaaagtgtaaaaagtcaatatatataatccagcaactaaaattctgaaatgtttaatactgcttttacatattaaggggggaaaccccagaactccccaatctcacagtataaaaataacacaataaaacagtaaa

SEQ ID NO: 69143 - DNA, 1380 bp, Homo Sapiens
  misc_feature (269)..(277): n is a, c, g, or t
  misc_feature (407)..(407): n is a, c, g, or t
  misc_feature (414)..(499): n is a, c, g, or t
  misc_feature (512)..(524): n is a, c, g, or t
cccttcggccccaattttttataccccgggggccattcatagtttggccaatgcccgcccaagggatttcaagtgtccccccaggccattttgggtttgggcttccccgttggcgagaaattttcaatttagcaccaacccttattgaattaataccagggcggggggtaatttaagatcgggcttcatttgatttcggggtcggatggccttcatgcgcttggaaccccaatgggctttggtccccctcttgggttggccccgggggnnnnnnnnnggcggggatttttagccctgggcgaaacccagctttccttagaaacaggtttttcccgggtcccgttcctgccggggccccgtgccaaatgggttgttttgaaaaattttttgggggccgaagcgtcccnaaggtcnnnnnnnnnnnnnnnnnnnnnnnnnnnnnnnnnnnnnnnnnnnnnnnnnnnnnnnnnnnnnnnnnnnnnnnnnnnnnnnnnnnnnngctcataaacaannnnnnnnnnnnnctcagtatgtgcccttgaagattccaaaatgttggagtttctgattctcctgggatcaaaggtaaaagcattgtatggaaacactcaaccttggctcattaccctcctgaggagctaagtctggaggcctcagagagagggagctgacattcacaacttattccaagatgggtaacacagtgaacaaagaattagtaaaacatagactcagtctgtagagggcttcaaatatacatattctatatatataaacctgttatataggatttcaacttattggtttccttgtgatttgtaattaaagtacaaattataaagatgttgcacactgctgatttccccttctcagcccccctccctccccaacataaataacattacaaaggtcaggtgatcctaagaatttttgttgttgtaaatattttgtttttaaaatcatattccccttcctcccctgcaaactacctctgagagtttgtaacacagcagcatggaatggacaagactggggacagcatggaggtctaacggagagagcgcagaacgttgcttctcactgacgggcaccagatgggcttccgcatttccattgacaacagaggctacgacaggaagcagagaatgtgcaatgcggcttcatcctcctccaaagagaaggctagctggaccactgagaaaagccctaaaggcattgaggtttaggagacagagcacagctccagaaatgtcttggctccgtatttacacaatatcttgaagctgcactttccttttaagaaatgtgtgtttctgaaggtgcctcttctgaggttggttgggggaaaggagaaacgtaaaacagaacaaccaaattcca

SEQ ID NO: 69144 - DNA, 703 bp, Homo Sapiens
  misc_feature (87)..(87): n is a, c, g, or t
  misc_feature (418)..(472): n is a, c, g, or t
aagtctcttggttgtaccatgtgacacaccctgtgcactggtcgctgtcttcgtggcttccacccttgttaatgatgctcctgcctntgcctcccagcccctcacccagcacagctttgcctggacttggagagatgggaggcagacccccaccaccatacatgctgtctgtggcccctcagacattctgtttcatctcccattcatctccctcctcccaccgtgtccagtttttctgcctttccctgctctgttcttccccctccttaggccccagcctgggcccagacccatcctcccagccaggtttccctccagcaggctccttccctccctgtcacctccctctcaccaacccggggtctgagcccctcattcctgaccgtccgtgttctcaggagtggttgaggacacaggnnnnnnnnnnnnnnnnnnnnnnnnnnnnnnnnnnnnnnnnnnnnnnnnnnnnnnntttggagcttttctcttgtcctctcactccttcccagaagtttttgcacagaacttcattttgaaagtgtttttctcattctccatacctcccccaagctctcctccagcccttcccagggctcagccctgctgtcctgagcgtctcctgggccagagagaggagatgggggtgggagggactgagttgatgttgggtttttcattcaataaattggtgattcttaccgac

SEQ ID NO: 69145 - DNA, 1630 bp, Homo Sapiens
ggaattcggtttttttaccagaaaaggccagggtaacttcttcgttttccaaggcggggggttttttaatgggccaaaaccggctcgggctttggcgccccccccggggttttcccgggagattatggttgtatttcggctggggtggaagggttctacaggcaagaagtgccgcaggcttcgaacgggctttatactttggggaacggacatcttgggtccccccaggcctttccttcaccccgacttccaaaacttcttccttgtggtatcagtttccttctcggaaatgagaaagctggaatcctggtccccagcaggagagcctagtcctcccccagcccctccagccaccagggtgtcctctaggatgcagctgccagatccactcactctgctgcctccagcaggacccaaggccactttcaactcttatggggttctccacctgccccagagcttcccaagggagggtaaggggggcaccctgagcccacaggacccctacttcacagctcacaggggcaggaggcagctcccctgcctccaggaccctgttgctatggtgacacagcgtttctaggacagaggggcctcccagtctccccccaccacccgtgcacgacttcctcaccacccccaggttccctgcagatgtcgtgtgtgtcctgagtgtttctttggttctttgcacgccaagtctcttggttgtaccatgtgacacaccctgtgcactggtcgctgtcttcgtggcttccacccttgttaatgatgctcctgcctctgcctcccagcccctcacccagcacagctctgcctggacttggagagatgggaggcagacccccaccaccatacatgctgtctgtggcccctcagacattctgtttcatctcccattcatctccctcctcccaccgtgtcagtttttctgcctttccctgctctgttcttccccctccttaggccccagcctgggcccagacccatcctcccagccaggtttccctccagcaggctccttccctccctgtcacctccctctcaccaacccggggtctgagcccctcattcctgaccgtccgtgttctcaggagtggttgaggacacagggccccagcccagccctctgcaccccccagcccggccatctgcgccccacagcccctttggagcttttctcttgtcctctcactccttcccagaagtttttgcacagaacttcattttgaaagtgtttttctcattctccatacctcccccaagctctcctccagcccttcccagggctcagccctgctgtcctgagcgtctcctgggccagagagaggagatgggggtgggagggactgagttgatgttgggtttttcattcaataaattggtgatttcttaccgactgccttgggcttctatgccccctcactgtgccacaggagctgcccaaccccttttccacagtgcagcccaactccagtgaaaatccaccaggaacgtaggtggaaagaagcgtactcccatgttctcaatcatggaaacaggcatgaaggtgtctcacctggcatgaggcaagcagaggtccggaaaacagaaaagatgtccttttccaacaccaaaaaccccgtttttt

SEQ ID NO: 69146 - DNA, 690 bp, Homo Sapiens
  misc_feature (616)..(627): n is a, c, g, or t
gaacgagggtgagtgaaaaataaatctgtaagccactgaggtttttgggttgtttgtttctgtagcgtaatttatggttaaactgactgatagaactcttaagcagaatggatttaaaccctggttttggtatgatccacgtgttctcctcaaggactcttgatttctgcaggacttcctgagggtagtcaatgagttggtgattgatgactagttttcccttatgtgagattcaagttcaggctatttcaggtaagccaaggtatatgcagagtgacctcacctgagatgtgcttaaactgagtcaccctggactacttagtggacactaagtgggtgtgggtgagtcagagcccagttgttgggagcggccgtttatagctgtattctggtgaaatgccttgcaaacattaaagtcagaaaatcccattgagactggaatcaacaacacctcactttgggacatcatagcagttcttggtggggaaggggctggtggggagggaggggaggaggaaaatgttgtagctttgaaggtccactcttgtttttcttcattccttgcaattaaagctgattccattatggaagcatcaatctgtggacaatagcttcnnnnnnnnnnnncccaaagcagaaaatccagattctgtcgttcaaattcccacgggaaaagtggtggccctcaaa

SEQ ID NO: 69147 - DNA, 1242 bp, Homo Sapiens
  misc_feature (596)..(608): n is a, c, g, or t
tcagaaataattgatctgtgaaacccaaactctcaatactcagaaagctgggaggcaacctcgaggcctgggcctacgagctgcatcttcgctacggaagggccagggcgccatcagccattcccaaaacacaaggcctgcccgtccgccagtgagtccttggtttttaataatgagaagtcctttcccccaaggtgtgagcattgcagcgcagtgtgtgtgtgtggttagagccagcttagtccttcactttgtcgaccgaagtgggagctcaacagctgcatgaggagggcagcgcgtgcattagccagtcgccactggagggctctgctgccctccggtcaatacactgtagttactgcctagccagcagcagtcttctgcatcaagaactgaaaccttgctcggaggtgatttttatagcatcctttttaattaaaggtgaaatacagattgctatataatgtctgaaaaaacctgatactacttcaagagtttctgctcagaagaaaatgagagttatcataataggaagctgtggcggtccatgccaactgtgctgtgtcacatacagcgatgagagtggctttcatacnnnnnnnnnnnnnaagttaacaccctcctttacccccagcagtatctcaggttatagaatcagagatgcagcagtgacaaatggcattttaacttgtaaaatcgtgtgatgatgcttatcattttgaaatagaagaataaaaacctggtcccgtttcaccagacatgaatttcaagtggagtcgtcgttctctgagagtgagtgtcttgacattttcacccaggccctcctgtcatcacatcaccggctgtcactggcgggtggccgtaaacgtcctgcgttgctatattaggatctctgcagttcaggcttcaaaaccagttcagtgtatccgggcgacgggtagtggtggtgcatgcctgtctgtgtgccccgctggcgagctgtagttgcggcttgcgtgcctcgcggcccactacagggctgcagacaatcgaggcgagggcgctggccgccagcagctcacagcgcgggggtcatgtggtcgctcctcgagggtttcgtttttgttctgcttcattaagactggaatcaagcttacatgtaaactattggtaatttaagtttccttttgtgtcattcagtgtaaaactgtctaatttgaaaaaaaatgtaggttatgaaaataaagatttaggcactgttca

SEQ ID NO: 69148 - DNA, 747 bp, Homo Sapiens
  misc_feature (55)..(55): n is a, c, g, or t
  misc_feature (90)..(125): n is a, c, g, or t
  misc_feature (131)..(247): n is a, c, g, or t
tatgtttagtacagggagctctaaagctgagatgcctttcagagttgtcccaagntggggtgagaggttcatggcttacgccaacagcannnnnnnnnnnnnnnnnnnnnnnnnnnnnnnnnnnncagtannnnnnnnnnnnnnnnnnnnnnnnnnnnnnnnnnnnnnnnnnnnnnnnnnnnnnnnnnnnnnnnnnnnnnnnnnnnnnnnnnnnnnnnnnnnnnnnnnnnnnnnnnnnnnnnnnnnngaaggaatttccactagcggaaactaaagtggggattttacaggttctaacttccaaatgacttgccctgtaagaaggggttgctccctcccaccaccgcccattcctgccagcctccggtctcccagccatcccatggagttttcaccctaactgcacagccctgacatcagccacgtcccttcacccctgctttgtagtaaccaattagcttaacgtctgttcccatggttatttagtttcgttggcaactaacatacttccagaaacaggccagcatctcccagtcccaccaccatcctgctggtggggccgtcctcttctggatgtcagatgagaactctcctgctggggaacaacagaaggacagaacatagaaccagaggaaaatgcattcaaatgcattccatcagtgtttctggacagtctacaatgtgccctggccggtgatcgctgctggagatatcgaagtcattaaaacatggtctctgtcctcaagg

SEQ ID NO: 69149 - DNA, 2834 bp, Homo Sapiens
  misc_feature (1856)..(1939): n is a, c, g, or t
  misc_feature (2087)..(2236): n is a, c, g, or t
  misc_feature (2471)..(2479): n is a, c, g, or t
aaactataggctaggtacgaggactgggtggtgaattcggcacgagggcggaagtggaggaaagatggaggaccatcagcacgtgcccatcgacatccagaccagcaagctgctcgattggctggtggacagaaggcactgcagcctgaaatggcagagtctggtgctgacgatccgcgagaagatcaatgctgccatccaggacatgccagagagcgaagagatcgcccagctgctgtctgggtcctacattcactactttcactgcctaagaatcctggaccttctcaaaggcacagaggcctccacgaagaatatttttggccgatactcttcacagcggatgaaggattggcaggagattatagctctgtatgagaaggacaacacctacttagtggaactctctagcctcctggttcggaatgtcaactatgagatcccctcactgaagaagcagattgccaagtgccagcagctgcagcaagaatacagccgcaaggaggaggagtgccaggcaggggctgccgagatgcgggagcagttctaccactcctgcaagcagtatggcatcacgggcgaaaatgtccgaggagaactgctggccctggtgaaggacctgccgagtcagctggctgagattggggcagcggctcagcagtccctgggggaagccattgacgtgtaccaggcgtctgtggggtttgtgtgtgagagccccacagagcaggtgttgccaatgctgcggttcgtgcagaagcggggaaactcaacggtgtacgagtggaggacagggacagagccctctgtggtggaacgaccccacctcgaggagcttcctgagcaggtggcagaagatgcgattgactggggcgactttggggtagaggcagtgtctgaggggactgactctggcatctctgccgaggctgctggaatcgactggggcatcttcccggaatcagattcaaaggatcctggaggtgatgggatagactggggagacgatgctgttgctttgcagatcacagtgctggaagcaggaacccaggctccagaaggtgttgccaggggcccagatgccctgacactgcttgaatacactgagacccggaatcagttccttgatgagctcatggagcttgagatcttcttagcccagagagcagtggagttgagtgaggaggcagatgtcctgtctgtgagccagttccagctggctccagccatcctgcagggccagaccaaagagaagatggttaccatggtgtcagtgctggaggatctgattggcaagcttaccagtcttcagctgcaacacctgtttatgatcctggcctcaccaaggtatgtggaccgagtgactgaattcctccagcaaaagctgaagcagtcccagctgctggctttgaagaaagagctgatggtgcagaagcagcaggaggcacttgaggagcaggcggctctggagcctaagctggacctgctactggagaagaccaaggagctgcagaagctgattgaagctgacatctccaagaggtacagcgggcgccctgtgaacctgatgggaacctctctgtgacaccctccgtgttcttgcctgcccatcttctccgcttttgggatgaagatgatagccagggctgttgttttggggcccttcaaggcaaaagaccaggctgactggaagatggaaagccacaggaaggaagcggcacctgatggtgatcttggcactctccatgttctctacaagaagctgtggtgattggccctgtggtctatcaggcgaaaaccacagattctccttctagttagtatagcggacttaataaaagaggaaaaaactcttnnnnnnnnnnnnnnnnnnnnnnnnnnnnnnnnnnnnnnnnnnnnnnnnnnnnnnnnnnnnnnnnnnnnnnnnnnnnnnnnnnnnggggggcccctctaaaatatcccccggggggcccaagtttaccggtacccagtttttttgtaaaaagggggccctataggggggcgtattataaattagggcttggccggctttttaaaacgccgggacggggaaaactgctacttgnnnnnnnnnnnnnnnnnnnnnnnnnnnnnnnnnnnnnnnnnnnnnnnnnnnnnnnnnnnnnnnnnnnnnnnnnnnnnnnnnnnnnnnnnnnnnnnnnnnnnnnnnnnnnnnnnnnnnnnnnnnnnnnnnnnnnnnnnnnnnnnnnnnnnncccgggtatgtttttgggaaattttttcccccgggggctagggggttccaattggtttggggattttaaaatccaagcccccggggtttttttggggcccctaggcccccaacaggggggtctggggcaaaaacccgcccaaccccatttttgaagaggtttttttgtgcttataaaaaaaattcccaaaatctccccctgtgagctgtgaaatttaaaagggaagggccatttnnnnnnnnntaaccttggtttattgggcggctctataaaggggtgacaaaataaagcgcaatacgcctccccaattttccccaataaaaagacatttcttttctcccgcgcattccaaaaagtggggggttgctccaaacacccctccaaggggtatctttaaaccggggtcggggggaaaaccccgcgcgttaaatagagaaaccgcgcacaacgcccgggaggaaagaaaggcagcttcggccatcttgtggcgcgcgctacatacaaataaaagagagctgccacacacggaattccccctctctccctcagcgtatcgcccgcgcctggataaggtgcataggtgggccccgctcccccc

SEQ ID NO: 69150 - DNA, 391 bp, Homo Sapiens
gaactaagttcccctctgttccttctacaaagataccagccaaatacggcaatacccagtagcgacgtctgtagcggtcctgacccagggagaccgcccgaagcatctgggatgagtgaagcagctttttgcgaaagaaaagctgacgcttgctgagtttttctatctggcgctctagctctgggatgctagatgctgtggcatcaacctctccatctcttcgacccctgcggccagggacagctgctatagactgcctcttcttcctcttcttccatgccactggtctcctccatgattctcgagaactgcgcctccgtcgccaggcattcctctggcccttccatctctagttcagcgcgctccgttcgcttggccagacacgtgtctg

SEQ ID NO: 69151 - DNA, 1115 bp, Homo Sapiens
  misc_feature (950)..(976): n is a, c, g, or t
ggcacgaggttaatccggaagaatagaatggcactttttcaacatttgacttgtgtaattccaatcctggatagtctactaactgccggaattattaatgaacaagaacatgatgttattaaacagaagacacagacgtctttacaagcaagagaactgattgatacgattttagtaaaaggaaatattgcagccactgtattcagaaactctctgcaagaagctgaagctgtgttatatgagcatttatttgtgcaacaggacataaaatatattcccacagaagatgtttcagatctaccagtggaagaacaattgcggagactacaagaagaaagaacatgtaaagtgtgtatggacaaagaagtgtccatagtgtttattccttgtggtcatctagtagtatgcaaagattgtgctccttctttaagaaagtgtcctatttgtaggagtacaatcaagggtacagttcgtacatttctttcatgaagaagaaccaaaacatcatctaaactttagaattaatttattaaatgtattataactttaacttttatcctaatttggtttccttaaaatttttatttatttacaactcaaaaaacattgttttgtgtaacatatttatatatgtatctaaaccatatgaacatatattttttagaaactaagagaatgataggcttttgttcttatgaacgaaaaagaggtagcactacaaacacaatattcaatcaaaatttcagcattattgaaattgtaagtgaagtaaaacttaagatatttgagttaacctttaagaattttaaatattttggcattgtactaataccgggaacatgaagccaggtgtggtggtatgtgcctgtagtcccaggctgaggcaagagaattacttgagcccaggagtttgaatccatcctgggcagcatactgagaccctgcctttnnnnnnnnnnnnnnnnnnnnnnnnnnnccagggacacatttctctgtcttttttgatcagtgtcctatacatcgaaggtgtgcatatatgttgaatgacattttagggacatggtgtttttataaagaattctgtgagaaaaaatttaataaagcaacaaaaatta

SEQ ID NO: 69152 - DNA, 1725 bp, Homo Sapiens
tttaccccacttcagaacacccaggccactgattttatcccattgggaagttttgctttgccctctaatacgctgaaatcgtgcagcctgaggcatacgcatgatgtcctgtgtagcgaatgtcacagcgcacaacattgtgggtatagtcagattcaggaaccaggtagctggggtttacactgacctttaggatatagtttccaggttttacatctgtaatatcaatccactggcagtctatgtctgcaccataggtatcataacagccaggactcaatccctgtgtgtgtgcagtacatgcaaatcgcctgtggtagccatagtcacaggatgtgtcttcaagacagaaacttgctttgtggccttcagccactctcctctgggtgttggcatcaagcaggtcatagtggctaaactcatccatactgtggtaatgttgatgacaactgtgccattcccaggaatatcttggtcggctgggtaagaaatctgatgtcccttggtttttcactctttggggaaatctgagcagcaccctgtgatcataatctctgacatctgccctgtatgctgtactggccagacagttttcctccgccgcgcatctcaggttgtacatggacatcttctgcacgtacgtggacgcctggatgtagtaggggtcggccaccaggtctgggagaccgtactggaagtagccagtgccgtatccgggccggtacctgcccccaggtctgggcctttcataagtatcgtagtagttgtaataagggttgtcgtcagagtacttgtaggggttgtaagggtcgtcgcccaccatgccgtccacgcggctgggcggccgcaggttactgagcgcaggaacttctcccggcgctgtctggttctccgcgcgcgaggcgccagcttcgcgggctctagatgtcgagtagccagcttggaaccagtgacgggcggtgggcctggggcggccagcggtgactccagatgagccggccgtccgcgttcgcgccgcggcggtgcggttgtcgcggatcagcaggatcggagtgcggggctgctgggcggaggcgttggctgcaccagggacggcggcgcccgggtcccggcggcgctgaggctggtactgtgagcccaggctcagcaagctgaacacctgcccgttgttctcccattggatctgctggcgccaggcgcccggagccgccggcggctcgcgcgggggctgctgttggccggcggcgggaggggcgcagtgcactagcgcgcagagctgcaaaggcccgagcaggagcacggtccaggcgaagcgcatcactccttttgccagattgaccccgctcgaggaggacgtggctcacagaaaataaaaacggggctcaaatcacgtgagggaaggagaaatcttcaaccaaggaggcgagcggagcacgggtatctcagtctccaccaagcaatgccaagggtgggattcagacccttccccagtcaaggcggctgctcggacgtggcacccttccctttcccctttctcagtcctggaaggcaacggggagcggcgcggcagtcccggagagcgggcagtgtctggagtgaaggaaggaggagagattttaaactttctggcacgtttgcaaagttacacaagccgttctggcccggccgcccctcagcctcgtgccgaattcggcgcgccgtcgacttcatactctgtaagacaaa

SEQ ID NO: 69153 - DNA, 522 bp, Homo Sapiens
gagcttcacatcagatttaaactctcacatacaaaaccttggcttccctgacaaggcagatcttctaaactcaatgtgagaaaacgttatctaactctagtgtaggagtctaatgttggtaaaaagaattccattgcacagttcttggtagcaagacagtctctggacgacttaatattcctttaatacatttttgggtagcattctcctcataaagaaggatacattaaaaaaaataacttgtttcgcgactcggcatccataaggaactcaaatgctgcccagagaggggctgagtatttccttccaagtgagccttcgcttgcacaacaagattagcatctgcaatggtccatttctgcataagtgaacatatagccttgctgcttgatcgaatagtccagggttctccgtgtagcagctcctgacaaccacccagcagcagttctgtttgatctctcctgcttccttaatttgggttgtcaaggttcagcagttggaggctgtttactttacttttcc

SEQ ID NO: 69154 - DNA, 684 bp, Homo Sapiens
agaaaaagatcctggaagtttatctgatctgacatgtttttgtaatatttagaaatagctcttgtatcataaaaagttgcccagtataagacacacaagatgtatttttttctctggtgaaaatcatgcctatcactagtatatgtttgacatttgtagtatacttaaaatagtattgggtgtgaggcatggtggtgatgaaaagtagtccttacggctacttgttagtcattagagagaacatggagaaggggtcaaagttggtatcattaacagggcaatgacttgacccttctttcaactgatcttactggtagttgtctctagtttttaagtaaattaatgatggaccatcccccaaacagagaactatgggggtatgaaacaaggctgaaggcttttaaccatgggagaaaaaggtgttggtattattcatatagcataacctgaggttggagaggaccacttgggagcctgtaaccaaaactagaaggtaacttctgggatggacggaggttcccttgaagcagtgccaacctaaatctacctcaggtaagtagttagattaactttttcaagatttcagaccaaacaagacaacttgtattcagttgatgtattcctatgctttaatgtttttgtttgcccttaattattaaataaacatttgttctgaaaaactcc

SEQ ID NO: 69155 - DNA, 1128 bp, Homo Sapiens
  misc_feature (63)..(63): n is a, c, g, or t
  misc_feature (466)..(525): n is a, c, g, or t
ctaaaatgtacatgagataaacctctcaccactatgtgtcccttgagaaatgcaacacttttntagtcttcatacttgtaatctataaaagaaattctgaagtttagaccaagttgcccatttctgcgtaattgacataagttctgttaaaaatattataagtaattcgtttcggtttgtagatgtttcccctgacttgttaaagaggaaaccaggaactcagtcatgtttttgtcctggataatctacctgttatgccagtactcccatccgaggggcatgcccttagttgcccagatggagatgcagttcagtagatttggggcaaagtggctacagctctgtcttccattcactcaacacctgttcatgactgagccaggtgcccaggacacatcctaaacagtcagcttctatcctgtgtcctagttggggagacagagtgccagccagcaaccctcccagnnnnnnnnnnnnnnnnnnnnnnnnnnnnnnnnnnnnnnnnnnnnnnnnnnnnnnnnnnnntacatcctaccccgactcccaggcataatgaggcatgtctaactcaatgttacgcaatgaatttaggcaaaaattcattattagcgtcagccacacaagtttttttaatgcagtatattcacctgtaaatagtttgtgtaaaatttgacaaaaaaagtatatttactatactgtaaatatatgtgatgatatattgtattattttgcttttttgtaaagcagttagttgctgcacatggataacaacaaaaatttgattattctcgtgttagtattgttaacttctttttgcgactgcgttacatcatttaaagaaaatgctgtgtattgtaaacttaaattgtatatgataacttactgtcctttccatccgggcctaaactttggcagttcctttgtctacaaccttgttaatactgtaaacagttgtacgccagcaggaaaaatactgcccaacagacaaaatcgatcattgtaggggaaaatcatagaaatccatttcagatctttattgttcctcaccccattttcctccttgtgtatgtacttcccccacccccctttttttaagtaaaatgtaaattcaatctgctctaaaaaaaa

SEQ ID NO: 69156 - DNA, 365 bp, Homo Sapiens
cactttgggtacagaatttctttttactatctaaaacacagagaaacaggactgggtcactagtccctgacattcctaacagtcaccattcactttcagccaagaaaacaaaagccagaaaatgcagaaatgatcactgtggggaaactactgaaatgattaaacataaatcaacagaagagtcttctgatttcttaggtggacagaggaatgtgtctccgcaactttgcccaaaataactttacagaacagtcaattacagttgtttaactgtatctgcatggacattcctaattacaccaacaggacagatcattttcgtacatatctggtgtaagaatatcagaaaaaaataagtaataagt

SEQ ID NO: 69157 - DNA, 731 bp, Homo Sapiens
gaaagatatagtcattattaaaataaacattcatgtaaatggagtaaatcataggcgaatcaatcgtaataaataccttataaattataaacttgtttagatactagatttctataaccataaattttatactgtaaagtctgtttaaaatagggtttaatgaagttattttaatttttagagactcccctctaaataatttactcctacattgtaaatacattgatgccaacaaaattccaactgctactaacaaaggtttggttggtgataagctaataacagctactttgtgtaggaggtaaatatgtgtactggagggggtaaaaatccatttaggttatggcaaagatgggaatcaaactgtaaaactcatagccccataaaattaatattctttgttaagtgccagagggtttaagagaacttcttgcttagagtttattgataataataatgcttcagaatatcccatttaaatgtacagtgtaaatatgtaaaatattttacttcccaggcaagtttgtggctgtattgccacttagtggctctttgtgactggcagttctgtatatctgaaacaaataagctgtaagcacttttgttaaaactttgtcaaataatccttttatgtacttgttctcagacctgttctctggttatgaaatgtgttaaagacaaggtgcaaatttaaaacaatgcctgtattgaaataaatgacttaaacagat

SEQ ID NO: 69158 - DNA, 694 bp, Homo Sapiens
tcttgttgcataggaaatgcagtacttgcttccagtaattgtattgtaatgtgagaaggtggtagcactaatggttgaatacaagagttaaactaatccacaccagctcaaaaaacctgtggagatttagttgaataagaatggacgcccacagtgattctcaaccaattacaaattttcacagaacacagtaaaactaaaagggtaactatgagagtcaatacaagtatactagaggcacagggggcccggctcataaaaacagatttcagaccaagttattaacacggggggtgtttcgtttcataacagatctcttaccatcactggaagtgttccatcccctccccctacaatttgaaatggaaaacagaggtattccgagtggacagatttccatgtgtggtgggaaaagtccccagtgaattttgctctggtgagagggcagggctaagggtggggcgggggatcagggatttgcctttgagagtcttcctaaaggacctcctagaacctgataaagctcctagtctaggtctagttagtatctcagtggtgaggctaccaaatgccttcgcagtgcagagacgatggtctgagaccagggagaaggcaccgagccgttagttctctcaagcctctgtcccagcggagctagcggccttatgaccttcggttgcaatgtcaaaagaaa

SEQ ID NO: 69159 - DNA, 1056 bp, Homo Sapiens
tcattaacacggttgttaaaaaagcaggtggtacgcgtcggaattcccgggatatcgtcgaccacgcgtcgcaaatgattaagtgtccttaaaattaagttgaaaaaggaaatattctttctcataaaactgtgactaggcatacactgtagtttttgaaaattatgcaaaagcagctaaatgtaacttattccaagtgcatttttcttatttatatctttatgtagcactactacagaaattctgcaagtttctgtttcaaagcacaataactagtaataccaaagactatttcaaaatgtccagatgtaggggaagagatgtttacagtatgatgaaaataattttccaagtaaagtgatgttgtgtgttttgtacacttagggatatatatatatagctacattcacacactcacaatttaaaatatttcccctagttttttggggggataggaagaaagatttgttactgtatttttttaactacataaaaatagatcaataaatgtcagcattggcctctgtgtacaaaccaagagcttttacagatccagaatttattagtttaaaatgcaggtgaacttttttttgcgtttggtttacttgtctgtcaaatgtttccttaaacatgaaactgaataaggagaagagtatttttaacacttaaatttcttggcaaattttaaaacattttttagtctgtaatacactccacttgaagcacttaagtcttccttaaatgacttttcttaagtaatgatactgtgtgttttcccaaagcacttttaaaaaaatttttataaattactatctgttgaaaaggtgtccttttcctttcttctagtatttttttcttaccaaaattcactaatcttgaatgtttgtgatattaaatttcaaatgcagaatacttgactcatttaaagctaaattttgttactgattcaattataattgtaatggatttttgactttgtaatggattcttttcatcaaaaagccttatttttttatctatgtggaaaacacaataaaaaatcctcaacactattgt

SEQ ID NO: 69160 - DNA, 2510 bp, Homo Sapiens
  misc_feature (1965)..(2030): n is a, c, g, or t
  misc_feature (2057)..(2093): n is a, c, g, or t
gatttattccggtcccagaggagaaggcgccagaaccccgcggggtctgagcagcccagcgtgcccattccagcgcccgcgtccccgcagcatgccgcgcccccgcctgctggccgcgctgtgcggcgcgctgctctgcgcccccagcctcctcgtcgccctggatatctgttccaaaaacccctgccacaacggtggtttatgcgaggagatttcccaagaagtgcgaggagatgtcttcccctcgtacacctgcacgtgccttaagggctacgcgggcaaccactgtgagacgaaatgtgtcgagccactgggcatggagaatgggaacattgccaactcacagatcgccgcctcatctgtgcgtgtgaccttcttgggtttgcagcattgggtcccggagctggcccgcctgaaccgcgcaggcatggtcaatgcctggacacccagcagcaatgacgataacccctggatccaggtgaacctgctgcggaggatgtgggtaacaggtgtggtgacgcagggtgccagccgcttggccagtcatgagtacctgaaggccttcaaggtggcctacagccttaatggacacgaattcgatttcatccatgatgttaataaaaaacacaaggagtttgtgggtaactggaacaaaaacgcggtgcatgtcaacctgtttgagacccctgtggaggctcagtacgtgagattgtaccccacgagctgccacacggcctgcactctgcgctttgagctactgggctgtgagctgaacggatgcgccaatcccctgggcctgaagaataacagcatccctgacaagcagatcacggcctccagcagctacaagacctggggcttgcatctcttcagctggaacccctcctatgcacggctggacaagcagggcaacttcaacgcctgggttgcggggagctacggtaacgatcagtggctgcaggtggacctgggctcctcgaaggaggtgacaggcatcatcacccagggggcccgtaactttggctctgtccagtttgtggcatcctacaaggttgcctacagtaatgacagtgcgaactggactgagtaccaggaccccaggactggcagcagtaagatcttccctggcaactgggacaaccactcccacaagaagaacttgtttgagacgcccatcctggctcgctatgtgcgcatcctgcctgtagcctggcacaaccgcatcgccctgcgcctggagctgctgggctgttagtggccacctgccacccccaagtcttcctgctttccatgggcccgctgcctcttggcttctcagcccctttaaatcaccatagggctggggactggggaaggggagggtgttcagaggcagcaccaccacacagtcacccctccctccctctttcccaccgtccacctctcacgggccctgccccagcccctaagccccgtcccctaacccccagtcctcactgtcctgttttcttaggcactgagggatctgagtaggtctgggatggacaggaaagggcaaagtagggcgtgtggtttccctgcccctgtccggaccgccgatcccaggtgcgtgtgtctctgtctctcctagcccctctctcacacatcacattcccatggtggcctcaagaaaggcccggaagcgccaggctggagataacagcctcttgcccgtcggccctgcgtcggccctggggtaccatgtggccacaactgctgtggccccctgtccccaagacacttccccttgtctccctggttgcctctcttgccccttgtcctgaagcccagcgacacagaagggggtggggcgggtctatggggagaaagggagcgaggtcagaggagggcatgggttggcagggtgggcgtttggggccctctatgctggcttttcaccccagaggacacaggcagcttccaaaatatatttatcttcttcacggnnnnnnnnnnnnnnnnnnnnnnnnnnnnnnnnnnnnnnnnnnnnnnnnnnnnnnnnnnnnnnnnnnggagagggcggcgcgccgccccaaaannnnnnnnnnnnnnnnnnnnnnnnnnnnnnnnnnnnnttttttgtaaagggggccccccaaaggggcggcgcataataaaacagcgacgcggcgagcgcggggcgcgcgggttaaaaaacacgcgcgatcagtggaggagaacaacaggcgggaccacgggggggactccttcgggggagaaaagacacacccaactgcgcggggggggaggagaaccacaaggtggggagcacaaacacccacagggaggattattataacgggcctccgagggggaaaaatatattagaagtgttccgaggggtgtataatcagggtggtgtaaacacaaccgcgcgacattatatcggcgggcgagtaaaagaaaagattggggctcacccgcaggaatgatattgttgagcagaatctttattttccggggggtgctttgttgtttataaaacgggggtg

SEQ ID NO: 69161 - DNA, 150 bp, Homo Sapiens
tgtcctctggggtgaaaagccagcatagagggccccaaacgcccaccctgccaacccatgccctcctctgacctcgctccctttctccccatagacccgccccacccccttctgtcgtcttctcgcagccgtatagtagtagtagtaggc

SEQ ID NO: 69162 - DNA, 1529 bp, Homo Sapiens
  misc_feature (522)..(522): n is a, c, g, or t
  misc_feature (1381)..(1381): n is a, c, g, or t
gacctggggcttgcatctcttcagctggaacccctcctatgcacggctggacaagcagggcaacttcaacgcctgggttgcggggagctacggtaacgatcagtggctgcaggtggacctgggctcctcgaaggaggtgacaggcatcatcacccagggggcccgtaactttggctctgtccagtttgtggcatcctacaaggttgcctacagtaatgacagtgcgaactggactgagtaccaggaccccaggactggcagcagtaagatcttccctggcaactgggacaaccactcccacaagaagaacttgtttgagacgcccatcctggctcgctatgtgcgcatcctgcctgtagcctggcacaaccgcatcgccctgcgcctggagctgctgggctgttagtggccacctgccacccccaggtcttcctgctttccatgggcccgctgcctcttggcttctcagcccctttaaatcaccatagggctgggaactctgggggaagtggagaggttcgnctgagttctaatgatgttcctctaccagattatgcacaagacctaaatgtcattgaagaagtgattcgaatgatgttagagatcatcaactcctgcctgacaaattcccttcaccacaacccaaacttggtatacgccctgctttacaaacgcgatctctttgaacaatttcgaactcatccttcatttcaggatataatgcaaaatattgatctggtgatctccttctttagctcaaggttgctgcaagctggagctgagctgtcagtggaacgggtcctggaaatcattaagcaaggcgtcgttgcgctgcccaaagacagactgaagaaatttccagaattgaaattcaaatatgtggaagaggagcagcccgaggagttttttatcccctatgtctggtctcttgtctacaactcagcagtcggcctgtactggaatccacaggacatccagctgttcaccatggattccgactgagggcaggatgctctcccacccggacccctccagccaagcagcccttcaagttcttttatttctgggtaacagaagtagacagacaggttacttggtgtatcttctgttaaagaggattgcacgagtgtgttttcctcacacactttgatttggagaattggtgctagttggcaatagataactcagcgtagatagtattgcaaaaaggggaggaaatacacaacaataataaatgtaaaaacctgctattcaacatgcagttttatttcgaagccaaaaatctagagctttcccaagatcctgttgccttaggcacatcacacttcaacagtgcacactatccaacagtgcacactattcaacagtgcacactattcanaagcgtagactatttttttgcatgttcacgatatttgttttggtcttatgtgtgtgtgagagagagagattcctttgacattaaggagcatcaatgagaaaagatgatgaggcaggaattaatacagaaatgaagtcgtgtgtgtttg

SEQ ID NO: 69163 - DNA, 1188 bp, Homo Sapiens
  misc_feature (1086)..(1097): n is a, c, g, or t
gttcagtgctatccaagtgactcccccgggagaggacaactggaaatttatgcctggtgtcttcctggactccgacctatgcacctttttccttggatgattttaacctgtctccttttgctgcaatgaaccataaccatgagtatatcagcttttctaatttttgtgagtccctcaagtgaattatcaaacctaaggtagtttgggacccccatcacagagagtcaaacaggggcagggcaagaagagctgcttttcctggaaggctaatgagtctgaacttcgccctggaggtaatcgttatagtaactccaggctctaacctggagctgacatgataaggtcaaatgtacacctctagaagacttccgacttcagaggggaatggatgggggagctgagggaggagagctgaagcaggaagaccatggcctggaaagagatggctgaaccagtccaggtggcgaggagtccatgtcagctgccgtcatccacaccacagatcagacatggcaaagagtggccaggccttctgagtgaaggtgatccaacctgtcaccaagcctaagggcaaatcctggctgtgctgtgatggctccaacaaccccaaacagcagcgcagaggctgcagccgccctcggaggcaacactgggaaacgctcattagcagccttccattgctcacccgccccatcccacctctgtgcatcccagatcatcagcgaagtgcacagctggcttccatcctcggagccttcctccttcatttgcctattcaacagttacaaaggcctgagttgcaaaggggcttacaacccattccacccagaagaaagagaactgagactgagcaagacagagaataggtggaaggggagatgaaaccaagcaatctctagatcccaaatggggaccctgatgtagcaagagcctcttttaaatccttttccaatagggtaatatggaaaatagttgaaagcacaagccaagtggggctggaatcccaaatgggccatttactagctgtgtgactggacaagtaatttcatatttctgggcctcgatttttctcatctgtaaaatagnnnnnnnnnnnncctatgtcataacgttgataaacagattagatgagctaagatctaaaatgtcttctattcagtaggtgctcaataaatgttatctattttt

SEQ ID NO: 69164 - DNA, 650 bp, Homo Sapiens
agaagaacgaacttgtaaagtgtgtatggacaaagaagtttctgttgtatttattccttgtggtcatctggtagtatgccaggaatgtgccccttctctaagaaaatgccctatttgcaggggtataatcaagggtactgttcgtacatttctctcttaaagaaaaatagtctatattttaacctgcataaaaaggtctttaaaatattgttgaacacttgaagccatctaaagtaaaaagggaattatgagtttttcaattagtaacattcatgttctagtctgctttggtactaataatcttgtttctgaaaagatggtatcatatatttaatcttaatctgtttatttacaagggaagatttatgtttggtgaactatattagtatgtatgtgtacctaagggagtagtgtcactgcttgttatgcatcatttcaggagttactggatttgttgttctttcagaaagctttgaatactaaattatagtgtagaaaagaactggaaaccaggaactctggagttcatcagagttatggtgccgaattgtctttggtgcttttcacttgtgttttaaaataaggatttttctcttatttctccccctagtttgtgagaaacatctcaataaagtgctttaaaaagaaaa

SEQ ID NO: 69165 - DNA, 2066 bp, Homo Sapiens
  misc_feature (1701)..(1762): n is a, c, g, or t
ttgcgttataggtgttctcacagatttcccgacgctgtcatccttatgctacgactttgggtagtttctgcctccgttagcgtgatccgggggcagccaggagaacctggacaatgacacagagacggactctttggtgtctgcccagcgagagcggccacgccggagggatggcccagagcatgcaacccggctaaatggaactgcgaagggggaacggcggcgagaaccagggggttatgatagctcatccacccttatgagcagtgagctggagaccaccagcttctttgactcagatgaggatgactccaccagcaggttcagcagctccacagaacagacgcagtgcctcacgcctgatgagaagacacaagcggcggcggcggaagcagaaggtttctcggattgagcggtcctcgtccttcagcagcatcacggactccaccatgtcactcaacatcatcacggtcactctcaacatggaaaaatataacttcttgggcatctccattgtgggccaaagcaacgagcgtggtgacggcggcatctacattggctctatcatgaagggtggggccgtggctgctgatggacgcatcgagccaggagatatgttgttacaggtaaacgagatcaactttgagaacatgagtaatgacgatgcagtccgggtactgcgggagattgtgcacaaaccggggcccatcaccctgactgtagccaagtgctgggacccaagtccacgtggttgcttcacattgcccaggagcgagcccatccggcccattgaccctgcggcctgggtctcccacactgcagccatgaccggcaccttccctgcatacggcatgagcccctccctgagcaccatcacctccaccagctcctccatcaccagttccatccctgacacagagcgcctagacgacttccacttgtccatccacagtgacatggctgccatcgtaaaagccatggcctcccctgaatcaagggttggaggtccgtgaccgcatgtggctcaagattaccatcccctaatgctttcatcggctcagatgtggtgggactggctgtaccacaatgtggaaggcttcacggaccggagggaggcccgcaagtatgccagcaacctgctgaaagctggcttcatccgccataccgtcaacaagatcaccttctccgagcagtgctactacatcttcggtgacctctgcggcaacatggccaacctgtctctccacgatcacgatggctccagtggcgcctctgaccaggacacactggcccctttgccgcacccgggggccgccccttggcccatggctttcccgtaccagtacccgccacccccgcacccatacaacccgcacccgggcttcccggagctgggctacagctacggcgggggcagcgccagcagtcagcacagcgaaggcagtcggagcagtggctccaaccgtagcggcagcgatcggaggaaggagaaggacccgaaggccggggactccaagtccgggggcagcggcagcgaatcggaccacaccacacgcagcagcctgcgggggccgcgggagcgggcgcccagcgagcgctcagggccggcggccagcgagcacagccaccgcagccaccattccctggccagcagccttcgcagccaccacacacacccgagctacggtcctcccggagtgnnnnnnnnnnnnnnnnnnnnnnnnnnnnnnnnnnnnnnnnnnnnnnnnnnnnnnnnnnnnnnaggagcccctccgggccgcgacctggcctcagtgcccccggaactgaccgccagcagacagtccttccgcatggccatgggaaaccccagtgagttctttgtggatgtgatgtgagcagggcccctcccccagctccattccgctcccaccccagccggctgcgttcctctctccatccgtccgtcttttttactttgtctggtacctgaaagggaaataaaaggaactaaatccaggtgcgctaactgctcgcagggtgctgcgagggtggggtgcacctaccgattggctctgcatccccct

SEQ ID NO: 69166 - DNA, 1112 bp, Homo Sapiens
  misc_feature (103)..(103): n is a, c, g, or t
  misc_feature (175)..(175): n is a, c, g, or t
  misc_feature (226)..(226): n is a, c, g, or t
  misc_feature (421)..(421): n is a, c, g, or t
  misc_feature (701)..(701): n is a, c, g, or t
  misc_feature (733)..(790): n is a, c, g, or t
  misc_feature (1019)..(1037): n is a, c, g, or t
gtagtcatttggccccagcttcattatgtccgctgtatttttgactggacgatacattcaccagaacgttggactgatagattatagactccttaggaattgncctgagccaagaatcgcacgagttaccacattggaggctcacgaccgaggaggcccgcagtatccagcaccngggaaagctgcgtcatccgccaaccgtcacagatcaccttctcgagcagtntactactcttcgtgactgtgcgcaacatggccacctgtgctccacgatcacgatgctccagtgcgcctcgaccaggacacactgccccttgccgcacccgggggccgccccttggcccatgctttcccgtaccagtacccgccacccccgcacccatacaacccgcacccgggcttcccgaagctgggctacagntacggccgggggcagcgccagcagtcagcacagcgaaggcagtcggagcagtggctccaaccgtagcggcagcgatcggaggaaggagaaggacccgaaggccggggactccaagtccgggggcagcggcagcgaatcggaccacaccacacgcagcagcctgcgggggccgcgggagcgggcgcccagcgagcgctcagggccggcggccagcgagcacagccaccgcagccaccattccctggccagcagccttcgcagccaccacacacacccgagntacggtcctcccggagtgccccctctctacgnnnnnnnnnnnnnnnnnnnnnnnnnnnnnnnnnnnnnnnnnnnnnnnnnnnnnnnnnntccgggccgcgacctggcctcagtgcccccggaactgaccgccagcagacagtccttccgcatggccatgggaaaccccagtgagttctttgtggatgtgatgtgagcagggcccctcccccagctccattccgctcccaccccagccggctgcgttcctctctccatccgtccgtcttttttactttgtctggtacctgaaagggaaataaaaggaactaaatccagnnnnnnnnnnnnnnnnnnnccgagcaggcggccgcaagctttttccctttagtgagggttaattttggcaaggcacgtggccggtcgtgtacca

SEQ ID NO: 69167 - DNA, 743 bp, Homo Sapiens
ggctttcagtaccagtaccgcacacccccgcacccatacaaccggcacctgtgcttcccgtagctggtctacagctacggcggtgtcagcgcaagcagtcagcacagcgaaggcagtcggagcagtggctccacccgtagcgacagcgatcggaagaagaaataggacccgaaggccgggatctcaatgtgcgggggcagcggcagcgaatcggtccacaccacacgcagcagcctgcggggcccgcgggagcgggcgcccagcgagcgctcagggccggcggccagcgagcacagccaccgcagccaccattccctggccagcagccttcgcagccaccacacacacccgagctacggtcctcccggagtgccccctctctacggcccccccatgctgatgatgcccccgccgcccgcggccatggggcccccaggagcccctccgggccgcgacctggcctcagtgcccccggaactgaccgccagcagacagtccttccgcatggccatgggaaaccccagtgagttctttgtggatgtgatgtgagcagggcccctcccccagctccattccgctcccaccccagccggctgcgttcctctctccatccgtccgtcttttttactttgtctggtacctgaaagggaaataaaaggaactaaatccaggtgcgctaactgctcgcagggtgctgcgagggtggggtgcacctaccgattggctctgcagccccctaaaaa

SEQ ID NO: 69168 - DNA, 711 bp, Homo Sapiens
  misc_feature (502)..(511): n is a, c, g, or t
gcggccattgtgactataggaaccaggtggtttaaaaaagcaggctgttaccggtccggaattcccgggatatcgtcgacccacgcgtcgcgcatggccatgggaaaccccagtgagttctttgtggatgtgatgtgagcagggcccctcccccagctccattccgctcccaccccagccggtctgcgttcctctctccatccgtccgtcttttttactttgtctggtacctgaaacggaaataaaaggaactaaatccacaaagcaagaacaaacagggcggggcgcgtgtcgaagatgttacccgcggacgaggggcccagaaggttgccgcgtgtgccccggttttcctgggctccaaggggggccccaataggaggcgacgcggagttaataacggcaccaggcgactgggccggcggtaacacccaccggtccgtgcgccgtggcgcaaacgcggcaagctgggacatctttgggggagggaccccaaaaactcctnnnnnnnnnnacgactattgtggggccaacatctaaccccttaccgagggaggtttttaaaaggcgcctctaaagggggaaaacatattaacacctttttccacggggcgtacatacggtgttgtaaccccacaacgggtggcaatatttgctggggagtgtttggacagaaggttggcgttacggggcgagatttggtttcattgacaa

SEQ ID NO: 69169 - DNA, 1087 bp, Homo Sapiens
  misc_feature (46)..(46): n is a, c, g, or t
  misc_feature (333)..(333): n is a, c, g, or t
tccaggactttccgcttgtcgcttggtgtcgctccgctcccttcangagccagctggtaggtgtcctggtctgcagggagctgcagcatgcccttctgaagctgctgccggtacgtctggagcatgaagaactggatgatcaaaggggatgtggctggagatgcgcttgctggcctcctggtgataggccatcagtgctgaaaagatctcctccatggaagagtctgttgccgagctggattggaaagccccaaaatcccaggatttcttcttcttttcttcttccagctccttctctctgaccttctgcaatgcaccccagtatacctggtncctggcagtagacaatctgttccatctggaagtggaggcggatcagcttctcaccttctctctctggttctgctctaatgtcttcaattttggacttggcggttctgtggaggttaaaaaactcttcaaaattttttatcgaaacatctgtgaaagcaagccggaccatatccgtcacggtgtgtagcatatccacagccggctcttccagtgccttgatttgctgtttcaacgattgtctcaaatgtcctgtaattcacaaagcctggcagctctctaccacgatactgattttcaaatttctggatttttctactcaaaattttatggccttcttgaaaattgttttcaattattgtactccatttgtggaactcgtgtcggagtctggtaaacagccgaatgtcttcctcccctacagtttcctctccttgcatgagagcagtgatgtcctgattaaaggcattaactttatctatcaggaagaacattttttcattttcgtcttccggtatgtcgacaccatacttttgtagctcctctgttattctctggtgagtctccttgatttgattttctaacaggggcagagatttacagatatgtgtgatgagctcgctggtaagtttttctgccaggcagggaaccgtggcctttccttcctccagcagatccctgaaatatgggtggttctcaaagaagatcttctctctctgcagggcttcggcctcgtgccgaattcgccacccaggcc

SEQ ID NO: 69170 - DNA, 761 bp, Homo Sapiens
  misc_feature (34)..(34): n is a, c, g, or t
  misc_feature (49)..(49): n is a, c, g, or t
tggatttgggcttccagccagtcggcaacagatntccatgggagagatnttcagcacctgatgcctatcaccaggaggccagcaagcgcatctccagccacatccctttgatcatccagttcttcatgctccagacgtacggccagcagcttcagaaggccatgctgcagctcctgcaggacaaggacacctacagctggctcctgaaggagcggagcgacaccagcgacaagcggaagttcctgaaggagcggcttgcacggctgacgcaggctcggcgccggcttgcccagttccccggttaaccacactctgtccagccccgtagacgtgcacgcacactgtctgcccccgttcccgggtagccactggactgacgacttgagtgctcagtagtcagactggatagtccgtctctgcttatccgttagccgtggtgatttagcaggaagctgtgagagcagtttggtttctagcatgaagacagagccccaccctcagatgcacatgagctggcgggattgaaggatgctgtcttcgtactgggaaagggattttcagccctcagaatcgctccaccttgcagctctccccttctctgtattcctagaaactgacacatgctgaacatcacagcttatttcctcatttttataatgtcccttcacaaacccagtgttttaggagcatgagtgccgtgtgtgtgcgtcctgtcggagccctgtctcctctctctgtaataaactcatttctagcagaaa

SEQ ID NO: 69171 - DNA, 2418 bp, Homo Sapiens
  misc_feature (2338)..(2372): n is a, c, g, or t
tttagtttaagagtcaatttaataagtttaaaataaatgtttagtttcattaggatgatgctatcaatattttcttggttacagacacattattaaagttttgggttaattttattgacaattcttaagattctttctcatgcttaataaagcatgctactcagttaactcttgtctacatcagcaaagcagataatacaaaacaggaaaattacaaatcactgatacttagtccttgtgggaatcatgcttttctcccagcagttttacaaggtggctggcattccctgagcatattctgaattgcactgtggggaaagaggttgtgctcagttgtagggtggggggatgcactgcctgaggattaaaaaactagttctgtgaccgtgaggaagtcgtttaaatttccatggtctgttccctcctatgtgaaaagagaaggtgggcttcaacctctaagatcttctccagttttcacattttatggacttttgtagaaaaaacatcaggagttcatgtgggatgacagcaagtcatttctttgaggagagtcttgatcaccaggcaatattcacagtgtagagactgtcagatgaccatggctagcatggaaatgagacccacacatttaaatcacccagcaaatattccgaaggctaattgtagcacattttatgaaagacatttcaaactgtggtcctgaagagtgtatcccatcttgcagaggtggggagcctggggggacaagagttctgaagaggaagagacaacaagagttcccagtagctaatgtttgtcattctagttgaccgtgctggtctattaggctagtggttcagtacacagatgaaatgcaacatggaacccagtttattatcagaacaactacaaagaaattgtcccctgtctaagactggaagtgtcaaggctctgccccttttttcccttcccttcaggggtggatgtggagtgactgtgcatcccaccagaaccacgtgtcatggctgagtcacatcttcctgcccttggaatgagaggcacagcggaagaccttcccatggaagggacacagggagcctggtggctggaccatggtgcttctctcttccaacacgtccactcaccccttggagaccctcaaaagccagttacattacatgttcacagaatttttggtaaaagtaaataccaattatagtgaggaagaattttgaccacggaatattttaaaaactaaaaaatgtttatatttcatttaacatttgacacagaagagaccacatttgaataaacacattaaatcttcagagcactttcattgtggttttggacctcagatatgacaaatacttacattgacaaatccataatttcttttgtaatttctttttatttttacaaattataccatgataaaatttgacaaaaattattcatgtgaaagtttcctctaacattttataagttaatcaagtgcataccacaatagatttttggttgttgtttaggtgttctcgtgattttagtattacacaactttaagctgagactacactcagaaataagtttagaaaatggcattacaaaaggttgggagtgagcagtaaaaaaacaaacaaacccatgcagggctgttgtgctgtgggaaatcagatgtgttcactgccataagtcttcagtgcggccaaacttaaaaaccagccctccaaaaaagatgaaggcattctggaaaaatacagcaattccagggtatactatgtctttttctttagcaacataacctccaaaaagaatccacatagatgcaatcagagatccaaaggccaacatgaaaccaacgaaaagccaaatgcgagcacctgtttgacccagacaaccttcactgtaactatcacctcggacttgtccattcgatactgcattaatcattaggaaggctatggttgctataacaccacaggcatggtatgagtggttgaaatctttcatggtgggataaataacagctgcatctatgataatccaccagcctgtaaaaaatagtacaccagcagcaatggaagcaatagtattgcgcttttccccccagtcaatgcattctgagcatctcaagccctctagaaatccagacatttttttcaggtcagtccagccccgtcgtgcagtggttccggagcccggtgtcgcgccgcgccggcccgcctcactcccccgattttagccaagaaaacaaaacggccacagcctccagacacccggatgcagcagtaccatccacccggctcccccggccgtaatggccgaattcccgggcatatggtccggtaccgtcgactgnnnnnnnnnnnnnnnnnnnnnnnnnnnnnnnnnnncgccgcttcctcgctcacatgacttcgctgcgctcgtccgggtttt

SEQ ID NO: 69172 - DNA, 1224 bp, Homo Sapiens
  misc_feature (335)..(377): n is a, c, g, or t
tttaattcgaataaaaagaattagaagtgatgtccttttataaaatgccttctcccccttcccgcctacagtctcttcctctccccttagaggggggaaagtgtataaacctacagggttgtgagtctgaaaagaggatccccctcacccccaccctgggcagagcagtgggggttggcgggtgggagagggggacacagatcctggcacactgtggatatttcttgcagattgcagtctcttgtggcccaaacaggttaggtagactatcgcctctggcagagtgccaccttttggtaccaacatgttctgaggtgttaggatttgggttgggnnnnnnnnnnnnnnnnnnnnnnnnnnnnnnnnnnnnnnnnnnnctccttttaaagaaaagctaaaggccgctgtgagtcctggtggcaggctctccatggatgtagcatatcgaagataatttttatactgcatttttatggattattttgtaatgtgtgattccgtctgctgaggaggtgggaggggctccagggaaagccacccaccttcagtgaggttgctccccagctgagcgcaccgggcatgggatgtggaggctggcgacacaccctgtgcctctccaaggctgggcgcgtggggcgtccagagtctctctgggtctcagatgtccatctgccacctcttgttaaggctctagccagaagggagggtgagggtagaagaaagttattcccgaagaaaaaaagaatgaaaagtcattgtactgaactgtttttatatttttaaaagttactatttaaaggttggtttgattgttgcgtcttaattgcctctcctcccagtttgccagtcccgcccaccgacccccgggaaaacagccaggccactgttgctgtcacattctggagcctgggccagggccatttcccatcgatgtgagctcttctcatctcacagcattccctgcgctgcttccacccccttctccccttccagatacccagcatcgcagcagggatttcacaatcccatactgtgtcgcctcccatccaagcgccagggagggtggggggtaggagctaagacttcctctggacagatgggcagggcagagttcactgaggtgaaggaagaccacaggttaacaccaaagtattgtacagctgtcaatgcaaaacttttttggaaaaaaattaaacgtaatgaacttgaagcgaacctcgtgcc

SEQ ID NO: 69173 - DNA, 460 bp, Homo Sapiens
  misc_feature (341)..(341): n is a, c, g, or t
tcgcttcaagttcattacgtttaatttttttccaaaaaagttttgcattgacagctgtacaatactttggtgttaacctgtggtcttccttcacctcagtgaactctgccctgcccatctgtccagaggaagtcttagctcctaccccccaccctccctggcgcttggatgggaggcgacacagtatgggattgtgaaatccctgctgcgatgctgggtatctggaaggggagaaggggggtggaagcagcgcagggaatgctgtgagatgagaagagctcacatcgatgggaaatggccctggcccaggctccagaatgtgacagcaacagtggcctggnctgttttccccgagggagtgggaccggggggccgggactggcaaactgggaggagaggcaattaagacgcaacaatcaaaccaacctttaaatagtaacttttaaaaatataaaaacag

SEQ ID NO: 69174 - DNA, 436 bp, Homo Sapiens
  misc_feature (57)..(57): n is a, c, g, or t
  misc_feature (71)..(89): n is a, c, g, or t
  misc_feature (100)..(100): n is a, c, g, or t
taaaagttactatttaaaggttggtttgattgttgcgtcttaattgccctctcctcnccagtttgccagtnnnnnnnnnnnnnnnnnnngggaaaacagncaggccactgttgctgtcacattctggagcctgggccagggccatttcccatcgatgtgagctcttctcatctcacagcattccctgcgctgcttccacccccttctccccttccagatacccagcatcgcagcagggatttcacaatcccatactgtgtcgcctcccatccaagcgccagggagggtggggggtaggagctaagacttcctctggacagatgggcagggcagagttcactgaggtgaaggaagaccacaggttaacaccaaagtattgtacagctgtcaatgcaaaacttttttggaaaaaaattaaacgtaatgaacttgaagc

SEQ ID NO: 69175 - DNA, 1025 bp, Homo Sapiens
ggtatgtgaaaccatatagaaatgaggatatgtcagcatatgtgaagaaaatccagtttaaattacatgaaagctatggcaatcctttaagagttgttactaaacctccatatgaaattactgaaacaggatggggtgaattcgaaataatcatcaaaatatttttcattgaccctaatgaaagacctgtaaccctgtatcatttgctaaagctgtttcaatcagacaccaatgcaatgctggggaaaaagacagtggtttcagagttctatgatgaaatgatatttcaagacccaacagcaatgatgcaacaattattgacaacatctcgtcagctaacattaggagcctataagcatgaaacagaatttgcagagcttgaagtgaaaaccagagaaaaattagaagctgctaagaaaaaaacaagctttgagattgcagagcttaaggagagattaaaagcaagtcgtgaaactataaattgtttaaaaaatgaaatcagaaaacttgaagaagatgaccaagcaaaagacatataaacagttctcatgagaacttggtagtaagctaaactgaaaataaggtgggcttcactggagaaatggacttactgcaaatgctgtgatgtttcttagaggaacttcatatacagctgttgaccatgaatttcttagcaataggaatttgtactatttaagcaatctttaatggaaaatatgtgtgtaagaatggatgctatataggtattttaccaacccattttaagaaaattctatgatattaagcacagtttttaaaaatgtttattgtagtatatgtatagcttattacccttttgacaggcatcaaaatttcattataaagtattacttgtacaaattttgtacttctttagtggctagaattagtgaagaaacttaatgtgtatatttaatttcttcaagttcttacctgcccccatccttttttgtatatgatgtgtccagtaagtattcaataaatgtagtttacagatcctaaaaaaa

SEQ ID NO: 69176 - DNA, 871 bp, Homo Sapiens
  misc_feature (123)..(134): n is a, c, g, or t
caaagctatctggttatattttgatgttgccaatatcgcaaagccaaaattttaatttgcttatttaatatatttgttggccagagatctatttttatatcaatgtgccttgcatgtatattnnnnnnnnnnnnttggaaacgccatgtagtaatgcctgagatagtcgatggttcttaccacctcactaatttttatgcagtatgaaatgctcattctattgcccaactggtgctctctgtttaaagttacagatcttgcgaaactggaactattttataagctggggaagtgatttactttttttgttgtatcttttttgttcttagtctgttagtggctgtcctgtagtgggaaatagtaaaaggattcttcactcccttctcccctcagcaccttcttcaagtaaacatttcttgtgtgctttgaaaaaagtttcagcttgctgtctcttttagtgttttaaagaagtgttatacaaagcattgtttgcaaaatatagggagataatggagtccactttaatttggaattctgtgtgagctatgatccaagttatcagctctttccaactttaaaaattttgttaaaagcaccttgcttagaaaattttaaatatttatgtctgcaacaattgtctcaaaataataaactgtgcaattcttgtcattacacaaacaaaagatctgaattttccctaatgcgacctgttagtttctctctgtatttcctgccagtgtaaatgtgaaagctttgcttgcattacgttttagaaatgcattttgcacactcgaattttgccgaagctccgtgaaaaggttagatctaagtagatgaataaagctatgcacatgttttgaaagtttaaaaa

SEQ ID NO: 69177 - DNA, 1539 bp, Homo Sapiens
  misc_feature (571)..(579): n is a, c, g, or t
aggacatcttttgatacctttaaaagaaccactgtcaagtaatccttaaaagaatatcttggaaaaggaaacagattttttcctgtgtgtaagcaataagtgaagttacatttgccctaaccctagggatgattctttacccagttttaaagcccatcatggtattctaaggtgttgacaccctccatcctcagagcaggtcgaaaatattaaatagactggggactctatgatgggcagcctgtgctttttgacttcagtttgctatttttctgtgatcacattagtactgattcatagattctatcttttataattctggagaaaaagatttgttagttttgtaatttttttgtaagaccaaatgtatgtattttagtagctccattgcatgagaagagtgtaactcacactgacttgtgatatcagccttctctgggccttgtgtgtggagagctttctatcttaccaagtggtagggctaaaagaacaacagcctttttggtagtcacatagcagaatgatcagagttacattgcttattccaaaacattggttctttttaaaacannnnnnnnnacccaaagaaaagaataatagaaattactaacaataaatataaattcagagtgttgatataggattcagtatccagagtttatttttaatcttaatcctcagcttcttgggagttgctgggcttcagtgtctctgtggtttcaccagcttagcttgagctctggttattttggatcttttctgctttttttaagtaactgagtcatttttaccacacagtccagtttgcatgtatagctaggaaacatgtattgctctagattgggcagtttaagtcattttaaagaaagttagttcatagttgttgccttttaactcatagtcaagcttcagtctttcaaagagaaatgtgtgattttcatttacttgctgatattttgtagtttggagatccttgtgggcattattctaactgatacgtagacacttacttggaaatttttggacattatattaaatgagtgctatctgtgaaattggttatattaggtggcttgactaatgttttttctataattgtatatggactgcatttttaaaaaaaccgcatttgcctttatgctagattgtaaaaaattatattagaatgcataagacatgtttttccttcatatgctagacttttcctagcatttcgtatttctgtgttgtcagtgtgtgatttttaaaccggaatttggtttaaaaaaaatctggtggtaatatatgtgagaaatactttggtgtttaccttatgaaaataaaggattgtaagtaaagtttcctgcgcaccttataccagaattcagtataatacactactttctgttttcaaacagataaatcataatatagtctgtattatctgtaagatctgtcttgtaaaccacattcttgacaactatttgcttttgagtagtttgtattttaatatgtgacttttgtcttgaaaagtagtaaagccatagacttgtgcaaaac

SEQ ID NO: 69178 - DNA, 800 bp, Homo Sapiens
  misc_feature (111)..(124): n is a, c, g, or t
  misc_feature (134)..(245): n is a, c, g, or t
  misc_feature (247)..(258): n is a, c, g, or t
  misc_feature (524)..(586): n is a, c, g, or t
ggggggaatcccagccctattcatggcccggtttttcttggaaacaagtttggcccttttccttttcctttggggccccgggcccaaaaaaaaggttttaaaaattttttnnnnnnnnnnnnnnccgccaaggnnnnnnnnnnnnnnnnnnnnnnnnnnnnnnnnnnnnnnnnnnnnnnnnnnnnnnnnnnnnnnnnnnnnnnnnnnnnnnnnnnnnnnnnnnnnnnnnnnnnnnnnnnnnnnnngnnnnnnnnnnnnttatttttattggaactcatctgaacatcagatatacctggtgttggttagcaagaaccgtttgtacatttgatactgatggtgccaaaaccaaaacagtgactagacatgatggggaaagatgttgagaacaaaaacctgattttggagaggaaaataaaagccagtcagattcagtgaggatgcaaaacctggtacaacaaaatccttttacaaaatataaatttattatgaaaacctggaaggataatccaacaaaggtaaannnnnnnnnnnnnnnnnnnnnnnnnnnnnnnnnnnnnnnnnnnnnnnnnnnnnnnnnnnnnnnggagatgagagaagaatatacagttcagcacaacagaagtgcagaagctcacctacccaaatggcattaaagcctcgctgtgtaatcgtgtcagaaaacaaagcatactgacacatagtgctctacttcccatccacttgagttctaagaggtaaattaaaaagctccctgggaaggggacatgaggttgctcaaaaacccaacaaagaaaatt

SEQ ID NO: 69179 - DNA, 2126 bp, Homo Sapiens
  misc_feature (1585)..(1610): n is a, c, g, or t
  misc_feature (1975)..(2003): n is a, c, g, or t
gctattagtgaaactatagaacagctgtgttaaaaaaagcaggctggtaccggtccggaattcccgggatatcgtcgacccacgcgtccgacgagagcggtaagatggcggcggcggcggtggtggagttccagagagcccagtctctactcagcaccgaccgggaggcctccatcgacatcctccactccatcgtgaagcgtgacattcaggaaaacgatgaagaggcagtgcaagtcaaagagcagagcatcctggaactgggatctctcctggcaaagactggacaagctgcagagcttggaggactcctgaagtatgtacgacccttcttgaattccatcagcaaggctaaagcagctcgcctggtccgatctcttcttgatctgtttcttgatatggaagcagctacagggcaggaggtcgagctgtgtttagagtgcatcgaatgggccaagtcagagaaaagaactttcttacgccaagctttggaggcaagactggtgtctttgtactttgataccaagaggtaccaggaagcattgcatttgggttctcagctgctgcgggagttgaaaaagatggacgacaaagctcttttggtggaagtacagcttttagaaagcaaaacataccatgccctgagcaacctgccgaaagcccgagctgccttaacttctgctcgaaccacagcaaatgccatctactgcccccctaaattgcaggccaccttggacatgcagtcgggtattatccatgcagcagaagagaaggactggaaaactgcgtactcatacttctatgaggcatttgagggttatgactccatcgacagccccaaggccatcacatctctgaagtacatgttgctgtgcaaaatcatgctcaacaccccagaagatgtccaggctttggtgagcgggaagcttgcacttcggtatgcagggaggcagacagaagcattaaaatgcgtggctcaggctagcaagaacagatcactggcagattttgaaaaggctctgacagattaccgggcagagctccgggatgacccaatcatcagcacacacttggccaagttgtatgataacttactagaacagaatctgatccgagtcattgagcctttttccagagtacagattgaacacatatctagtctcatcaaactctccaaggccgacgtggaaaggaaattatcacagatgattcttgacaagaaatttcatgggattttggaccagggggagggtgtcctgattattttcgatgaacccccagtagataaaacttacgaagctgctctggaaacaattcagaacatgagcaaagtagtggattccctctacaacaaagccaagaaactgacatagagttggatctgtagcggtcctttggagagtgtgtgtggcgggagagtgaaaccttgggggaaaatgctaggagattcttttttctttttgttctacttttcgctcggaaagtttttaaatcctcatttggtgcatctgtattccagccaataggtgtgccagttttcatgtaatctttactggcccaacttgggagtggggaaattgcttannnnnnnnnnnnnnnnnnnnnnnnnngattattctaaataaaaggaaaaaggcttacactacctaaagctgtgctctctgcctcctgggagagggccgcaaagccaggcaccccgccaaccactgggggtcctaatccacctgctgggcatcacctctcctcctcctcagaattgggtgtttgctgaccatcaaaagcaatgactttttattctgtttgtactgaaccaaaacaaacaactgtgtatagactgctgttttcttttttatttgaaatgaggcattttggtgttctttcccctaccatacggcctgtctgcccttccctccccacattggctccagcagagtagccgaaggtcctgccgccgccgccaccaccaccaccactnnnnnnnnnnnnnnnnnnnnnnnnnnnnngcctgcatagctccactctgacctgtgaaggaatggggatgaggccaggagctagtgtctaccacggccacacagggagcagtgtgggcccttagcccccaaggggcctgctatgcatgtggc

SEQ ID NO: 69180 - DNA, 637 bp, Homo Sapiens
  misc_feature (44)..(98): n is a, c, g, or t
  misc_feature (292)..(301): n is a, c, g, or t
  misc_feature (498)..(578): n is a, c, g, or t
taaacacagtaaactagattagtcgtcagtgttttaattgcccnnnnnnnnnnnnnnnnnnnnnnnnnnnnnnnnnnnnnnnnnnnnnnnnnnnnnnnttcccctctcaaccaggagaccatcatgtctctctgccttcctcctctcccctccaggggagtcaggctgtctgtgaaagccatgagcttctctccctctcccactcctcctctcctactttcagatggatttattccttttttaaacaatgaacatcggaaatgagactgtggggtgtggtttctctctctcnnnnnnnnnnaattttctttgttgggtttttgagcaacctcatgtccccttcccagggagctttttaatttacctcttagaactcaagtggatgggaagtagagcactatgtgtcagtatgctttgttttctgacacgattacacagcgaggctttaatgccatttgggtaggtgagcttctgcacttctgttgtgctgaactgtannnnnnnnnnnnnnnnnnnnnnnnnnnnnnnnnnnnnnnnnnnnnnnnnnnnnnnnnnnnnnnnnnnnnnnnnnnnnnnnntttaccttccttggattatccttccaggttttcataataaatttatattttgtaaaagg

SEQ ID NO: 69181 - DNA, 1057 bp, Homo Sapiens
  misc_feature (102)..(130): n is a, c, g, or t
  misc_feature (495)..(522): n is a, c, g, or t
tgggggctaagggcccacactgctccctgtgtggccgtggtagacactagctcctggcctcatccccattccttcacaggtcagagtggagctatgcaggcnnnnnnnnnnnnnnnnnnnnnnnnnnnnnagtggtggtggtggtggcggcggcggcaggaccttcggctactctgctggagccaatgtggggagggaagggcagacaggccgtatggtaggggaaagaacaccaaaatgcctcatttcaaataaaaaagaaaacagcagtctatacacagttgtttgttttggttcagtacaaacagaataaaaagtcattgcttttgatggtcagcaaacacccaattctgaggaggaggagaggtgatgcccagcaggtggattaggacccccagtggttggcggggtgcctggctttgcggccctctcccaggaggcagagagcacagctttaggtagtgtaagcctttttccttttatttagaataatcnnnnnnnnnnnnnnnnnnnnnnnnnnnnaagcaatttccccactcccaagttgggccagtaaagattacatgaaaactggcacacctattggctggaatacagatgcaccaaatgaggatttaaaaactttccgagcgaaaagtagaacaaaaagaaaaaagaatctcctagcattttcccccaaggtttcacttttccgccacacacactttccaaaggaccgctacagatccaactctgcaagagaagacagagcagtgtcaatcaggaagccatgaggacaccaggaggaggttttcagtctcgacacgcagaagacagagctgcccaaccctggggtcctgaagccagcactcacctatgtcagtttcttggctttgttgtagagggaatccactactttgctcatgttctgaattgtttccagagcagcttcgtaagttttatctactgggggttcatcgaaaataatcaagacacccttcccctggtccaaaataccatgaaatttcttgtcaagaatcatctgtgataatttcctttccacgtcggccttggagag

SEQ ID NO: 69182 - DNA, 964 bp, Homo Sapiens
ggtaccggtccggaattcccgggatatcgtcgacccacgcgtccgggtaagatggcggcggcggcggtggtggagttccagagagcccagtctctactcagcaccgaccgggaggcctccatcgacatcctccactccatcgtgaagcgtgacattcaggaaaacgatgaagaggcagtgcaagtcaaagagcagagcatcctggaactgggatctctcctggcaaagactggacaagctgcagagcttggaggactcctgaagtatgtacgacccttcttgaattccatcagcaaggctaaagcagctcgcctggtccgatctcttcttgatctgtgtcttgatatggaagcagctacagggcaggaggtcgagctgtgtttagagtgcatcgaatgggccaagtcagagaaaagaactttcttacgccaagctttggaggcaagactggtgtctttgtactttgataccaagaggtaccaggaagcattgcatttgggttctcagctgctgcgggagttgaaaaagatggacgacaaagctcttttggtggaagtacagcttttagaaagcaaaacataccatgccctgagcaaactgccgaaagcccgagctgccttaacttctgctcgaaccacagcaaatgccatctactgcccccctaaattgcaggccaccttggacatgcagtcgggtattatccatgcagcagaagagaaggactggaaaactgcgtactcatacttctatgaggcatttgagggttatgactccatcgacagccccaaggccatcacatctcctaaagtacatgttggctgggcaaaatcatgctccaacacccccagaagatggccccgggcttttggtgaagcggggaaagctttggcactttccggtaatgcacggggagggcacaaccggaagaccattttaaaattggcgggtgggcctccacggggcc

SEQ ID NO: 69183 - DNA, 986 bp, Homo Sapiens
ctaggccccccgggagtgggccctacctggggagttaccttaacttaagggcccccacgcgggtcaagagtgcccgactgaggttccacggttccgagtgccgcatttccagtccacttttaacctgaaccttttgttgttttgggactaagactacttcgcatttcagcgcaccagtcgttaaacaggatcacccccgggttcattagaatttatcatctgcagcgtttcttgttgaataattctttgaaagatgtcgtctcatgatgactgatcccaaggaatctctcaagtggagaacaaaggtaactacctgccagccggggcaccagcctggagttggagagggcagcagtaaaatgttcaaggcactgtgagtgaggatggtaggtatggatgccgcccaagagcgctgaggtagtttacgaggtggaggcatgtttgttggcattgtttgagaacttgttccagctcgaggggaatgagaagcatctggaaccggagaatgtagtgaggggttggctggtgacattcccaggcatgcgtgctgctggtgaggggccagacacttgaggagaacctggccagttccctgctcgtccacttggtgacaccatagtgtatggggaactagggtcaagagttccatgtggactagcaaaactggcccctggtcctattgagattccatgcgaggatgggggaggagttggaacaatgacgctggtgatggggctctcaaagccccactgggggagctggcagcatgcagatttcctggagactgtgtgtgcatcattgagggagactgattgactgtgctatgataagatgtagggggtgaagtaagaggataagcacctgatgttcctggctgctttggaaatggctgttgctgcgacgcgtgggcgacgcgtgggtcgacgatatcccgggaattccggccggtaccagcctgcttttttgcaccacttgtttatattcac

SEQ ID NO: 69184 - DNA, 1078 bp, Homo Sapiens
tggaccggtccggaattcccgggatcggccggggacggtgtgagagcggtaagatggcggcggcggcggtggtggagttccagagagcccagtctctactcagcaccgaccgggaggcctccatcgacatcctccactccatcgtgaagcgtgacattcaggaaaacgatgaagaggcagtgcaagtcaaagagcagagcatcctggaactgggatctctcctggcaaagactggacaagctgcagagcttggaggactcctgaagtatgtacgacccttcttgaattccatcagcaaggctaaagcagctcgcctggtccgatctcttcttgatctgtttcttgatatggaagcagctacagggcaggaggtcgagctgtgtttagagtgcatcgaatgggccaagtcagagaaaagaactttcttacgccaagctttggaggcaagactggtgtctttgtactttgataccaagaggtaccaggaagcattgcatttgggttctcagctgctgcgggagttgaaaaagatggacgacaaagctcttttggtggaagtacagcttttagaaagcaaaacataccatgccctgagcaacctgccgaaagcccgagctgccttaacttctgctcgaaccacagcaaatgccatctactgccccccctaaattgcaggccaccttggacatgcagtcgggtattatccatgcagcagaagagaaggactggaaaactgcgtactcatacttctatgacggcatttgagggggtatgactcccatcgacagccccaaggccatcacatctcctgaagtacatgctgctgtgcaaaatcatgctcaacacccccagaagatgtcccggcctttggtgagcggggaagcttgcctttcggtatggcaggagggagacagaaaacataaaaatgcctgggttccagctagcaaggaaccgatcactgggcagaatttggaaaagggttctgaccaaattaccggggaaaaaacctccggggaggacccaaattattcaggcaaccaacttgggcccaaatttggcatgaaaaacttaactagaa

SEQ ID NO: 69185 - DNA, 1075 bp, Homo Sapiens
  misc_feature (11)..(11): n is a, c, g, or t
  misc_feature (53)..(53): n is a, c, g, or t
aatttttcatntgataaaaatgcttgtgcaatggctgtataaaaacttcgtgntacaccactgccctctcctggctcatccttaaatgtgacttttactctgtgtacagccattggtgtagtagcacatcttcgaccaaagtgattgttaagctgcctcatagtctgctgaatgagaagatctcgatcccgatcaacctctagtgacaaatctcttgactgctggtttctcagtttttccatttctctgcggaattttgattcttttacctcaaaaccacccaattcagttaggattgatccaggttctgctccaacatcttccatgaataccctgccgaacagttctaaagaaaggcgccaacgtcctagcagcatatcatgggaaataaccattcccataaagctacactgtggcctgaaagatgtgagaggtggcccttcactttcagtaagtcctatttctgctaggtaagctactttgtaattgtggcagcaagatcatgagcagatggccctgattttgaactctcagtttcttctggcagcacgggctgttcttccccttgctttgtttttgccggttttgcatgttcattacatttttcagacttggcagcataagacatgttgttgttggaagaacctctaggcagtttctatccactgtaacctccattaaacatttcccactactggcagatgaagaataaagaccctgacttggacggccaaaagatcctcctttctagcatttggctgcaacagatgtggctgatcagccaaggggatggcttcagccagaggcacttcaaatggatttgggggtatacacccaaggaatgtcatggagtctgaacgtcggaaaaatggatggttttggccagtttctgcaggaagagagtcatcatccttatcattcaagtagcctttgattggtgtcatcatcattttcatgttctgaatcgtcattatcaatacccagttccagagttctcgccgacgcgtggtcgacgatatcacggattccggaccgtgacagcctgcttaatgcccactgtctatagtcactatgc

SEQ ID NO: 69186 - DNA, 828 bp, Homo Sapiens
  misc_feature (50)..(50): n is a, c, g, or t
ccgctcactgaccctcacataaagctgatgttgtcgaaattcatccagcncactgtgtcctgaggagcgtctctgtcatttaggaatcacatgtagcactcagctgctgcacccaggacaacactgtggcctcatgactgtcatctttcatgcccagaatgcttcaggcatgctcagttaagcaaactaagtgaatttttagtatttgcaatcaccttgtctcagtttcatttaagattttgatagtttagatagaataaacacagatctgagtgttacaaattcctttctaaaaatttttgtttctatttttaaaaattcatcattaaaaacactttaatatagtgaattaaaaatatttctaaagtatatttccataaaatggttttggtttcatcttgtctgtgttagcttggaaacataccttcagctaaaaacaattctgatttgctcttccacattttaatgctgggccattaatatattattttcaatttatagaactaaaaaatttttattttttggaaaactttgaagcataaaggtagagcaaatctttgctgaggaattgtgttttagtattgagcacaaaatggggagtaaattcacatttcaaatgataagacaaaaactactaatgtggttaatctcgtgaagtacatattgcctagtcacgcttaaagtccagtgttgacctgtatagtcattttcctagaagacgttttaaagtgaatttgattttagaaattaaagctaagattattttgtattaatttgtaatttcaaataatataattctttatttcagaataaatttatttcaaatgg

SEQ ID NO: 69187 - DNA, 816 bp, Homo Sapiens
  misc_feature (567)..(580): n is a, c, g, or t
gaaaagcgaaaggaacacaaagagcacatcagaaagcccgtgagaagtatgccatctactgtggaagaagagatcaattctacggtttttaaaaagaaaagaacaaatacccttaaagccaaaagagaaaagggaaagagattcaaatgtactttctgtgattattaaaggtgatgttgatggttctgttgaggccattttgaacattatagatacctatgatgcttcacacgagtgtgaactagaattagtacattttggagtgggtgatataagtgcaaatgatgttaaccttgctgaaacatttgatggtgttatatatggctttaatgtgaatgcaggcaatgttatccaacagtcagctgcaaaaaaaggagtaaaaattaaacttcacaaaataatttaccgtcttgttgaagatttgcaagaggaactgagcagcagattaccctgtgctgtggaagagcacccagtaggtgaggcatctatactagctaccttctctgtaacagaagggaagaaaaaagttcctgtggctggctgcagagtccaaaagggacagttagnnnnnnnnnnnnnntttaaactaacccgtaatggacatgtaatttggaagggctcattaacctcattgaaacaccataaagatgacatttcaattgtcaaaacgggaatggattgtggtctcagtttagatgaagacaatatggaatttcaagtgggagacagaattgtttgttatgaagaaaagcaaattcaagccaagacttcttgggatccaggattttaaaattacattaaaaatgtaaataactc

SEQ ID NO: 69188 - DNA, 1068 bp, Homo Sapiens
ataacttgaggagaccacatatttatataatacaaattttatgtttcagttgaggaaactgaagcccagaaaagtcaagtgactggtttaaaggcacacagccagtgacagagtaggacacggaaagcctgattgatggatcccctgccctttccataaaattccatccttatttctaaaatgcttacaaatgctgagaggaaagttttcatgttgtcaagtaacacgaccacatttaaaaagtgggaacccaatcttcggagcaattccccatctctattcgatgctgcctgtaggtttggctacctgcctccttggttcctttagtcaaaaacgttctgagaagcaatcatctgtttagaaacactaacttgacaagtgagccggcttgctttctgaatttgagtgttcagaactagatcacggggaatggggcccatccacggtagctgacatcctcccctgtcttcagcttggtctgtgttgctaaggccttttcagaaacttgctgactttcacaggccaaatttacagctttgcgggccacaaaggcaggtgtggtgcagtgtgtggaaagagcaagaggctttggagtgaactagacctgggttgaggtctaattctttcaacattgattcagcaaacatttactttgagcctcttaagtgccaaaccctgcattgtgtgaccttgggtgggtcattgaacttccctaagcctcggtttcctcttctgttaaattaaaataataaacccttcctttcagcattgttctgaggattagagataaaaggcagtctaaaagtacacatagtaaggataagtaaatggtggctgctattgtttttatcggaggctgggctgcaaatatcctggagagggacaatatattatcattaaattgacaaatgggaaaccagacagaaaatgggaaagagccaacagttaaaacagacgaaactagggagagaagaaaactcctgagcaaatatcgacgcgtgggtcgacgatatcccgggaattccgaccgtaccgctgcttttttaccacttgttatagtacaatgcc

SEQ ID NO: 69189 - DNA, 1109 bp, Homo Sapiens
  misc_feature (946)..(956): n is a, c, g, or t
gcaaccaaccccaacaacaaaaaagaatgttttggtattggagaagggatggtcagttagcctgtctgtcacacgacggaatggatactgggcccggggaccactttcatactcacgtcctcatccttggatacccaggggagggcgaaccgttttcgctcgtgtgtctgtacgcagcatgttgggatcgggagtttcggcacagactatcccatcaagccgttggctcctttcagctactacgttaccacgttcctaaaacgcaagctctccggaccagacggacacagggagaagctagtttctttcatgtgattgaaatgatgactctactcctaaaagggaaaaaacaatatccttgtttacagaagagaaacaaacaagccccactcagctcagtcacaggagagaacacagaaagtcttaggatcatgaactctgaaaaaaagagaaaccttatctttgctttgtggttcctttaaacacactcacacacacttggtcagagatgctgtgcttcttggaagcaaggactcaaaggcaaggtgcacgcagaggacgtttgagtctgggatgaagcatgtacgtattatttatatgatggaatttcacgtttttatgtaagcatgaaacacaggcagtatgagagaaagcaaggcccgtcatgctgtccgtacactacgtatgctgtagagccattttgtatgttgtgtaaaacaaaaagcattgatgaaaaagcaaaaggtgatgtatgtatatgagaaaattaattgtacgatatcattccagtacgttttgttgtacattttagtcttgtttactttctcttcattgttaagaggatgcgaactgtacagtttccagctagttacccatattagagaagaaataagagagtattagaagaaaacaggagagaaagaacatttgtgaattgcagttgtcnnnnnnnnnnntagcctagctggccttatttgtgaagcataattgcttttagcatatggaagtattttttcacattttctttgtataaaatttgtattaaacttaaatatctttttgatggtggtgtttctttgtgactgagccagtagactcacactatatgc

SEQ ID NO: 69190 - DNA, 931 bp, Homo Sapiens
  misc_feature (236)..(236): n is a, c, g, or t
gcgaagtggctcgtggtggcatatgagagtgtagtgcccgactgtgagtgaggggagcagggatcccaacgcttgcgctgccttgcgcagcagccgcgggcgcccacgtcgcgcctgattggggtaggagaggcgttccccagtgcagttgggtgaactaccgttgcacactggagtttctggtgtctttgcttggaactgacctagctcgtgccagggggaactcggctagcgcncccacagcccctgctgactcaaaacaactgtgagtggggttgggcgagtgattgcaaaatgggggtggcggtcgcccggggataggaagggagtgatgatgaccccaggtaactctgagtgtgtcgctgatgccatcaccgcagcgctctgaccgccccctcggtccagcatttctcaggctcaacgagttcatggccaagattcctaatcttttgttctgtttcatttccccgttaggagttgtaagacgttcatcgccgtgttatccttgagtaaagaatgaactctggaagcccagccagggacaatgcaccttcacagagattctgcactaatctgagtgaaggtctaaggtttggaatctccccctcatggagagaagctttgtatggctgtcatgcttagacagtgattcctgcaacttgaccttcaggctgggagaggtggagagccatgcctgttctccttccttgctatggaatttgctgacacaatatcttccgcctggtgctgggcatatcctaagaacttacaactttcctgtattatcctgtgtgagcagctgtcaccttattgggggaaaaatgcctgaaaattagggggcacttcaagtagatagcttctatttcctatatttgtcttatatacaagtatttgcttttatcaaaataattccaataaagcattttaaagt

SEQ ID NO: 69191 - DNA, 863 bp, Homo Sapiens
  misc_feature (431)..(431): n is a, c, g, or t
ggcctgggtggcgaattcggcacgaggcgtgggttggcagtatgagagttgtaatggcccgactgttgagtgagggggagcaggggatcccaacggcttgcgctgcctttgcgcagcagccggcgggcggccacgtcgcggcctggctggggtaggagagggcggtccccagtgcagttgggtgaactaccgttgcacactggagtttctggtgtctttgcttggaactgacctagctcgtggcagggggaactcggctagcggccccacagcccctgctgactcaaaacaactgagttgtaagacgttcatcgccgtgttatccttgagtaaagaatgaactctggaagcccagccagggacaatgcaccttcacagagattctgcactaatctgagtgaaggtctaaggtttggaatctccccctcatnggaatgaaccatgcaagttctccagccagggacaatgcaacttgctgacacagatatctgcacgaatctgagtgaagggcaaagcctaagaacctacccctcatggagagaagctttgtatggctgtcatgcttagacagtgattcctgcaacttgaccttcaggctgggagaggtggagagccatgcctgttctccttccttgctatggaatttgctgacacaatatcttccgcctggtgctgggcatatcctaagaacttacaactttcctgtattatcctgtgtgagcagctgtcaccttattgggggaaaaatgcctgaaaattagggggcacttcaagtagatagcttctatttcctatatttgtcttatatacaagtatttggcttttatcaaaataattccaataaagcattttaaagttaaagg

SEQ ID NO: 69192 - DNA, 915 bp, Homo Sapiens
  misc_feature (790)..(799): n is a, c, g, or t
  misc_feature (801)..(806): n is a, c, g, or t
  misc_feature (812)..(814): n is a, c, g, or t
  misc_feature (816)..(816): n is a, c, g, or t
  misc_feature (818)..(818): n is a, c, g, or t
  misc_feature (890)..(890): n is a, c, g, or t
gggcaggtaactataacggtccttaggtagcgaggcctgggtggcgaattcggcacgagggtgggctcgtgggttggcagtatgagagttgtaatggcccgactgttgagtgagggggagcaggggatcccaacggcttgcgctgcctttgcgcagcagccggcgggcggccacgtcgcggcctggctggggtaggagagggcggtccccagtgcagttgggtgaactaccgttgcacactggagtttctggtgtctttgcttggaactgacctagctcgtggcagggggaactcggctagcggccccacagcccctgctgactcaaaacaactgagttgtaagacgttcatcgccgtgttatccttgagtaaagaatgaactctggaagcccagccagggacaatgcaccttcacagagattctgcactaatctgagtgaaggtctaaggtttggaatctccccctcatggagagaagctttgtatggctgtcatgcttagacagtgattcctgcaacttgaccttcaggctgggagaggtggagagccatgcctgttctccttccttgctatggaatttgctgacacaatatcttccgcctggtgctgggcatatcctaagaacttacaactttcctgtattatcctgtgtgagcagctgtcaccttattgggggaaaaatgcctgaaaattagggggcacttcaagtagatagcttctatttcctatatttgtcttatatacaagtatttgcttttatcaaaataattccaataaagcatttttaannnnnnnnnnannnnnnaaaaannnananccttattcggccggcctccggccttcgaaaaagtttttcaaaacctttccctttgggcgcgcggggccccantaaggaaagtggaaaatgggcccta

SEQ ID NO: 69193 - DNA, 816 bp, Homo Sapiens
  misc_feature (442)..(490): n is a, c, g, or t
atgaataaagcaaattctggtatataggcaaatttagggaatagaagctatttccttgaagtgccccgtattttcaggcattttccccccaaaaggtgacaggtgctcacacaggataatacaggaaagttgtaagttcttaggatatgcccagcaccaggcggaagatattgtgtcagcaaaattccatagcaaggaaggacgaacaggcatggctctccacctctcccagcctgaaggtcaagttgcagggaatcactgtctaagcatgacagccatacaaagcttctctccatgagggggagattccaaaccttagaccttcactcagattagtgcagaatctctgtgaaggtgcattgtccctggctgggcttccagagttcattccccgtaattccagcactttgggagactgaggcaggaggactgcttgagcccnnnnnnnnnnnnnnnnnnnnnnnnnnnnnnnnnnnnnnnnnnnnnnnnncaaggataacacggcgatgaacgtcttacaactcagttgttttgagtcagcaggggcttgtggggccgctagccggagttccccctgccacgagctaggtcagttccaagcaaagacaccagaaactccagtgtgcaacgggtagttcacccaactgcactggggaccgccctctcctaccccagccaggccgcgacgtggccgcccgcctggctgctgcgcaaaggcagcgcaagccgttgggatcccctgctccccctcactcaacagtcgggccattacaactctcatactgccaacccacgagcccacttcgcaaaaagccc

SEQ ID NO: 69194 - DNA, 804 bp, Homo Sapiens
  misc_feature (180)..(228): n is a, c, g, or t
  misc_feature (236)..(278): n is a, c, g, or t
  misc_feature (710)..(713): n is a, c, g, or t
  misc_feature (716)..(718): n is a, c, g, or t
  misc_feature (720)..(720): n is a, c, g, or t
  misc_feature (723)..(723): n is a, c, g, or t
  misc_feature (726)..(728): n is a, c, g, or t
  misc_feature (755)..(756): n is a, c, g, or t
  misc_feature (758)..(758): n is a, c, g, or t
gggctttttgcgaagtgggctcgtgggttggcagtatgagagttgtaatggcccgactgttgagtgagggggagcaggggatcccaacggcttgcgctgcctttgcgcagcagccggcgggcggccacgtcgcggcctggctggggagttgtaagacgttcatcgccgtgttatccttgnnnnnnnnnnnnnnnnnnnnnnnnnnnnnnnnnnnnnnnnnnnnnnnnngggctcannnnnnnnnnnnnnnnnnnnnnnnnnnnnnnnnnnnnnnnnnnggaatgaactctggaagcccagccagggacaatgcaccttcacagagattctgcactaatctgagtgaaggtctaaggtttggaatctccccctcatggagagaagctttgtatggctgtcatgcttagacagtgattcctgcaacttgaccttcaggctgggagaggtggagagccatgcctgttctccttccttgctatggaatttgctgacacaatatcttccgcctggtgctgggcatatcccaagaacttacaactttcctgtattatcctgtgtgagcagctgtcacccttattgggggaaaaatgccctgaaaaattacggggcacttcaagtagatagcttctatttcctatatttggccttatatacaagtatttgcttttatccaaaataattccaataaagcattttaaagttcgccacannnnctnnncnttnacnnnaagggacctaatacttacaaaaaacanntntacatgttgggccgccttcggccctcgaaaagctttccaaaacatt

SEQ ID NO: 69195 - DNA, 1442 bp, Homo Sapiens
  misc_feature (1272)..(1325): n is a, c, g, or t
gggaagatattgatttttttgaagatattgattctgatgaagatgaagggggactgtttggaagtaaaaaacttaagtcaggtaaaagttccagaaatctgaaatacaaagatttttttgatccagttgaaagtgatgaagacataacaaatgttcatgatgatgagctggattcaaacaaagaagatgatgaaattgctgaagaagaagcagaagaactaagtatttcggaaacggatgaagatgatgaccttcaagaaaatgaagacaataaacaacataaagaaagcttgaaaagagtgacctttgctttaccagatgatgcggaaactgaagatacaggtgttttaaatgtaaagaaaaattctgatgaagttaaatcctcctttgaaaaaagacaggaaaagatgaatgaaaaaattgcatctttagaaaaagagttgttagaaaaaaagccgtggcagcttcaaggggaagtgacaccacagaagaggccagacaacaccctcctgggaggagaccctacactttgaccatgctgtccggatggcacctgtgattacagaggaaaccacccttcaactggaagatatcattaaacagaggataagagatcaggcttgggatgatgtagtacgtaaagaaaaacctaaagaggatgcatatgaatataaaaagcgtttaaccttagaccatgagaagagtaaattgagccttgctgaaatttatgaacaggagtacatcaaactcaaccagcaaaaaacagcagaagaagaaaatccagaacatgtagaaattcagaagatgatggattccctcttcttaaaattggatgccctctcaaacttccactttatccctaaaccgcctgtaccagagattaaagttgtgtcaaatctgccagccataaccatggaggaagtagccccagtgagtgttagtgatgcagctctcctggccccagaggagatcaaggagaaaaataaagctggagatataaaaacagctgctgaaaaaacagctacagacaagaaacgagagcgaaggaaaaagaaatatcaaaagcgtatgaaaataaaagagaaggagaagcggagaaaactgcttgaaaagagcagtgtagatcaagcagggaaatacagcaaaacagtagcttcggagaagttaaaacagctgaccaaaactggcaaagcttccttcataaaggatgaaggtaaagacaaggccttaaagtcctctcaagcattcttttctaaattacaagatcaagtnnnnnnnnnnnnnnnnnnnnnnnnnnnnnnnnnnnnnnnnnnnnnnnnnnnnnnggatatttctgttcataaattaaagctgtaatatattttgaatataatgtaaatattaatgtgtaagcttatattgtgtcattgttctgttttataataaaattcttgagaaccttc

SEQ ID NO: 69196 - DNA, 367 bp, Homo Sapiens
agggctggagatatacaaacagctgctgaaagagcagctgcagccaagcatcgagagcgaaggaaaaagaaatatctccagcgtatgacaataaaacagaaggagaagcggagaaccctgcttgaaaagagcagtgtagatcaagcagggaaatacagcaaaacagtagcttcggagaagttaaaacagctgaccaaaactggcaaagcttccttcataaaggatgaaggtaaagacaaggccttaaagtcctctcaagcattcttttctaaattacaagatcaagtaaaaatgcaaatcaatgatgcaaagaaaccagaaaagaaaaagaagaaaagacaggatatttctgttcataaattaaagc

SEQ ID NO: 69197 - DNA, 1362 bp, Homo Sapiens
  misc_feature (57)..(531): n is a, c, g, or t
  misc_feature (549)..(568): n is a, c, g, or t
ggaacgctgtatttatagtctgtcggttcgcacctctgactgacgtcgattttgtgnnnnnnnnnnnnnnnnnnnnnnnnnnnnnnnnnnnnnnnnnnnnnnnnnnnnnnnnnnnnnnnnnnnnnnnnnnnnnnnnnnnnnnnnnnnnnnnnnnnnnnnnnnnnnnnnnnnnnnnnnnnnnnnnnnnnnnnnnnnnnnnnnnnnnnnnnnnnnnnnnnnnnnnnnnnnnnnnnnnnnnnnnnnnnnnnnnnnnnnnnnnnnnnnnnnnnnnnnnnnnnnnnnnnnnnnnnnnnnnnnnnnnnnnnnnnnnnnnnnnnnnnnnnnnnnnnnnnnnnnnnnnnnnnnnnnnnnnnnnnnnnnnnnnnnnnnnnnnnnnnnnnnnnnnnnnnnnnnnnnnnnnnnnnnnnnnnnnnnnnnnnnnnnnnnnnnnnnnnnnnnnnnnnnnnnnnnnnnnnnnnnnnnnnnnnnnnnnnnnnnnnnnnnnnnnnnnnnnnnnnnnnnnnnnnnnnnnnnnnnnnnnnnnnnnnnnnnaagaattcggcacgaggnnnnnnnnnnnnnnnnnnnncaattagacaacttttactaaatgagaaaactacatttaaaatgtgctttaaaacaaaacggaattagaaaaaaagacatatgcattttaaagaacttttgcactgtgctgaaaatgaaatatctcttgcagtaagtaatacaatgtgccaattcataaaatgtaagttaacaggtttctcaatttaacattttcaaagacgatattaaggtcaaaaatgtcacatctatggtagcacatatagaagggcattatagatatgatgtccatccctatgaagcttacaaatttgacaatgctcaataaaagcttttagaatcacatccaatagtgtcacagtcaaagaatcacaaatctgtgtcctgtaagttctctccttctaaaatcttcatgttaacttttctactcattgccatttgttaatactaacccttaaaaaaaagaaataggaaaagaaaggctgcaataaacttgatcaggtacagaaattattgctactatacttcactacaaagcttgtctatacagtatcatatgacctttgattatgaaaaaatcagaataaaaatctttagtgacataagccttacaatcgtatacaacattcacatggcaatattagacagttaagcacccaatacccatagttgacaaaatgtcccactgaccagcattcatttaaatacatccttcgtatagagggaggaaaaagagacagtgtcagctttccaaggcttgtcaaaaaaggattctcatgtactgtggatctaaaaacaaacaacaactcaaaaaaa

SEQ ID NO: 69198 - DNA, 931 bp, Homo Sapiens
  misc_feature (879)..(888): n is a, c, g, or t
ctaatgtacattacctggaatcttatccaggctctcaccctttagataagtgagctataatttttgcagaggggatcttcaaaaagtaagccttggaataatgaggaatcgtaatttttaaccaccaggcacgttccaaggaattattttttaaaagggacagctgagtatttcaactgcatatactattaaggcatctaaatttttggtgttttccagtatataaattttactgctactttgtattctttgttcatattgtacaactatgatattaggtattaagcgacgtaattctttctctactagtgaaccagtttatttcacttagcaaactctaaattgagggaaatatataatctgagaacacacagaaaaatatattgaaaaaccaatagagaattatttttaaccatcataaaaactcaatcttaattaactgatagtctttaacttaaaaaaagagtaatcagaatgaaaataggtattaaaaataattaccagtagtttgttttacaaaatagagccataaattgtttaattgcccaattaagcaactaccagattctttagtcaacactaacagaattcacatttcagctagtcaacaaagcatataaatatttaacatctcttgaagataacattttagtgataacggagactacataattctatccattgttgtgactgtccacaaattaaccaggttaaatatcaaagatacattgggaatactccccaaaacaacaacagaatattaattaaatgaattttaaaagcttaagaaatgaaagtagaaaacatgaatgagacggtgcttaaacaattattgacctaatcaagacctttaaaattaccaccaaaatgcactatcannnnnnnnnnatttagtttacaggaagaatctggtagtacaggttgcagaaag

SEQ ID NO: 69199 - DNA, 606 bp, Homo Sapiens
gtagcagtaaaattatatactgaaaacaccaaaaatttagatgccttaatagtatatacgtgaaatactcagctgtccctttaaaaataattccttggactgcctggtggttaaaatacgattcctcatatccaaggctacttttgaagatccctctgccaaaaatatagctcacttatctaaaggtgagagctgcatagatccagtaatgtacataaagcctgaatgatgagcctatgtccctgcctaacgctggtgtctcactcatctcttttacctaaattgtcctgaactttgttaagtgttctggacaaggccaagcttttctttattaaaacctcagcatgtctccctgatctgaactatttgctttctcttcaagataagttgtattttaccatggaaaaatacagtatctaacattaccattcacgttaaatgaagtttcctcataacatttatctttagttttatgaagtcatcgtgaccaatgttacagtaatttctgttagctgattgtggtaaacaatgtttaatgtgaaaagaaattaaaactttcttcatctgttgtagaatatttctcttctttaaaatggcttctattca

SEQ ID NO: 69200 - DNA, 1686 bp, Homo Sapiens
ccggaccgtgcagttctctgcaggacaggccatggagctcgaagtccggcgggtccgacaggcgttcctgtccggccggtcgcgacctctgcggtttcggctgcagcagctggaggccctgcggaggatggtgcaggagcgcgagaaggatatcctgacggccatcgccgccgacctgtgcaagagtgaattcaatgtgtacagtcaggaagtcattactgtccttggggaaattgattttatgctttgagaatcttcctgaatgggttactgctaaaccagttaagaagaacgtgctcaccatgctggatgaggcctatattcagccacagcctctgggagtggtgctgataatcggagcttggaattaccccttcgttctcaccattcagccactgataggagccatcgctgcaggaaatgctgtgattataaagccttctgaactgagtgaaaatacagccaagatcttggcaaagcttctccctcagtatttagaccaggatctctatattgttattaatggtggtgttgaggaaaccacggagctcctgaagcagcgatttgaccacattttctatacgggaaacactgcggttggcaaaattgtcatggaagctgctgccaagcatctgacccctgtgactcttgaactgggagggaaaagtccatgttatattgataaagattgtgacctggacattgtttgcagacgcataacctggggaaaattacatgaattgtggccaaacctgcattgcacccgactatattctctgtgaagcatccctccaaaatcaaattgtatggaagattaaggaaacagtgaaggaattttatggagaaaatataaaagagtctcctgattatgaaaggatcatcaatcttcgtcattttaagaggatactaagtttgcttgaaggacaaaagatagcttttggtggggagactgatgaggccacacgctacatagccccaacagtacttaccgatgttgatcctaaaaccaaggtgatgcaagaagaaatttttggaccaattcttccaatagtgcctgtgaaaaatgtagatgaggccataaatttcataaatgaacgtgaaaagcctctggctctttatgtattttcgcataaccataagctcatcaaacggatgattgatgagacatccagtggaggtgtcacaggcaatgacgtcattatgcacttcacgctcaactctttcccatttggaggagtgggttccagtgggatgggagcttatcacggaaaacatagttttgatactttttctcatcagcgtccctgtttattaaaaagtttaaagagagaaggtgctaacaaactcagatatcctcccaacagccagtcaaaggtggattggggaaaattttttctcttgaaacggttcaacaaagaaaaactcggtctcctgttgctcactttcctgggtattgtagccgctgtgcttgtcaaggctgaatattactgaagaatgatcctgttcaacctcctagtgcctctactgaattattcctcttttaaatggttaatgaaccaataatttttaaatcataccaaaaatagtaagaaaatatgcaaacactctgtgatcaaacttaaaagtcattgccattcatcattaataaaagttgccatttcaactaccgttccaacattcctaata

SEQ ID NO: 69201 - DNA, 716 bp, Homo Sapiens
tacacaccaatgattgttgccgctgatttgtcaaatctataaaagccagagacagcgaatttaccacaaatcaaggtgattgcccattgattgttcagtttgctgctaacgatgcaagacttttatctgatgctgctcgtatagtctgtccttatgcgaatggaatagacattaactgtggttgccctcagaggtgggcaatggcagaaggttatggggcttgcttaataaacaagccagagcttgttcaagacatggtgaaacaagtaagaaatcaagtggaaacccctggattatcagtttctattaaaataaggatccatgatgaccttaaaagaactgtagatctttgtcaaaaggctgaagcaacaggagtttcatggattacagtccatggaagaactgctgaagaaagacatcagccagtgcactatgattccattaaaataattaaggaaaatatgtctatacctgtaattgctaatggagacatcagaagcttaaaggaagcagaaaatgtgtggcggattactgggacagatggtaagaaataagtacttgggttcttttaattgggggggaagaaatgagagtggggaagtaatgttaatttgattttcatttgttttgtttaacattaagccatattttcccattgtactgttttaagctaagcgatttattaaaatgggaaaatatggcttaatgttaaacaa

SEQ ID NO: 69202 - DNA, 711 bp, Homo Sapiens
  misc_feature (690)..(690): n is a, c, g, or t
atggtaacatcatgttaaaatgtgaactttaattgtaaaaatcattttctgtaaatatagttatatcaacctctctgcacacaacttggttcagatatatacagatatgatattcatagatgttatttgtaccacagaacaaaatcaattcaagaaacatttacttttagcttcaggattaaccccagctttctttaggccttaaaattaccaccactggaaacagagagagagcacggcatacctgggcacaccagtattcagggcaaaatctatgcagtgtcttactaatttcatactatgaggtaaagacccgaaacaaaaatagattcagtctctcgtattgctataactcttaggctggggtattaatcaaaataggatttttacatttaaggcgacagggaggctatgctgattctaactcagaaagaaatgggaaaacagtttttctaaggctacaactatttgtttaggcttattttcccggacctatacaaaaattcagtcaacaagttttggggtaaataaaggaaattcattttgctttcctctgctctgtccctgaagtcactcatccaggttggctgctcaaacaccaagaatctccaccattcttcacttgacagtctttggtggacacgttagacccaaacttttttttttgtatacaccatcttaaattttttnagaactttactttctttagtt

SEQ ID NO: 69203 - DNA, 782 bp, Homo Sapiens
gaactagaatttaggggcagttggatgaaattgcaaatttagaaggggaataagaattttctagtgctatataaagaaatgatgatggagacaaaagccttgctttcctctttttagaatttattttcgatttttagcatactgtggggcttttagagctaatatgatctaaattcagaaaatttaattttcatagtaggccaggtgtgaattacttatgtttgctatagaatgcttatttagactaacaataaatttactttgctttctaaggccagtcagcgaatgtggggatgaggcaggatgttttaaatgagccagagatgatccacaaagtgaacagtcgacacagaggtctttgagttggatggttgcaaatatattgacattagagtgaaaactccttcctttgggtaaactaaagaaagataaagtatactaaaaaattttaagatggtgttatacaaaaaaaagtttgggtctttacctcatagtatgaaattagtaagaccctgcatagattttgccctgaatactggtgtgcccaggtatgccgtgctctctctctgtttccagtggtggtaattttaaggcctaaagaaagctggggttaatcctgaagctaaaagtaaatgtttcttgaattgattttgttctgtgggacaaataacatctatgaatatcatatctgtatatatttgaaccaagttgtgtgcagagaggttgatataactatatttacagaaaatgatttttacaattaaagttcccattttaacatg

SEQ ID NO: 69204 - DNA, 1180 bp, Homo Sapiens
gttattgagcagctgggaacaccatcagcagagttcatgaagaaacttcagccaacgtgtgaggaattatgtcgaaaacagaccaaagtatcctggaatcaaatttgaagaactctttccagattggatattcccatcagaatctgagcgagacaaaataaaaacaagtcaagccagagatctgttatcaaaaatgttagtgattgatcctgacaagcggatctctgtagacgaagctctgcgtcacccatacatcactgtttggtatgaccccgccgaagcagaagccccaccacctcaaattcatgatgcccagttggaagaaagagaacatgcaattgaagaatggaaagagctaatttacaaagaagtcatggattgggaagaaagaagcaagaatggtgttgtaaaagatcagccttcagatgcagcagtaagtagcaacgccactccttctcagtcttcatcgatcaatgacatttcatccatgtccactgagcagacgctggcctcagacacagacagcagtcttgatgcctcgacgggaccccttgaaggctgtcgatgataggttagaaatagcaaacctgtcagcattgaaggaactctcacctccgtgggcctgaaatgcttgggagttgatggaaccaaatagaaaaactccatgttctgcatgtaagaaacacaatgccttgccctactcagacctgataggattgcctgcttagatgataaaatgaggcagaatatgtctgaagaaaaaaattgcaagccacacttctagagattttgttcaagatcatttcaggtgagcagttagagtaggtgaatttgtttcaaattgtactagtgacagtttctcatcatctgtaactgttgagatgtatgtgcatgtgaccacaaatgcttgcttggacttgcccatctagcactttggaaatcagtatttaaatgccaaataatcttccaggtagtgctgcttctgaagttatctcttaatcctcttaagtaatttggtgtctgtccagaaaaagtcgatttatgtgtattaattggccatcatgatgttatcatatcttattcccttttatgctatgatttattctatcttttgtatttcagaagacatataattaaatctatttaataaataaaaatatatagcttttcttagaaaaaa

SEQ ID NO: 69205 - DNA, 940 bp, Homo Sapiens
  misc_feature (38)..(38): n is a, c, g, or t
  misc_feature (82)..(116): n is a, c, g, or t
aaacatatatagatcactatagggcgctaggcgtcacnagcgaacgacgagcgcagcgagtagtgagcgaggaagcggccgnnnnnnnnnnnnnnnnnnnnnnnnnnnnnnnnnnncagtcgacggtaccggacatatgcccgggaattcggccattacggccgggattgatcagtggaataaagttattgagcagctgggaacaccatcagcagagttcagtgaagaaacttcagccaactgtgaggaattatgtcgaaaacagaccaagagtatcctggaatcaaatttgaagaactctttgccagattggagtattcccagtcagaatctgagcgagacaaaatagaaagtaagatatcctttttctcttatacttgtgttatgtaattcaggtggtgctttcactctttcatgttggtattctaaaaacctgtgttttgggagagaaagtcattttaggcctgaagtctgaggtacgaaggcactgaggagagaaagcttaaaggtctagaagctttatcctctataagacggcttaattgaaggccttaggccaaaataaaagataatcaaatcatgtctgaaagaatcttatgttgacagttacagtcagactggaattcaagaaagttttcaggtaagaagaacacttaatgcagattctagagtcagaagcagatgtgacagtctgtgcgatgaaaaaggtccttcctccccaccttttcctgcaccctttaatacagtgtgattgtttaaggaaaaagaaaagatttgattctgtccgcatgaaggtaaactgtgccttaatcagaaaagccccagtctttgcttattcaggttgtgaactttaattgacaaaacctaggtgagccttatatttaactaagttattgaacttgtttttctttttcctaaataccaatctgtagattaaaaa

SEQ ID NO: 69206 - DNA, 1705 bp, Homo Sapiens
  misc_feature (112)..(112): n is a, c, g, or t
  misc_feature (118)..(118): n is a, c, g, or t
  misc_feature (181)..(181): n is a, c, g, or t
  misc_feature (194)..(195): n is a, c, g, or t
  misc_feature (197)..(197): n is a, c, g, or t
gatggtaggttgcgtcagaagttaggcggtctcggatgattgattactttcttcgtatgttgacgataagatctgcgcgcttttaagctctttgacatgcagacaacgattntatcancagacctatggagttgatagcaacggtgttcagagacgcaatgagatatgatgagatgagttntgttcatagcctnntnaattactgaaaagaaaggtacccagtgtgttgaacaaaatcaagagttgttctacgcttctgtgagaagaactgtgaaaagagcatgttgaacagctggacaagtttttaaatgacaccaccaagcctgtggccttctcctaagtgaaagattcattaatgtccctccacagatcgctctgcccatgtaccagcagcttcagaaagaactggcgggggcacacagaaccaataagccatgtgggaagtgctacttttaccttctgattagtaagacatttgtggaagcaggaaaaaacaattccaaaaagaaacctagcaacaaaaagaaagctgcgttaatgtttgcaaatgcagaggaagaatttttctatgagaaggcaattctcaagttcaactactcagtgcaggaggagagcgacacttgtctgggaggcaaatggtcttttgatgacgtaccaatgacgcccttgcgaactgtgatgttaattccaggcgacaagatgaacgaaatcatggataaactgaaagaatatctatctgtctaacccatttccaatggacagtgatgggcttgtttttgtaaaattaccagaaaactcagtggagatttactgaaaaactcagactttattcagattaagttcctctacaaaaagtagggttctgtcccatgtgtctctgacacatttacaaaataccagttttttaaaattttggtcaaattatgagtggttgatttaaaaacttttccaagaagaagaaaagcatggagtcgtaatttaaagaactcaataaaaacttctattttttattttaaaataatatacacagtgttattttcttcaagaccgtcctgtggatgtgaaatccgtcttcgcgtcatgtatctcccatatccagcagttcagccatccagctacctttgggaccctgctgcaccttgtgtttgctggggagtcactggagagtgcatctctgttcagtttcagggcacgtctcacacatttgctgttccttattcattgttgacacaggggataggtgatccactacttgctgtagaatgtccttactttcactaggaggcagattactgaaatagtattgtggtaccagctgcataaatagttcaggagagatttctgaggtaatcctgatgtagttgttctcagaaatgctgaatttatggaagaggacccactctggcatcttcttggtgattgagtaaccagacaggggatgcagctgagcaacctgcttatgtgtcagcattaagtagttacctgatccatcaacatcccgagcaatctgcataaagtaaccggacagaagagctttctttatgtttagagtgttttccttggagccaaaagcaggttctgcatagggaagctcgattcgcttgataatttctaagagttcagctcgaataacatctgccattctgagtgctgaacagttgaggaagtatcacgacaccacttttccacacagtactcactgcta

SEQ ID NO: 69207 - DNA, 1635 bp, Homo Sapiens
  misc_feature (36)..(36): n is a, c, g, or t
  misc_feature (44)..(44): n is a, c, g, or t
  misc_feature (65)..(116): n is a, c, g, or t
  misc_feature (120)..(154): n is a, c, g, or t
aaatcctccatcacaaccccatgcacacacacgccnaaaacacnatactcactatagggcgctannnnnnnnnnnnnnnnnnnnnnnnnnnnnnnnnnnnnnnnnnnnnnnnnnnnccgnnnnnnnnnnnnnnnnnnnnnnnnnnnnnnnnnnncagtcgacggtaccggacatatgcccgggaattcggccattacggccgggggagcggcaacatggcgtccaggtctaagcggcgtgccgtggaaagtggggttccgcagccgccggatcccccagtccagcgcgacgaggaagaggaaaaagaagtcgaaaatgaggatgaagacgatgatgacagtgacaaggaaaaggatgaagaggacgaggtcattgacgaggaagtgaatattgaatttgaagcttattccctatcagataatgattatgacggaattaagaaattactgcagcagctttttctaaaggctcctgtgaacactgcagaactaacagatctcttaattcaacagaaccatattgggagtgtgattaagcaaacggatgtttcagaagacagcaatgatgatatggatgaagatgaggtttttggtttcataagccttttaaatttaactgaaagaaagggtacccagtgtgttgaacaaattcaagagttggttctacgcttctgtgagaagaactgtgaaaagagcatggttgaacagctggacaagtttttaaatgacaccaccaagcctgtgggccttctcctaagtgaaagattcattaatgtccctccacagatcgctctgcccatgtaccagcagcttcagaaagaactggcgggggcacacagaaccaataagccatgtgggaagtgctacttttaccttctgattagtaagacatttgtggaagcaggaaaaaacaattccaaaaagaaacctagcaacaaaaagaaagctgcgttaatgtttgcaaatgcagaggaagaatttttctatgaggagcagggaaaacctgaggtgcttggaggtccagacacaagaagaggattggaaccagttccgatacagcacaatggtggttcacgggggcaagtgacagccctggtttctctgaaggctggactaattcaatcaagatcaactctaagtgatttccagggaaccttcatgactgttggaattgctctgtcataataagtcagggatatttaggaggctcatagtctcctggagggataaaacatctcggcacctagtaatggtaaattagtcaatatttgttagtttcgtttgagatctcaaatgttaggattttctgaagtctcagtgtctttcagagtttgagataccttgttttcattttttctaatttttaatttaaaagtaataaagaatattttgtaatgattaggatgaaaattttatcgtcaattataagccaaaatttgctaaaattaaagtcagtatacttgaaacaagtttctagtaagttctctggggtaagatactaattactctgataaaggggctatcaaaaaaatccagtaaattgttcataagaagagatcagtttaagagtcaaacaatttgctttgctagtaccttagctaaagaaaaaatactattaaagatgactatcaccttt

SEQ ID NO: 69208 - DNA, 1023 bp, Homo Sapiens
  misc_feature (802)..(810): n is a, c, g, or t
  misc_feature (812)..(812): n is a, c, g, or t
tttaaatttaactaaagaaagggtacccagtgtggggaacatattcaagagttggttctacgcttctgtgagaagaactgtgaaaagagcatggttgaacagctggacaagtttttaaatgacaccaccaagcctgtgggccttctcctaagtgaaagattcattaatgtccctccacagatcgctctgcccatgtaccagcagcttcagaaagaactggcgggggcacacagaaccaataagccatgtgggaagtgctacttttaccttctgattagtaagacatttgtggaagcaggaaaaaacaattccaaaaagaaacctagcaacaaaaagaaagctgcgttaatgtttgcaaatgcagaggaagaatttttctatgagaaggcaattctcaagttcaactactcagtgcaggaggagagcgacacttgtctgggaggcaaatggtcttttgatgacgtaccaatgacgcccttgcgaactgtgaaatcatggataaactgaaagaatatctatctgtctaacccatttccaatggacagtgatgggcttgtttttgtaaaattacccagaaaactcagtggagatttactgaaaaactcagactttattcagattaagttcctctacaaaaagtagggttctgtcccatgtgtctctgacaccttttacaaaataccagtttttttaaaattttggtcaaattatgagtgggttgatttaaaaacttttccagaagaagaaaagcatggaagtcgtaatttaaagaactcaataaaaacttctatttttttattgnnnnnnnnnanccatttccccattaaactaaatcttggtcgggccgccctccgccccctcaagaagctttccttaaacccattcctttgggcggcgccggggccccataagggtaagtggaaccctggggccataacctggttctcctaaaggaaaaaccccgggttcatgaacctaagggccttgggaatttccccccaacactaaaacaccgcccccggg

SEQ ID NO: 69209 - DNA, 920 bp, Homo Sapiens
ccgaatcaggtaaaacagctatgtgattaaaatattttaattcttcagcaattacccggttttctaaattgaatcatgcatctatttataattctaattattttgtaaaagaagacaaaattttgaatcttaagtatttgccccatctttttctctgtaatggtggagaggctgcccataattcatctccacatggagccaagtttaatgtttttagttcacattttgtacttctgtcatgcttatttcaaactccctgagtgatgggtaagaaatcaaacattgcctcagtggtatcaagagaactttggtggtggtttcttcagaatcatgaagttcttttgccagataaatattttgatattattttcctttttaatataaaggataggtttgaattgtacttaaaatgcatagcattattaaaaacaatcttttaaaatataatttataacatagattgaagcctccccttaagaaaccttaaagaaataagtatcctactcaaaaaaggaagtctgtttcagaactttagggcctttgaaatatttcctcaagcctatttcatgagatctacttggtttacccaagtcatgtttttaatagactgctaatatcaaaggagaatttttaaagccttaacaatgcctactttccattcactgttaacatggaataaacacaattcccaacatcttagatagtgtattatgcttccaacagacagtccctctcatataaagtttatgtaccctaaaatctaacccaataacctgtcccgttgccaatagattgagaatttctggtttgcttactctacagttattcaaatgagagtcacgcttttaaatttacagcttatcacagaaatcatcagctatacattagtaaaaataaggacatgaggttttctttcttgg

SEQ ID NO: 69210 - DNA, 984 bp, Homo Sapiens
  misc_feature (58)..(272): n is a, c, g, or t
  misc_feature (276)..(276): n is a, c, g, or t
  misc_feature (284)..(284): n is a, c, g, or t
caaggatcattgagcgagaaccgaagagccccaatacgcaaacgccttctccccgcgnnnnnnnnnnnnnnnnnnnnnnnnnnnnnnnnnnnnnnnnnnnnnnnnnnnnnnnnnnnnnnnnnnnnnnnnnnnnnnnnnnnnnnnnnnnnnnnnnnnnnnnnnnnnnnnnnnnnnnnnnnnnnnnnnnnnnnnnnnnnnnnnnnnnnnnnnnnnnnnnnnnnnnnnnnnnnnnnnnnnnnnnnnnnnnnnnnnnnnnnnnnnnnnnnnnnnnntgcncctcgagnccaagaattcggcacgaggtgtttcagaactttagggcctttgaaatatttcctcaagcctatttcatgagatctacttggtttacccaagtcatgtttttaatagactgctaatatcaaaggagaatttttaaagccttaacaatgcctactttccattcactgttaacatggaataaacacaattcccaacatcttagatagtgtattatgcttccaacagacagtccctctcatataaagtttatgtaccctaaaatctaacccaataacctgtcccgttgccaatagattgagaatttctggtttgcttactctacagttattcaaatgagagtcacgcttttaaatttacagctcatcacagaaatcatcagctatacattagtaaaaataaggacatgaggttttctttcttggtttttgtccaagatctttgcaccttaatattaatggactgtttcaggtaaaagagaatgaatgtatgattgtgaactgtgaagagaatgatgcaggatcctatttagttactgaataatacagagtattcaatgcatgttgtatgtgccaccaagttactattaactgtttttggaattgaagactctgtatagtcaatagttgtgaaattcttctcaggctccttaaaccctcgctttgttgtaaaagctaaaataaacagcatgctatattgtaaaaa

SEQ ID NO: 69211 - DNA, 688 bp, Homo Sapiens
ctgaaaagggtggcagagaaggaggcagtcaataagatgtccctgcacaacctcgccacggtctttggccccacgctgctccggccctccgagaaggagagcaagctccctgccaaccccagccagcctatcaccatgactgacagctggtccttggaggtcatgtcccaggtccaggtgctgctgtacttcctgcagctggaggccatccctgccccggacagcaagagacagagcatcctgttctccaccgaagtctaaaggtcccagtccatctcctggaggcggacagatggcctggaaacctctggctaatcgggccatccgtagagcgggaaccttcctgaggtgtccttgggccacccccaagtgttgggccatctgccaagagacagcgacccaaagccgaaggacaggtggcctggaaagatcccgcccaggtctgggagccccaggctggcctcagactgtggttttttatgtggccacctgagggcgccccaagccagttcatctcagaggccaggcctgaccctgggagacagggtgaagggagtggtttttatgaacttaacttagagtctaaaagatttctactggatcacttgtcaagatgcgccctctctggggagaagggaacgtgactggattccctcactgttgtatcttgaataaacgctgctgcttc

SEQ ID NO: 69212 - DNA, 540 bp, Homo Sapiens
aattgcttttgtttaaaatttgatcgccttaactactgtaaacatagcctatttttgtgcttaagatactgaatggaaaactccattgtgtgttgctggactgttttggaaatatttggttaaatgtgtgttaatttggctgtaatggcatttaaagcaaacaaacaaacaaaaaaagctgtgaaaatggccttggagcattatctttagttacttgaagagtttctagtttttttaaaatacagtttatgttaaaataatttttattaatttagagaagacaatcaatgtctgtgagaaaacggactttcttttggattttctttttgtggtcattgtgagtgattgctttttccttttcttagtttcacattcttcctttgttctaaaacttagactgacatctagctttgacaatcatagtatgttttattttcctgagggggaataacttataatgctgtttagttttgtactattggtgtgttggtgaatttttaaactgtgtgctaactgcaataaattatatgaactgagaaa

SEQ ID NO: 69213 - DNA, 1035 bp, Homo Sapiens
caggtgctgcccttataaaattgtaacaaaagaagacctgggagaagaatatagagataatactcacagagacagaaacactgagattttttgacttgcccacagtcatggtctctgtagaatctgaagaagctgagaaagtaactcagagaaacaagaattatgaagtcctttgtagaaacagattaggcaatgacctatatgttgaaaggatgatgcagactttcaatggagcaccaaagaataaagatgttcaatgtgataaaatcataatggaagataaaggcataatgtccactgcctgggatttgtatgattcttacaatgctatggaacttgtatctttatcagtaaaacaatctgtggttgagtcaagtagtaaagcaaatgtacttcctaaagatcaggaccaaagattgccagggagcactacagaaaaaaatagtgaaactagttctctaatggacatagaaaatgtaattctggcaaaaatccatgaagatgaggaagaccactcagatgcaatattaaaatctgacaaatttcatcaggacttattttttatggaacgggttctgatggaaaatatatttcagcccaaacttgcagcttatcgtcagcttcctgttttaaaagaacctgaacctgaagagcctgaagatgttttagaaagtgcaaaacatgaagaggtagaggaagaatctaagaaggaggaggaagaagaaatacatgcagaagaatcaacaatacccgccaacttggaacgactttggtctttttcctgtgacttaaccaaaggcctcaatgtgagcagccttgcctggaataaaacaaatccagatcttttggctgttggctatgggcactttggatttaaagagcaaaaaagaggactggcttgctgctggtcaataaagaatcccatggtaacccaaacaagaataagaagcatttttatctggctgttgacaaaattctcataaaatatataattacatgtaataattaaataaagtctagaaaattttatcaatc

SEQ ID NO: 69214 - DNA, 1349 bp, Homo Sapiens
gtgttacaactgaaaagtcaagaagtttgtattaccattttcaatagcagtataaaaggttctctttggattccagttgttgctgctttactactctttctagtgcttagcctggtattcatctgtttttatattaagaaaattaatccattgaaggaaaaaagcataatattacccaagtcctttatctctgtggtaagaagtgctactttagagacaaaacctgaatcaaaatatgtatcactcatcacgtcataccagccattttccttagaaaaggaggtggtctgtgaagagccgttgtctccagcaacagttccaggcatgcataccgaagacaatccaggaaaagtggaacatacagaagaactttctagtataacagaagtggtgactactgaagaaaatattcctgacgtggtcccgggcagccatctgactccaatagagagagagagttcttcacctttaagtagtaaccagtctgaacctggcagcatcgctttaaactcgtatcactccagaaattgttctgagagtgatcactccagaaatggttttgatactgattccagctgtctggaatcacatagctccttatctgactcagaatttcccccaaataataaaggtgaaataaaaacagaaggacaagagctcataaccgtaataaaagcccccacctcctttggttatgataaaccacatgtgctagtggatctacttgtggatgatagcggtaaagagtccttgattggttatagaccaacagaagattccaaagaattttcatgagatcagctaagttgcaccaactttgaagtctgattttcctggacagttttctgctttaatttcatgaaaagattatgatctcagaaattgtatcttagttggtatcaaccaaatggagtgacttagtgtacatgaaagcgtaaagaggatgtgtggcattttcacttttggcttgtaaagtacagactttcacttttttttaaacaaaaaaagcattgtaacttatgaacctttacatccagataggttaccagtaacggaacagtatccagtactcctggttcctaggtgagcaggtgatgccccagggacctttgtagccacttcactttttttcttttctctgccttggtatagcatatgtttttgtaagtttatgcatacagtaattttaagtaatttcagaagaaattctgcaagcttttcaaaattggacttaaaatctaattcaaactaatagaattaatggaatatgtaaatagaaacgtgtatattttttatgaaacattacagttagagatttttaaataaagaattttaaaactcaaaaaaaa

SEQ ID NO: 69215 - DNA, 489 bp, Homo Sapiens
gcacgaggatttgcactgccaaaggaggctctggaggttaaagtatgtgttttaatttcgttgttgaggccatataatgcagagttgacggaccgaccttatgagtcaccttggagcggagtagtggagacttaaagacagactaccctggagctggcttcaaactagttcttaatattgtgactcgaactccccatccccagaaattctcagatcttagaagccaaagactggcaaggatactagagggaactactcgagtaggcgaggtcagactacataccgaataggagtccttccaaaaatgtaagtcatttcattaacagctgaccgtaaaactttttcaaagtggcattccattgatctaaaaattttcaagttatatgagccacttttaacctttggtttttgattacctctttccaaatcctgatttcactctgtagcattctttgcatcatgaattattaaacaatatgtgcgtgtttt

SEQ ID NO: 69216 - DNA, 1242 bp, Homo Sapiens
  misc_feature (87)..(87): n is a, c, g, or t
  misc_feature (90)..(90): n is a, c, g, or t
  misc_feature (124)..(124): n is a, c, g, or t
  misc_feature (126)..(126): n is a, c, g, or t
  misc_feature (135)..(135): n is a, c, g, or t
  misc_feature (151)..(151): n is a, c, g, or t
  misc_feature (155)..(155): n is a, c, g, or t
ctacacctggggaagggctacgagttgaatgtgaagactgaccatgaatgcttgcttcgatcgtattgtgaatgtgctagatcagcntgnaaagtagtagtcgatccgagtgaatattgcatgncnaagagcctntgagtaagtatgtgtntatntcgtgttgagccatatatgcagagtgacggaccgacctatgagtcacttggagcggagtagtggagacttaaagacagactaccctggagctgcttcaaactagttcttaatattgtgactcgaactccccatccccagaaatgctcagatcttagaagccaaagactggcaaggatactagagggaactactcgagtaggcgaggtcagactacataccgaataggagtccttccaaaaatatgcagtttcacatacagctgggtactccaagtgtacagttcccatcagctctaatatgacagaaggctgaggccggggtgctagagaaccttgccgtgctggaattcacgttgacgcccccacggagctctgctgcagagccctcgagtcccgcacttccggccgccaggtggcgctggttctgttgccaactcggagagactgagctgggccacgcaagatggcgccgtccgccttgctgcgtcccctttcccggctgctggcccccgccaggctcccgagcggcccttcagtgcgatcaaagttctacgtgcgagagccgccgaatgccaaacctgactggctgaaagttgggttcaccttgggcaccactgtcttcttgtggatctatctcatcaaacaacacaatgaagatattttagagtacaaaagaagaaatgggctggaataaacttttgaaacactaatgtagtatgctccgtatagtgattgtagctgttcctctggattcaccatctgttgagttgtaaatgtgagagaaaaagttatatgtgaatatatatcaagccagcatttgtattttgcatcattaaataaaaagaaataaaaatacttctgtattcttccaaatacagcatatttgggaccccttaccttcgtacactctcccccccactaattgttggcccgcccctccggcccctcaagaaacttttccaaaacctttccctttcgggcgcccggggccccatccagggaaagtgaacaccgcgccatagcttggtttcccaaagcagcatcccaggtccagggcacacaagagcatcggccaccctcccccaat

SEQ ID NO: 69217 - DNA, 853 bp, Homo Sapiens
cttgttaacagccctggggagaaaggggcttaacagagtctggaaatcgtgaaagagcttgaccgatgaaatgggcctggctgtcgtatcggtaatttggtgaatgttgcttaagatcagcctggaaagggtagttagtcagatccgaagtgacatatttgcactgccaaaggaggctctggaggttaaagtatgtgttttaatttcgttgttgaggccatataatgcagagttgacggaccgaccttatgagtcaccttggagcggagtagtggagacttaaagacagactaccctggagctggcttcaaactagttcttaatattgtgactcgaactccccatccccagaaattctcagatcttagaagccaaagactggcaaggatactagagggaactactcgagtaggcgaggtcagactacataccgaataggagtccttccaagaaatacagaaggctgaggccggggtgctagagaaccttgccgtgctggaattcacgttgacgcccccacggagctctgctgcagagccctcgagtcccgcacttccggccgccaggtggcgctggttctgttgccaactcggagagactgagctgggccacgcaagatggcgccgtccgccttgctgcgtccccttttcccgggctgctgggcccccgccaggctcccgagcgccccttcagtgcgatcaaagttctacgtgcgagaagccgccgaatgccaaacctgaactggcctgacaagttggggttcaccttgggccaccctggccttcttgggggatctattcccatcaaacaacccaaatggaagaatattttaggagtaccaaaaggaaggaag

SEQ ID NO: 69218 - DNA, 960 bp, Homo Sapiens
  misc_feature (588)..(606): n is a, c, g, or t
  misc_feature (682)..(703): n is a, c, g, or t
taccgtgcttctgagtatgtctaaaggtggaaagcgtaaagatagtgtgtggggctctggaggtgggcagcaatctgtcaatcaccttgttaaagagattgatatgctgctgaaagaatatttactctctggagacatatctgaagctgaacattgccttaaggaactggaagtacctcattttcaccatgagcttgtatatgaagctattataatggttttagagtcaactggagaaagtacatttaagatgattttggatttattaaagtccctttggaagtcttctaccattactgtagaccaaatgaaaagaggttatgagagaatttacaatgaaattccggacattaatctggatgtcccacattcatactctgtgctggagcggtttgtagaagaatgttttcaggctggaataatttccaaacaactcagagatctttgtccttcaaggggcagaaagcgttttgtaagcgaaggagatggaggtcgtcttaaaccagagagctactgaatataagaactcttgcagtcttagatgttataaaaatatatatctgaattgtaagagttgttagcacaagnnnnnnnnnnnnnnnnnnnaagcactgtgtttggggtacaaggcatttctgactttttataaacctacttttaaggggaattttaaaggaaatgnnnnnnnnnnnnnnnnnnnnnnccgagggggcagggagggacagaaaagtaacctcttcttaagtggaatatactaataagctacctttggtaagtgccaggtttattatctattcattccaagtttggctttgatgtctgacggccactcctttctttcagggacagtgttttggtagtaaaatcaggggtttatacaaagccttaattagggggtaagagttaagctgttaaaaccccagtgtgggttgctgctgtggaaatacgtggctggggagt

SEQ ID NO: 69219 - DNA, 1074 bp, Homo Sapiens
  misc_feature (68)..(468): n is a, c, g, or t
  misc_feature (486)..(502): n is a, c, g, or t
  misc_feature (578)..(600): n is a, c, g, or t
ttttgatctgtcaggggcgactatggaaaacgcagcacgcgccctttacggtcttgcttttgatgccnnnnnnnnnnnnnnnnnnnnnnnnnnnnnnnnnnnnnnnnnnnnnnnnnnnnnnnnnnnnnnnnnnnnnnnnnnnnnnnnnnnnnnnnnnnnnnnnnnnnnnnnnnnnnnnnnnnnnnnnnnnnnnnnnnnnnnnnnnnnnnnnnnnnnnnnnnnnnnnnnnnnnnnnnnnnnnnnnnnnnnnnnnnnnnnnnnnnnnnnnnnnnnnnnnnnnnnnnnnnnnnnnnnnnnnnnnnnnnnnnnnnnnnnnnnnnnnnnnnnnnnnnnnnnnnnnnnnnnnnnnnnnnnnnnnnnnnnnnnnnnnnnnnnnnnnnnnnnnnnnnnnnnnnnnnnnnnnnnnnnnnnnnnnnnnnnnnnnnnnnnnnnnnnnnnnnnnnnnnnnnnnnnnnnnnnnnnnnnnnnaagaattcggcacgaggnnnnnnnnnnnnnnnnnaagcacttgttttgggtacaaggcatttctgacattttataaacctacatttaaggggaatttttaaaggaaatgnnnnnnnnnnnnnnnnnnnnnnncgagggggcaaggagggacagaaaagtaacctcttcttaagtggaatattctaataagctaccttttgtaagtgccatgtttattatctaatcattccaagttttgcattgatgtctgactgccactcctttctttcaaggacagtgttttttgtagtaaaatcactggtttatacaaagctttatttagggggtaaagttaagctgctaaaaccccatgttggctgctgctgttgagatactgtgctttgggagtaaaaaaagaaagttatttctttgtcttaaagaatttttaaaaaattagtcatgagacttattcatctttccagggaacatactgattggtcttaaaagactagacagttaagtaaaaggtggctggaacatctatttttctacaaaactggaaaaatgaacctggttctagaagaatgtacaccaaaataaaacatgtgaagcagtattgattcttta

SEQ ID NO: 69220 - DNA, 935 bp, Homo Sapiens
  misc_feature (454)..(471): n is a, c, g, or t
ttctcccagaaatcacaccttagtgcacaccagagaattcacacaggggagaaaccctatgagtgtaatgaatgcgggaaagcttttgcccaaaattcaactctcagagtacaccagagaattcacacaggggagaaaccctatgaatgtgatgaatgtgggaaaacttttgtccgtaaggcagctcttagggtacatcacaccagaatgcataccagagagaaaaccctagcatgtaatggatttgggaagtcctgagggaatgcataccttaccacataacacgtagtgcagaaactcatgtgacataggctgggaacttgtttcccttatccatttcctttttcattaggctcatagtttgtggaaaaatcccaatatgccgtttattcaggtggggctgaccatgggatatggtgctaatgataaatattacatttacccttggcccttnnnnnnnnnnnnnnnnnnccctcacagtcttcctggttcataatatggatttggaggttatttctgcagcaaacttgggtcctgtgtgttcaaaaccataaagcacaaggtcaaggaagctagagtctgaaaaacgaacaattcacttccaggtcttcatcagggttttgtttttgttgctttaaagcaagagttaagtttatagtctgttaagctcttacaaatttggcttattagttaaatggacgtagtttagcttaaactttatgttagagtgagatgaaaccctatgaatataatcagttttagaaaaactaatcagtttattgtgcatcagagacgtcacatgaagaagaaaacttgttgacatccaggatgatcaggagccttcattaaaacagaaattttagggaaaaccacaaaaaccttcgtaaagtgaattgcattaaacatcaattataataaaatttcatattttgaat

SEQ ID NO: 69221 - DNA, 643 bp, Homo Sapiens
aaaaaagggacaagcatgttgattctaggttgaaaatgttataggcacttgctacttcagtaatgtctatattatataaatagtatttcagacactatgtagtctgttagattttataaagattggtagttatctgagcttaaacattttctcaattgtaaaataggtgggcacaagtattacacatcagaaaatcctgacaaaagggacacatagtgtttgtaacaccgtccaacattccttgtttgtaagtgttgtatgtaccgttgatgttgataaaaagaaagtttatatcttgattattttgttgtctaaagctaaacaaaacttgcatgcagcagcttttgactgtttccagagtgcttataatatacataactccctggaaataactgagcactttgaattttttttatgtctaaaattgtcagttaatttattattttgtttgagtaagaattttaatattgccatattctgtagtatttttctttgcatatttctagtatggcacatgatatgagtcactgcctttttttctatggtgtatgacagttagagatgctgattttttttctgataaattctttctttgagaaagacaattttaatgtttacaacaataaaccatgtaaatgaacag

SEQ ID NO: 69222 - DNA, 1936 bp, Homo Sapiens
  misc_feature (341)..(376): n is a, c, g, or t
  misc_feature (1681)..(1721): n is a, c, g, or t
cttaaaacaacagcaacatgatcttggctgtctgtcatgtgttgaagtccatggttgggtcttgtgaagtctgaggtttaacagtttgttgtcctggagggattttcttacagcgaagacttgagttcctccaagtcccagaaccccaagaatgggcaagaaggatcaggtcagccactccctggagacacagccttctggctgggactgacttggccatgttctcagctgagccacgcggctggtagtgcagccttctgtgaccccgctgtggtaagtccagcctgcccagggctgctgagggctgcctcttgacagtgcagtcttatcgagacccaacnnnnnnnnnnnnnnnnnnnnnnnnnnnnnnnnnnnnagatgacacccctccccaccacctctcataagcactttaggaacacacagagggtagggatagtggccctggccgtctatcctacccctttagtgaccgcccccatcccggctttctgagctgatccttgaagaagaaatcttccatttctgctctcaaaccctactgggatcaaactggaataaattgaagacagccagggggatggtgcagctgtgaagctcgggctgattccccctctgtcccagaaggttggccagagggtgtgacccagttaccctttaacccccacccttccagtcgggtgtgagggcctgaccgggcccagggcaagcagatgtcgcaagccctatttattcagtcttcactataactcttagagttgagacgctaatgttcatgactcctggccttgggatgcccaagggatttctggctcaggctgtaaaagtagctgagccatcctgcccattcctggaggtcctacaggtgaaactgcaggagctcagcatagacccagctctctgggggatggtcacctggtgatttcaatgatggcatccaggaattagctgagccaacagaccatgtggacagctttggccagagctcccgtgtggcatctgggagccacagtgacccagccacctggctcaggctagttccaaattccaaaagattggcttgtaaaccttcgtctccctctcttttacccagagacagcacatacgtgtgcacacgcatgcacacacacattcagtattttaaaagaatgttttcttggtgccattttcattttaatttaatttttaattcttggagggggaaataagggaataaggccaaggaagatgtatagctttagctttagcctggcaacctggagaatccacataccttgtgtattgaaccccaggaaaaggaagaggtcgaaccaaccctgcggaaggagcatggtttcaggagtttattttaagactgctgggaaggaaacaggccccattttgtatatagttgcaacttaaactttttggcttgcaaaatatttttgtaataaagatttctgggtaataatgagtccttccggtgttcagtattcttgtctttgtgagtgcgtcccggggccgcctcggggcctgcctgccctcctgccaaagcctggaagaggattgaatggaccccagggtttggaaacaacctacagcatttgagcccctcacgtaggttttagagacgtacaatttttgtttgccctggctcagaaggagccggtgtaaggttgagataaaattccatatagacaannnnnnnnnnnnnnnnnnnnnnnnnnnnnnnnnnnnnnnnngttcaaacagcacctctttgagacttgggccccgcgtcggcacaatggggcaggaatagtccctgccagggtgactgtgtggattcaaggaggttggaagcactgagcccacgcttggcactgggtagggcatcactgaggcttgtgtctttccttcctgcccctgacctgcatagctgagtctcgtggcctctcaccactgatgggatctcgga

SEQ ID NO: 69223 - DNA, 694 bp, Homo Sapiens
  misc_feature (87)..(87): n is a, c, g, or t
ctgagaaggcagctcacgaacccaggcctgtgatctggaaccggcggaccctcaggaaactttgggtggtgagacccaaaggggtgnaggcagctggcacaagaggctgaggcctggctgaattacccatgctttaagaattgggatgggtccccagtgagctcctggattctgctggctgaaagcaacagtacagacgatgagaccgacgatcccaggacgtatcagaaatatggttacattggaacacatgagtaccctcatttctctcatagacccagcacactccaggcagcatccaccccacaggcagaagaggactggacctgcaccatcctctgaatgccagtgcatcttgggggaaagggctccagtgttatctggaccagttccttcattttcaggtgggactcttgatccagagaagacaaagctcctcagtgagctggtgtataatccaggacagaacccaggtctcctgactcctggccttctatgccctctatcctatcatagataacattctccacagcctcacttcattccacctattctctgaaaatattccctgagagagaacagagagatttagataagagaatgaaattccagccttgactttcttctgtgcacctgatgggagggtaatgtctaatgtattatcaataacaataaaaataaagcaaataccaaa

SEQ ID NO: 69224 - DNA, 1428 bp, Homo Sapiens
tggtaccgctccggattcccgggatatcgtcgacccacgcgttccgactagttctagatcgcgatctagaactagtcagcagaagagataaaagcaaacaggtctgggaggcagttctgttgccactctctctcctgtcaatgatggatctcagaaataccccagccaaatctctggacaagttcattgaagactatctcttgccagacacgtgtttccgcatgcaaatcaaccatgccattgacatcatctgtgggttcctgaaggaaaggtgcttccgaggtagctcctaccctgtgtgtgtgtccaaggtggtaaagggtggctcctcaggcaagggcaccaccctcagaggccgatctgacgctgacctggttgtcttcctcagtcctctcaccacttttcaggatcagttaaatcgccggggagagttcatccaggaaattaggagacagctggaagcctgtcaaagagagagagcattttccgtgaagtttgaggtccaggctccacgctggggcaacccccgtgcgctcagcttcgtactgagttcgctccagctcggggagggggtggagttcgatgtgctgcctgcctttgatgccctgggtcagttgactggcggctataaacctaacccccaaatctatgtcaagctcatcgaggagtgcaccgacctgcagaaagagggcgagttctccacctgcttcacagaactacagagagacttcctgaagcagcgccccaccaagctcaagagcctcatccgcctagtcaagcactggtaccaaaattgtaagaagaagcttgggaagctgccacctcagtatgccctggagctcctgacggtctatgcttgggagcgagggagcatgaaaacacatttcaacacagcccagggatttcggacggtcttggaattagtcataaactaccagcaactctgcatctactggacaaagtattatgactttaaaaaccccattattgaaaagtacctgagaaggcagctcacgaaacccaggcctgtgatcctggacccggcggaccctacaggaaacttgggtggtggagacccaaagggttggaggcagctggcacaagaggctgaggcctggctgaattacccatgctttaagaattgggatgggtccccagtgagctcctggattctgctggtgagacctcctgcttcctccctgccattcatccctgcccctctccatgaagcttgagacatatagctggagaccattctttccaaagaacttacctcttgccaaaggccatttatattcatatagtgacaggctgtgctccatattttacagtcattttggtcacaatcgagggtttctggaattttcacatcccttgtccagaattcattcccctaagagtaataataaataatctctaacaccaaaa

SEQ ID NO: 69225 - DNA, 1176 bp, Homo Sapiens
  misc_feature (211)..(239): n is a, c, g, or t
ctttctttgctatttaatgttcatcacttaacgttttgggggttcgtggaaagggtgctgcttccctctgcctgtccctctcaggcatgcctgtgtgacatcagtggcatggctccagtctgctgccctccatcccgacatggacccggagctaacactggcccctagaatcagcctaggggtcagggaccaaggacccctcaccttgcannnnnnnnnnnnnnnnnnnnnnnnnnnnnggaggagaaatctcacttttctccatgagttttttctcttgggctgagactggatactgcccggggcagctgccagagaagcatcggagggaattgaggtctgctcggccgtcttcactcgcccccgggtttggcgggccaaggactgccgaccgaggctggagctggcgtctgtcttcaagggcttacacgtggaggaatgctcccccatcctccccttccctgcaaacatggggttggctgggcccagaaggttgcgatgaagaaaagcgggccagtgtgggaatgcggcaagaaggaattgacttcgactgtgacctgtggggatttctcccagctctagacaaccctgcaaaggactgttttttcctgagcttggccagaagggggccatgaggcctcagtggactttccaccccctccctggcctgttctgttttgcctgaagttggagtgagtgtggctcccctctatttagcatgacaagccccaggcaggctgtgcgctgacaaccaccgctccccagcccagggttcccccagccctgtggaagggactaggagcactgtagtaaatggcaattctttgacctcaacctgtgatgaggggaggaaactcacctgctggcccctcacctgggcacctggggagtgggacagagtctgggtgtatttattttcctccccagcaggtggggagggggtttgggggcttgcaagtatgttttagcatgtgtttggttctggggcccctttttactccccttgagctgagatggaacccttttggcccccgagctgggggccatgagctccagacccccagcaaccctcctatcacctcccctccttgcctcctgtgtaatcatttcttgggccctcctgaaacttacacacaaaacgttaagtgatgaacattaaatagcaaagaaagaaaa

SEQ ID NO: 69226 - DNA, 887 bp, Homo Sapiens
  misc_feature (263)..(273): n is a, c, g, or t
aattaaacacttaaagaatataaatttaataataaacattatggtcaggctgtttattaaggaggcaaccacatatacaagttcggctatagaaatgtttgcaaatcaaacgtcatgtgaccttaaaggaccatgcttaacgtcaaaaatggacacctgtacattcaataaaaagttaatttaaacatacatagtctagatcattctagagttatacaaacatctggggccacatatgtatctaattttctttcaaaaaaacnnnnnnnnnnnataaaagtgatgtattgagataattttaaaaagtatctgacaattatgaatggtccccagttttacaaaatgtgatttccaggatacgaaactgaaaaaaagtcaactcttcagagagtgttttatattgtacaaacaagttttgtagaaaaatgatccagcaaatgcttgagttaagaatatttatattttttccaattctttacacttttattaacacacttacaaaaaataacattcaaacactgagaaaattaaataactttggaagcagagctcattgttttctgcttacatataagtgacaattctgggctgttggcacaaaataatcaacattcataaaacccttactactatatatcaaacataagttaaaatcataggcactagtttatcaaatccacatttcttctgtaagactaaccacagtaaatccttagattttcccaaacagaaaaattgcaatatacaaaggctttctagtaaaaaggcaatttttctctttaagaaactaaaagtcaacagtctgtggtagtacaacagcaggtaaaataatactttaccaaactcagatcaaaaatatgttttaacaagtgatgaaatattttaat

SEQ ID NO: 69227 - DNA, 844 bp, Homo Sapiens
aagtggatgaactgatggaaattttccgaagatgcaagataccaaatactgttgaggaagctgtgaggatcataactggtgggccccagagctagctgtagaaggcaacggccccgtggaaagtaatgcagtactcaccaaggccgtcaaaaggcccaacgaggattcagatgaagatgaagaaaagggagccgttgtcccccctgttcatgacatttacagagcacggcagcagaagcggattcggtagggttttaaacgcctctgcagaaaactcctgtccaggattccttttgcctcaagtggtatgtttaaaagagacaacgctttgttacaaggttcttggaaacaaagttgtattgtcattggtgcctctatcacatggttcttgagaaaaaacaaaccaacctgtgtgaattttagaatacggaacagacctatgctctaagcaaaattaggttttcaaaaatgtgagaacagtacaaagtggcagaaccacattttgttccctcttcaagggtgtcttgtatgtgccgcttgaagatttgtgagtttttcaacagttttattttaaaaactggatggcttatgattgtaaagcattttatcacattttctgaaaacaattgttcttggtttgcttatgtagagtcctgccttattgtttgtttttatttatggcagaatgtatgaaatccgttttgtagtttcaaattttaaaagtcctttaaaaaataaaaggattcagaaacatcatgcttcctctgcttctttcagattttatttacaataactacttatgttatttatccaataccatttaaaaataaatgtcaggacaagg

SEQ ID NO: 69228 - DNA, 952 bp, Homo Sapiens
  misc_feature (27)..(27): n is a, c, g, or t
  misc_feature (35)..(35): n is a, c, g, or t
  misc_feature (127)..(127): n is a, c, g, or t
  misc_feature (180)..(180): n is a, c, g, or t
  misc_feature (219)..(219): n is a, c, g, or t
atacacgtatcatgcccacttcccttntatgtatnctcatagtatgtcccaaccataccacttccacctcagatatgagtcttgaaattcccagaaaatgcataatgtatttttccagtatcatttntaaggacaagtcagatataacgtccttgtgtgccgtgtccggcctgtccttgngaactgagttccagactcatcagatgtcacacaaaagtngaagaatgaagagatagattcaagcatggtggaactatgtccctgcacccaaagaagttcttttgaactttatggagaccgagtcctgaaactgggaactaacatgtacagcgtgaatcagcctgtggaaactcatgtgtctggatcatcaaagaacttagcctcatggacccaggaaagcattgctccaaaccctcttgctaaagaagagctgaatttcttggccaggctgatgggagggatggagattaagaaacccagtggccctgagcccggattccggttgaatctctttaccaccgatgaagaagaggaacaagcagcgctaaccaggccagaagagttatcctatgaagttatcaacatacaagccacccaggaccagcaacggagcgaggagctggctcgaatcatgggggagtttgagatcacggagcagccaaggctgagcaccagcaaaggggacgatttgctcgccatgatggatgagttatagctgttctgaccaggcgtcctctgcccccagggagaggctgctggatggtgacccctggggaatgccccatggcccagaatgatgctgctagttttctactgagtgaagccattacgtctatttcttatttatgttgtaaggaactgtgtgagtctcccttgaggagcactcactcttgaaggcacacacatacacatattttcagtgaaatatattctgacttttaaacttgaaaaa

SEQ ID NO: 69229 - DNA, 1036 bp, Homo Sapiens
  misc_feature (54)..(55): n is a, c, g, or t
  misc_feature (128)..(128): n is a, c, g, or t
  misc_feature (200)..(201): n is a, c, g, or t
  misc_feature (205)..(205): n is a, c, g, or t
  misc_feature (924)..(933): n is a, c, g, or t
acattctcttagcttattagagctatgaactgcccattgtacagctaatacgtnntaaagagattatgcactgagctatgcagaatactcattgttgtaatagatggtaataaatagagctgatattntgaagtgtgatcccgcactgaaatagagtctctagatctgcataaaacaaaaatgttcctagaaatagtgtnntgtntggaattagaaaaattacattctctcccaggtaacatagttctctcaatgtaaacttggaaccttgaaaccctacttaattaagagaaagaaatgtctgagaaatagttcccttgatttcttatgctggcattaagatcaattatttaacagatagtcctctgagatacaagtaaggaatatttagacacaaatccttgtcctatagaaacagatatacccaaatgacaaattgtttcttcataatgatcttccatttttaacactgataccactacacagtacatatgaaaacagaagctggggagaagaatgtttttttcacaattgaattgctgcatttctcaaactttgggatctatgaaagcggggagagggaacctgaatattaattatgagcacaaatttgaaggaaagaaaacaaagaaccattatctaatcaagctttgaaagtcctgcatgtttgccttttattttagtgttgacgccaacatagactgtctaaggtatttttttccccaaacacttgaatcttggtcgttggtatgtaatccactctctagagtccagtgtactttagacttcatctgagtccaatacatgtaccacactactgttttattaatgtaaaaaccttgtaaatgaatttcagatgggtgatttaagtgagtcacaagtcacaaaactttgctattcatagttaatcaaatagaactgggnnnnnnnnnnccagagtgtggtgtaaataaagaaatataagaagttctgttctataactgctctgttaacatagtttttaaacattaaaaaatgtgaactaaaagtaaaaaaa

SEQ ID NO: 69230 - DNA, 565 bp, Homo Sapiens
gcacgaggtggaaaagaaaatgaaaaccaagagaaatattgccaagcattacaagaataacccatcactaataactttcctttgcaaaaactgcagtgtgctagcctgttctggggaagatatccatgtaattgagaaaatgcatcacgtcaatatgaccccagaattcaaggaactttacattgtaagagaaaacaaaacactgcaaaagaagtgtgccgactatcaaataaatggtgaaatcatctgcaaatgtggccaggcttggggaacaatgatggtgcacaaaggcttagatttgccttgtctcaaaataaggaattttgtagtggttttcaaaaataattcaacaaagaaacaatacaaaaagtgggtagaattacctatcacatttcccaatcttgactattcagaatgctgtttatttagtgatgaggattagcacttgattgaagattcttttaaaatactatcagttaaacatttaatatgattatgattaatgtattcattatgctacagaactgacataagaatcaataaaatgattgttttactctgaaaa

SEQ ID NO: 69231 - DNA, 1304 bp, Homo Sapiens
  misc_feature (51)..(63): n is a, c, g, or t
  misc_feature (1030)..(1134): n is a, c, g, or t
gagttaacagctcttgctattctttagataatttaactgttgggacgatannnnnnnnnnnnncctgagttaagaatcctattgagacatttaaagaggtgtaatgtatagtgtacctctgaaataactaacaggaagtatgaccttattctttgtatttgaagctccataatgggagaagtaaagaacaaagacttaaggaacagcttggcgctcaacaagaaccagtgaagaaatccattcaggaatcagaagcttttttgcctcagagcatacctgaagagagatacaagatgaagagcaagcccctaggaatctgcctgataatcgattgcattggcaatgagacagagcttcttcgagacaccttcacttccctgggctatgaagtccagaaattcttgcatctcagtatgcatggtatatcccagattcttggccaatttgcctgtatgcccgagcaccgagactacgacagctttgtgtgtgtcctggtgagccgaggaggctcccagagtgtgtatggtgtggatcagactcactcagggctccccctgcatcacatcaggaggatgttcatgggagattcatgcccttatctagcagggaagccaaagatgttttttattcagaactatgtggtgtcagagggccagctggaggacagcagcctcttggaggtggatgggccagcgatgaagaatgtggaattcaaggctcagaagcgagggctgtgcacagttcaccgagaagctgacttcttctggagcctgtgtactgcggacatgtccctgctggagcagtctcacagctcaccatccctgtacctgcagtgcctctcccagaaactgagacaagaaagaaaacgcccactcctggatcttcacattgaactcaatggctacatgtatgattggaacagcagagtttctgccaaggagaaatattatgtctggctgcagcacactctgagaaagaaacttatcctctcctacacataagaaaccaaaaggctgggcgtagtcgtcannnnnnnnnnnnnnnnnnnnnnnnnnnnnnnnnnnnnnnnnnnnnnnnnnnnnnnnnnnnnnnnnnnnnnnnnnnnnnnnnnnnnnnnnnnnnnnnnnnnnnnnntacaaaaattagctgggtgtgggtgtgggtacctgtattcccagttacttgggaggctgaggtgggaggatcttttgaacccaggagttcagggtcatagcatgctgtgattgtgcctacgaatagccactgcataccaacctgggcaatatagcaagatcccatctctt

SEQ ID NO: 69232 - DNA, 446 bp, Homo Sapiens
  misc_feature (156)..(308): n is a, c, g, or t
tattgagattggatcttgctatattgcccaggttggtatgcagtggctattcgtaggcacaatcacagcatgctatgaccctgaactcctgggttcaaaagatcctcccacctcagcctcccaagtaactgggaatacaggtacccacacccacannnnnnnnnnnnnnnnnnnnnnnnnnnnnnnnnnnnnnnnnnnnnnnnnnnnnnnnnnnnnnnnnnnnnnnnnnnnnnnnnnnnnnnnnnnnnnnnnnnnnnnnnnnnnnnnnnnnnnnnnnnnnnnnnnnnnnnnnnnnnnnnnnnnnnnnngcaactctaatgatatttcaaacaatggtccccttttaggtcacactatcaaatcagagaaagatatacttgactagctgtaaaatgcaatttgaggtctaggtgaatgaacaagtaacctctaaatcataaggctat

SEQ ID NO: 69233 - DNA, 805 bp, Homo Sapiens
  misc_feature (60)..(60): n is a, c, g, or t
  misc_feature (206)..(216): n is a, c, g, or t
gagcatccccgtaaagttgtagttgcagatttaaaatcacaaacattaacggcagtagcnaccaccatgtaaaagtgagctcagacgtctctaaaaaatgtttccttgataaaagcacatggcggttgaatcttaaggttaaattttaatatgaaagatcctcatgaattaaatagttgatgcaatttttaacgttaattgatatnnnnnnnnnnncaacaaaattaggcttgtaaaactgactttttcattacgtgggttttgaaatctagccccagacatactgtgttgagagatacttagagggagggagtaggttttgaagaggttgatggtggtggggagggaaggcctcctgaattgagtttgatgcagagctttttagccatgaagaatctttcagtcatagtactaataattaaattttcagtatttaaaaagacaaagtattttgtccatttgagattctgcactccatgaaaagttcacttggacgctggggccaaaagctgttgattttcttaagttgacggttgtcaatatatcgaactgttcccaagttagtcaagtatgtctcaacactagcatgatataaaaagggacactgcagctgaatgaaaaaggaatcaaaatccactttgtacataagttaaagtcctaattggatttgtaccgtcctcccattttgttctcggaagattaaatgctacatgtgtaagtctgcctaaataggtagcttaaacttatgtcaaaatgtctgcagcagtttgtcaataaagtttagtccttttttaatcaaaaaaaa

SEQ ID NO: 69234 - DNA, 338 bp, Homo Sapiens
tttataactattaacgttaaaaattgcatcaactatttaattcatgaggatctttcatattaaaatttaaccttaagattcaaccgccatgtgcttttataaaggaaacattttttagagacgtctgagctcacttttacatggtggtgcctactgccgttaatgtttgtgattttaaatcttaaacagccctgaattttgaaatgtagcctagtttgggattctgcaactacaactttacgggatgcctcaaatcaaaactaagagaaacttaacaagcctttacttcagaacctttaagcaagcaatgtcatttttgaaactaacaggtttgtgtg

SEQ ID NO: 69235 - DNA, 1777 bp, Homo Sapiens
ctctctcgctgggtcgctcgggtcggcttcggtcgctaccgctcccgctctgccacccccgccaaccgccgctcgggcctccgtcgctgccgcgtcgctttctcgctccttggatcgcacatcctcccagatgcagcgccgggacgaccccgccgcgcgcatgagccggtcttcgggccgtagcggctccatggacccctccggtgcccacccctcggtgcgtcagacgccgtctcggcagccgccgctgcctcaccggtcccggggaggcggagggggatcccgcgggggcgcccgggcctcgcccgccacgcagccgccaccgctgctgccgccctcggccacgggtcccgacgcgacagtgggcgggccagcgccgaccccgctgctgcccccctcggccacagcctcggtcaagatggagccagagaacaagtacctgcccgaactcatggccgagaaggactcgctcgacccgtccttcactcacgccatgcagctgctgacggcagaaattgagaagattcagaaaggagactcaaaaaaggatgatgaggagaattacttggatttattttctcataagaacatgaaactgaaagagcgagtgctgatacctgtcaagcagtatcccaagttcaattttgtggggaagattcttggaccacaagggaatacaatcaaaagactgcaggaagagactggtgcaaagatctctgtattgggaaagggctcaatgagagacaaagccaaggaggaagagctgcgcaaaggtggagaccccaaatatgcccacttgaatatggatctgcatgtcttcattgaagtctttggacccccatgtgaggcttatgctcttatggcccatgccatggaggaagtcaagaaatttctagtaccggatatgatggatgatatctgtcaggagcaatttctagagctgtcctacttgaatggagtacctgaaccctctcgtggacgtggggtgccagtgagaggccggggagctgcacctcctccaccacctgttcccaggggccgtggtgttggaccacctcggggggctttggtacgtggtacaccagtaaggggagccatcaccagaggtgccactgtgactcgaggcgtgccacccccacctactgtgaggggtgctccagcaccaagagcacggacagcgggcatccagaggatacctttgcctccacctcctgcacccagaaacatatgaagaatatggatatgatgatacatacgcagaacaaagttacgaaggctacgaaggctattacagccagagtcaaggggactcagaatattatgactatggacatggggaggttcaagattcttatgaagcttatggccaggacgactggaatgggaccaggccgtcgctgaaggcccctcctgctaggccagtgaagggagcatacagagagcacccatatggacgttattaaaaacaaacatgaggggaaaatatcagttatgagcaaagttgttactgatttcttgtatctcccaggattcctgttgctttacccacaacagacaagtaattgtctaagtgtttttcttcgtggtccccttcttctccccaccttattccattcttaactctgcattctggcttctgtatgtagtattttaaaatgagttaaaatagatttaggaatattgaattaattttttaagtgtgtagatgcttttttctttgttgtttaaatataaacagaagtgtaccttttataataaaaaaaagaagttgagtaaa

SEQ ID NO: 69236 - DNA, 555 bp, Homo Sapiens
ctttttttacttaattctttggaggtacaatatattggagtcttaagaatttgattttataccaataagaaataaaaattagggatctttcctgtagtatatagttttactattttaaagagatctctgaattttacaagagaaccaacattccttaatggcagaactttgaaagttgatttgggaggctttttgctgcaggatctcaaaaatagagagagagatgattctacttaaatgtttttaattttctaacttccatcaggttgatacttaagctctattttgtaaagagtaaatcatcctttagtatgctgcataagatgatcagcattcttgcactttctcagtaataagacgtgccgggcaattggctccccaggacgcattgtgtttttaacctaacgagaggactttggggcaggtgattaaatttatataggtacctcaagaaaaagaacctgaatatgctgcattttctttctttagcttttacatgtagcattttgttttgctttcgttacttttgttttgatatatgctttttggacccca

SEQ ID NO: 69237 - DNA, 1023 bp, Homo Sapiens
  misc_feature (44)..(437): n is a, c, g, or t
cggcgcctttattaaagggttcatgcctttgatgcttttgatannnnnnnnnnnnnnnnnnnnnnnnnnnnnnnnnnnnnnnnnnnnnnnnnnnnnnnnnnnnnnnnnnnnnnnnnnnnnnnnnnnnnnnnnnnnnnnnnnnnnnnnnnnnnnnnnnnnnnnnnnnnnnnnnnnnnnnnnnnnnnnnnnnnnnnnnnnnnnnnnnnnnnnnnnnnnnnnnnnnnnnnnnnnnnnnnnnnnnnnnnnnnnnnnnnnnnnnnnnnnnnnnnnnnnnnnnnnnnnnnnnnnnnnnnnnnnnnnnnnnnnnnnnnnnnnnnnnnnnnnnnnnnnnnnnnnnnnnnnnnnnnnnnnnnnnnnnnnnnnnnnnnnnnnnnnnnnnnnnnnnnnnnnnnnnnnnnnnnnnnnnnnnnnnnnnnnnnnnnnnnnnnnnnnnnnnnaagaattcggaacgaggccgcggctgtaggcttttttggcctacagagtaaatggacaatatattatggaaggacttgcatccagcttcctatttacaatgggaggtttaggtttcataatcctggaccgatcgaatgcaccaaatatcccaaaactcaatagattccttcttctgttcattggattcgtctgtgtcctattgagttttttcatggctagagtattcatgagaatgaaactgccgggctatctgatgggttagagtgcctttgagaagaaatcagtggatactggatttgctcctgtcaatgaagttttaaaggctgtaccaatcctctaatatgaaatgtggaaaagaatgaagagcagcagtaaaagaaatatctagtgaaaaaacaggaagcgtattgaagcttggactagaatttcttcttggtattaaagagacaagtttatcacagaattttttttcctgctggcctattgctataccaatgatgttgagtggcattttctttttagtttttcattaaaatatattccatatctacaactataatatcaaataaagtgattattttttac

SEQ ID NO: 69238 - DNA, 1858 bp, Homo Sapiens
  misc_feature (1181)..(1773): n is a, c, g, or t
cagtcgacggtaccggacatatgcccgggaattcggccattacggccgggggagggcgggcctgtttccgggaggcgcgtggggcttgaggccgagaacggcccttgctgccaccaacatggagactttgtaccgtgtcccgttcttagtgctcgaatgtcccaacctgaagctgaagaagccgccctggttgcacatgccgtcggccatgactgtgtatgctctggtggtggtgtcttacttcctcatcaccggaggaataatttatgatgttattgttgaacctccaagtgtcggttctatgactgatgaacatgggcatcagaggccagtagctttcttggcctacagagtaaatggacaatatattatggaaggacttgcatccagcttcctatttacaatgggaggtttaggtttcataatcctggaccgatcgaatgcaccaaatatcccaaaactcaatagattccttcttctgttcattggattcgtctgtgtcctattgagttttttcatggctagagtattcatgagaatgaaactgccgggctatctgatgggttagagtgcctttgagaagaaatcagtggatactggatttgctcctgtcaatgaagttttaaaggctgtaccaatcctctaatatgaaatgtggaaaagaatgaagagcagcagtaaaagaaatatctagtgaaaaaacaggaagcgtattgaagcttggactagaatttcttcttggtattaaagagacaagtttatcacagaattttttttcctgctggcctattgctataccaatgatgttgagtggcattttctttttagtttttcattaaaatatattccatatctacaactataatatcaaataaagtgattattttttacaaccctcttaacattttttggagatgacatttctgattttcagaaattaacataaaatccagaagcaagattccgtaagctgagaactctggacagttgatcagctttacctatggtgctttgcctttaactagagtgtgtgatggtagattatttcagatatgtatgtaaaactgtttcctgaacaataagatgtatgaacggagcagaaataaatactttttctaattagggaaacaacagaaaagaacgcctacagccgcggtcgctccaacatcagaatggtcctnnnnnnnnnnnnnnnnnnnnnnnnnnnnnnnnnnnnnnnnnnnnnnnnnnnnnnnnnnnnnnnnnnnnnnnnnnnnnnnnnnnnnnnnnnnnnnnnnnnnnnnnnnnnnnnnnnnnnnnnnnnnnnnnnnnnnnnnnnnnnnnnnnnnnnnnnnnnnnnnnnnnnnnnnnnnnnnnnnnnnnnnnnnnnnnnnnnnnnnnnnnnnnnnnnnnnnnnnnnnnnnnnnnnnnnnnnnnnnnnnnnnnnnnnnnnnnnnnnnnnnnnnnnnnnnnnnnnnnnnnnnnnnnnnnnnnnnnnnnnnnnnnnnnnnnnnnnnnnnnnnnnnnnnnnnnnnnnnnnnnnnnnnnnnnnnnnnnnnnnnnnnnnnnnnnnnnnnnnnnnnnnnnnnnnnnnnnnnnnnnnnnnnnnnnnnnnnnnnnnnnnnnnnnnnnnnnnnnnnnnnnnnnnnnnnnnnnnnnnnnnnnnnnnnnnnnnnnnnnnnnnnnnnnnnnnnnnnnnnnnnnnnnnnnnnnnnnnnnnnnnnnnnnnnnnnnnnnnnnnnnnnnnnnnnnnnnnnnnnnnnnnnnnnnnnnnnnnnnnnnnnnnnnnnnnnngaccatgcgcttacggatactgtcgactttctccttcgggagcgtggcgcttctaaagccagctgtggtaccattcggcgaggcg

SEQ ID NO: 69239 - DNA, 958 bp, Homo Sapiens
  misc_feature (84)..(118): n is a, c, g, or t
aagacttaagatcactatagggcgctagctccgttctagccgaacgaccgagcgcagcgagtagttgagcgaggaagcggccgnnnnnnnnnnnnnnnnnnnnnnnnnnnnnnnnnnncagtcgacggtaccggacatatgcccgggaattcggccattacggccgggggagaacggcccttgctgccaccaacatggagactttgtaccgtgtcccgttcttaggtgctcgaatgtcccaacctgaagctgaagaagccgccctggttgcacatgccgtcggccatgactgtgtagtgctctggtggtggtgtcttacttcctcatcaccggaggaataatttatgatgttattgttgaacctccaagtgtcggttctatgactgatgaacatgggcatcagaggccagtagctttcttggcctacagagtaaatggacaatatattatggaaggacttgcatccagcttcctatttacaatgggaggtttaggtttcataatcctggaccgatcgaatgcaccaaatatcccaaaactcaatagattccttcttctgttcattggattcgtctgtgtcctattgagttttttcatggtctagagtattcatgagaatgaaactgccgggcgtatctgatgggttagagtgccgtttgagaagaaatcagtggatactggatttggctcctgtcaatgaagttttaaaggctgtaccaatcctctaatatgaacatgtggcaaaagaatgaagagcagcagtaaaagaaatattctagtgaaaaaaacaggaaagcgtattgaagctttggactagaatttcttcttggtattacagagaccaagtttatcacagaatttttttcctgctggtctattgtataccaatgatgttgaagtggcatttctttttaagtttttccttgaaaatatttttcattatttacattattatatt

SEQ ID NO: 69240 - DNA, 1049 bp, Homo Sapiens
  misc_feature (933)..(967): n is a, c, g, or t
  misc_feature (970)..(1008): n is a, c, g, or t
aggtaactgtccacgtcccgattctcgctacggatctgctcggattttagtaattttgaaatcgaagttcatccccagaatgtaaggggggtggtaaaaatggtccccttaattggaatattatattgtagatatggaatatattgttaagggaacaactcaaagaaaatgccaactcgacatcattggtatagcaatagccagcaggaaaaaaaattctgtgataaacttgtctctgttaataccaagaagaaattctagtccaagcttcaatacgcttcctgttttttcactagatatttcttttactgctgctcttcattcttttccacatttcatattagaggattggtacagcctttaaaacttcattgacaggagcaaatccagtatccactgatttcttctcaaaggcactctaacccatcagatagcccggcagtttcattctcatgaatactctagccatgaaaaaactcaataggacacagacgaatccaatgaacagaagaaggaatctattgagttttgggatatttggtgcattcgatcggtccaggattatgaaacctaaacctcccattgtaaataggaagctggatgcaagtccttccataatatattgtccatttactctgtaggccaagaaagctactggcctctgatgcccatgttcatcagtcatagaaccgacacttggaggttcaacaataacatcataaattattcctccggtgatgaggaagtaagacaccaccaccagagcatacacagtcatggccgacggcatgtgcaaccagggcggcttcttcagcttcaggttgggacattcgagcactaagaacgggacacggtacaaagtctccatgttggtggcagcaccccggccgtaatggccgaattcccgggcatatgtccggtaccgtcgactgnnnnnnnnnnnnnnnnnnnnnnnnnnnnnnnnnnncgnnnnnnnnnnnnnnnnnnnnnnnnnnnnnnnnnnnnnnnctacaacgacggcagcgccctatagtgatcgatcagtctgg

SEQ ID NO: 69241 - DNA, 934 bp, Homo Sapiens
  misc_feature (760)..(760): n is a, c, g, or t
cagtcgacggtaccggacatatgcccgggaattcggccattacggccgggggtttccgggaggcgcgtggggcttgaggccgagaacggcccttgctgccaccaacatggagactttgtaccgtgtcccgttcttagtgctcgaatgtcccaacctgaagctgaagaagccgccctggttgcacatgccgtcggccatgactgtgtatgctctggtggtggtgtcttacttcctcatcaccggaggaataatttatgatgttattgttgaacctccaagtgtcggttctatgactgatgaacatgggcatcagaggccagtagctttcttggcctacagagtaaatggacaatatattatggaaggacttgcatccagcttcctatttacaatgggaggtttaggtttcataatcctggaccgatcgaatgcaccaaatatcccaaaactcaatagattccttcttctgttcattggattcgtctgtgtcctattgagttttttcatggctagagtattcatgagaatgaaactgccgggctatctgatgggttagagtgcctttgagaagaaatcagtggatactggatttgctcctgtcaatgaagttttaaaggctgtaccaaatcctctaatatgaaatgtggacaaagaatgaagagcagcagtacaagaaatatctagtgaaaaaacagggaagcgtattgaagcttggactagaatttcttctgggtattaaagagacaagtttatcaccagnatttattttaccggttggcctaatgctataccaatgatgtttgagtgggcatttcgttatgaggtgttcattaagaattttttccgatatttccagtattatttcaagttaagtgataattttacaacttcttaacattttggggatgattcggtttagaagtaaataatcgga

SEQ ID NO: 69242 - DNA, 1135 bp, Homo Sapiens
  misc_feature (75)..(94): n is a, c, g, or t
  misc_feature (173)..(223): n is a, c, g, or t
  misc_feature (456)..(481): n is a, c, g, or t
  misc_feature (526)..(896): n is a, c, g, or t
  misc_feature (919)..(919): n is a, c, g, or t
ggttgtaacgacggccagtgtcaagctaaaattatcctcactaaagggcatagcttgcggccgcggctgtaggcnnnnnnnnnnnnnnnnnnnngtgtctgtggaggtcagcgtcagagcacgctgctgagaggtctgagtcctgctgatgcctggagtcgcggtctcggtgnnnnnnnnnnnnnnnnnnnnnnnnnnnnnnnnnnnnnnnnnnnnnnnnnnnaggctcttctagaggatccttctgttcgctcctccgggctttcttttcaacatgactgtcactgttctccacactgtcgtgtctccgtttccgggactttccattttcgtgttcgtgaaaccgatcagagaggttacagttgtctccggctacaagtgcagttctgtcgtgggagaagcggtcggggtgcggggcgagggctcctctagaagagcctaaagcaaagaagcacnnnnnnnnnnnnnnnnnnnnnnnnnngcctacagccgcggccgctccaaccctcgttccgaattcttggtnnnnnnnnnnnnnnnnnnnnnnnnnnnnnnnnnnnnnnnnnnnnnnnnnnnnnnnnnnnnnnnnnnnnnnnnnnnnnnnnnnnnnnnnnnnnnnnnnnnnnnnnnnnnnnnnnnnnnnnnnnnnnnnnnnnnnnnnnnnnnnnnnnnnnnnnnnnnnnnnnnnnnnnnnnnnnnnnnnnnnnnnnnnnnnnnnnnnnnnnnnnnnnnnnnnnnnnnnnnnnnnnnnnnnnnnnnnnnnnnnnnnnnnnnnnnnnnnnnnnnnnnnnnnnnnnnnnnnnnnnnnnnnnnnnnnnnnnnnnnnnnnnnnnnnnnnnnnnnnnnnnnnnnnnnnnnnnnnnnnnnnnnnnnnnnnnnnnnnnnnnnnnnnnnnnaatactcatgaaatatattgttncaaatgccatcataagccatgaacctcaacatgctcttgctggcgttttcataatgtcgtccccttaccacattaaaaatctactccactcaaatgtgcaaaccctacagacataaaaaccaggctttccctgaagctcctccagtcccctgttcgacctgctgctacggatactgtcgccttctcctccgaaacgtgcgcttctcagccacgggg

SEQ ID NO: 69243 - DNA, 1111 bp, Homo Sapiens
  misc_feature (561)..(578): n is a, c, g, or t
  misc_feature (625)..(862): n is a, c, g, or t
attcacgatttgcctgaacatcactctgaaacacttaagttcctttcagctcatctgaacacagtggcagaaaattcagacacagatcagatggcaccaagaaacctagcaatagtgtctggtcccacccttgttccaacatcagaagggtaacactaccgcgaattcggcacgagggtggaggtcagcgtcagagcacgctgctgagaggtctgagtcctgctgatgcctggagtcgcggtctcggtgtttgtctttggatttctttttcttctttgattttttgtgcttctttgctttaggctcttctagaggatccttctgttcgctcctccgggctttcttttcaacatgactgtcactgttctccacactgtcgtgtctccgtttccgggactttccattttcgtgttcgtgaaaccgatcagagaggttacagttgtctccggctacaagtgcagttctgtcgtgggagaagcggtcggggtgcggggcgagggcgtggggcgcgaacagaaggatcctctagaagagcctaaagcaaagaagcacaaaaaatcnnnnnnnnnnnnnnnnnngcctacagccgcgaccgctccaacatcagcctcatgccgaattcatnnnnnnnnnnnnnnnnnnnnnnnnnnnnnnnnnnnnnnnnnnnnnnnnnnnnnnnnnnnnnnnnnnnnnnnnnnnnnnnnnnnnnnnnnnnnnnnnnnnnnnnnnnnnnnnnnnnnnnnnnnnnnnnnnnnnnnnnnnnnnnnnnnnnnnnnnnnnnnnnnnnnnnnnnnnnnnnnnnnnnnnnnnnnnnnnnnnnnnnnnnnnnnnnnnnnnnnnnnnnnnnnnnnnnnnnnnnnnncccccgggaaacggccgttgggtatagggcgttttccgcttcctcgctcactgactccgctggctcggtcttcgggtggcgctaccggataactcatccaaggcgcaaaacggtatccaaaaaccaggggataagcaggaagaaattgatcaaatgtaaaaatgtcagaacctaaaaagcacttgcggcgttttcaaaagtccgcccctatgaaacaaaaatcccctaatcaaaggaggaacctaagat

SEQ ID NO: 69244 - DNA, 1254 bp, Homo Sapiens
  misc_feature (757)..(827): n is a, c, g, or t
  misc_feature (1113)..(1201): n is a, c, g, or t
gaagcatgtgactataaaccagtggtacaaaaaagcaggctggtaccggccggaatcccgggatatcgtcgaccacgcgtcgatttattgaatgaaacaagcaggtgtttatatggagtagcaaaggacttaaaattaccaaatgcttctaaatatgaaggagaggttggggacacgcaccctatgtgataccaagttttattgtcaagacagtgtcatggtgcagaggtaggcattctgagcaggggaacaaaataagggcctagaaactcacccgtgcatatgttgacctttgcaaaatgacctggtgacatggcaagtcagtggggacaggaaggaccactccctaagtaatcccagaacaatggctattcatgtgggaaaaaaagaaattttactttctctcaccttacctggtgataagttccaaatatgttaagggctttaatacaaaaagcaaaaattgtcagtgtttggatgaaaaaagccttagggcaggaaagaatctcttgagacataaagtagtaatcataaaggacaagatggttaagtcaattctgttaaaactcaaggcttatattaagcaaacacttgaagtgagaagatgatccacaacttgagaagacatttataatacaaataactgatgaaggattcataatcacaaatatagagaattcctatttaaaaaaatagaaaaatagtgaagactacacaagaggaaatagggcttttaaataaatagatgttctgtagnnnnnnnnnnnnnnnnnnnnnnnnnnnnnnnnnnnnnnnnnnnnnnnnnnnnnnnnnnnnnnnnnnnnnnngggtctgacagtaccagttgttagatctgtagggacttgtacaacattgtggatgtgtaaacaggcaccactgctttaaaaaacaattatcccttacagacttgaacatttgcagaccttatgatcttgcttccaactcccacctgtatgtccagcaaactcttgcatgtggccactaggaggaatgtgtaagaatgttcatagttacatatttataatagttaataactggaaaaagtgaaatgtatgtctgtctacaggaaaataggtgaataattagatatannnnnnnnnnnnnnnnnnnnnnnnnnnnnnnnnnnnnnnnnnnnnnnnnnnnnnnnnnnnnnnnnnnnnnnnnnnnnnnnnnnnnnnnnaggaaaaaagcaagtttgaagagaccacatggggcgtactatttttattgagc

SEQ ID NO: 69245 - DNA, 837 bp, Homo Sapiens
aatagctttaataatgatgtctgtagcatgtcaggaaattgaatagaccacatgagatccatttatatccataagattgcaaaggtgggtctgacagtaccagttgttagatctgtagggacttgtacaacattgtggatgtgtaaacaggcaccactgcttaaaaaaacaattatcccttacagacttgaacatttgcagaccttatgatcttgcttccaactcccacctgtatgtccagcaaactcttgcatgtggccactaggaggaatgtgtaagaatgttcatagttacatatttataatagttaataactggaaaaagtgaaatgtatgtctgtctacaggaaaataggtgaataattagatatatgtattcattctacgggatattattcagtagtggaaatgagtgaactacagctatacctcacaataagaatgaatctcagaaaatattaaggaaaaaagcaagtttgaagagaccacatggggcgtactatttttattgagcccaaaaacaagcaaaaccaaagaatatgtagtctaagcatacgtatacaataaaactatgctatttaaagaggacgaaggtaactgataaaccaaaattgagcatagtaattacccacagaaggaggaagtggaagggacaggagcacataggtagatgccaagttatgcagctgttctggttcctcctggtaggcttacaagtgtttactatatgctattaatacattatactttataactaatagataacagttttttacatattaaatatgttctacttaaatatattataaaaaataaaggcaaagtggaatgataacct

SEQ ID NO: 69246 - DNA, 553 bp, Homo Sapiens
aatatgaattaggaccacaatgagattccattttatatccataagatttgcaaaggttgggtctgacagtaccagttgttagatctgtagggacttgtacaacattgtggatgtgtaaacaggcaccactgctttaaaaaacaattatcccttacagacttgaacatttgcagaccttatgatcttgcttccaactcccacctgtatgtccagcaaactcttgcatgtggccactaggaggaatgtgtaagaatgttcatagttacatatttataatagttaataactggaaaaagtgaaatgtatgtctgtctacaggaaaataggtgaataattagatatatgtattcattctacgggatattattcagtagtggaaatgagtgaactacagctatacctcacaataagaatgaatctcagaaaatattaaggaaaaaagcaagtttgaagagaccacatggggcgtactatttttattgagcccaaaaacaagcaaaaccaaagaatatgtagtctaagcatacgtatacaataaaactatgcaattaaa

SEQ ID NO: 69247 - DNA, 1310 bp, Homo Sapiens
  misc_feature (23)..(23): n is a, c, g, or t
  misc_feature (1245)..(1265): n is a, c, g, or t
gcggccgcggcaagatcatcgtngggcgacgccacagagaaaggtgtgtccccagggaagcgtgtgactagagggaaaggactggccccatccatatcagacatggccagtcttgatcctcatgtgtcagcagggggacaatgaggcgtgtggccagagggagagggctggccctgccatcactagaacacaggccgtcctgttcatatgatgcactgccacttccgttttgtgaaaccaggaatcctgaggctcatctttattttttcagaacagacgtagagagatgaaggcttgtggaggaaaagatggtgagagacttgggcagaaaatgagtagtcctcaggaagaaatcttggttatgtgtttagagcatgaaggacagagccatatagtgtggcagtgaatatacctgctatctccatctcagaggtcgtctctactttgcccttttgccctttcagtatagatgtgatttctgattctcttacagattgtttgctttgcgagatctgatgttatgttgcagtctcttggtaaatgatgcctagttggtgttttattttcatttaatttttacagtctgttctgtgttgagggaattcaggaaagagacaaacatatgttagcattttaatcagggaattaagtttgagtcagcctagctgaacttcctttgctaaagaaagaagaaaacttttctggcagccccgttcatgcacagcttaggatacatcacgagcctgacagatgcatccaagaagtcagattcaaatccgctgactgaaatacttaagtgtcctactaaagtggtcttactaaggaacatggttggtgcgggagaggtggatgaagacttggaagttgaaaccaaggaagaatgtgaaaaatatggcaaagttggaaaatgtgtgatatttgaaattcctggtgcccctgatgatgaagcagtacggatatttttagaatttgagagagttgaatcagcaattaaagcggttgttgacttgaatgggaggtattttggtggacgggtggtaaaagcatgtttctacaatttggacaaattcagggtcttggatttggcagaacaagtttgattttaagaactagagcacgagtcatctccggtgatccttaaatgaactgcaggctgagaaaagaaggaaaaaggtcacagcctccatggctgttgcataccaagactcttggaaggacttctaagatatatgttgattgatcccnnnnnnnnnnnnnnnnnnnnnaatatagtataaaaatccttttaaaaaaacaacaatctgtgtgcc

SEQ ID NO: 69248 - DNA, 1099 bp, Homo Sapiens
  misc_feature (61)..(87): n is a, c, g, or t
  misc_feature (110)..(130): n is a, c, g, or t
  misc_feature (251)..(917): n is a, c, g, or t
  misc_feature (1052)..(1052): n is a, c, g, or t
  misc_feature (1061)..(1061): n is a, c, g, or t
gtgccaagctaaaattaaccctcactaaacgggaataagcttgcggccgcggctgtaggcnnnnnnnnnnnnnnnnnnnnnnnnnnnaaaaggatttttatactatattnnnnnnnnnnnnnnnnnnnnngggatcaatcaacatatatcttagaagtccttccaagagtcttggtatgcaacagccatggaggctgtgacctttttccttcttttctaagcctacagccgcgcctcgtgccgaattcttnnnnnnnnnnnnnnnnnnnnnnnnnnnnnnnnnnnnnnnnnnnnnnnnnnnnnnnnnnnnnnnnnnnnnnnnnnnnnnnnnnnnnnnnnnnnnnnnnnnnnnnnnnnnnnnnnnnnnnnnnnnnnnnnnnnnnnnnnnnnnnnnnnnnnnnnnnnnnnnnnnnnnnnnnnnnnnnnnnnnnnnnnnnnnnnnnnnnnnnnnnnnnnnnnnnnnnnnnnnnnnnnnnnnnnnnnnnnnnnnnnnnnnnnnnnnnnnnnnnnnnnnnnnnnnnnnnnnnnnnnnnnnnnnnnnnnnnnnnnnnnnnnnnnnnnnnnnnnnnnnnnnnnnnnnnnnnnnnnnnnnnnnnnnnnnnnnnnnnnnnnnnnnnnnnnnnnnnnnnnnnnnnnnnnnnnnnnnnnnnnnnnnnnnnnnnnnnnnnnnnnnnnnnnnnnnnnnnnnnnnnnnnnnnnnnnnnnnnnnnnnnnnnnnnnnnnnnnnnnnnnnnnnnnnnnnnnnnnnnnnnnnnnnnnnnnnnnnnnnnnnnnnnnnnnnnnnnnnnnnnnnnnnnnnnnnnnnnnnnnnnnnnnnnnnnnnnnnnnnnnnnnnnnnnnnnnnnnnnnnnnnnnnnnnnnnnnnnnnnnnnnnnnnnnnnnnnnnnnnnnnnnnnnnnnnnnnnnnnnnnnnnnnntcggtgacgtcgtcgctccagctggctgtggcagaaccccgtcagccgaccgtggcttaccgggactacgtctgatccaccggtagacacattacgcatgggagagcactggaacaggttacacacgaggagttngcgtgtaanagtctgagtggggctatacggtaactacagaagtttgg

SEQ ID NO: 69249 - DNA, 1429 bp, Homo Sapiens
  misc_feature (152)..(172): n is a, c, g, or t
  misc_feature (783)..(783): n is a, c, g, or t
  misc_feature (1117)..(1155): n is a, c, g, or t
agtgcaagaaatgctgcatcattgaagcacttgagaattaccatgaaatctaacaaaaaatgtcatcaactcaggagtaataataaaaaagagaaacaaccagagaggcacacagattgttgtttttttaaaaggatttttatactatattnnnnnnnnnnnnnnnnnnnnngggatcaatcaacatatatcttagaagtccttccaagagtcttggtatgcaacagccatggaggctgtgacctttttccttcttttctcagcctgcagttcatttaaggatcaccggagatgactcgtgctctagttcttaaaatcaaacttgttctgccaaatccaagaccctgaatttgtccaaattgtagaaacatgcttttaccacccgtccaccaaaatacctcccattcaagtcaacaaccgctttaattgctgattcaactctctcaaattctaaaaatatccgtactgcttcatcatcaggggcaccaggaatttcaaatatcacacattttccaactttgccatatttttcacattcttccttggtttcaacttccaagtcttcatccacctctcccgcaccaaccatgttccttagtaagaccactttagtaggacacttaagtatttcagtcagcggatttgaatctgacttcttggatgcatctttctctgtggcgtcgcccacgatgatcttgccgccacgcttgctggtcttctccactgacaaggcagtgctcaggccctgctcatgcttccccagaccctggccctcccggaagnccgtacttctgcatgatcttgtgcgccaccgtgccccccatgttagcgaggaaggagttgctaggtccggttggagatctcggtctgtcttgttcctcgtacactgggggaggaatggctgctttggaagactgtgatcgaggtcttgagtcctcttcataaggaaaatctcggggtaactctttgtctttctctaccagagaagtgggtggggcaatggcagctccgcccatacttcttttcctcctctctcgctcataatcttcatcttcatcagaatctggatctggtctccttgcaaacccacttgcttcatgtctgtctttacgccttnnnnnnnnnnnnnnnnnnnnnnnnnnnnnnnnnnnnnnncgctgtctctgtcgttcctctctttggcgcttcactactttctcataatcattaggaaacatagggtcatattcgtcagctaagggaatcagaacttcccctgcagaaaacccactgggaacaggatccttcagcccagctgctacatgcggtggagtgtccacaatttgccggtcatctgaggagccacctcgcttcaggtcaatgactggggcgaggactgtactttgtttcgtcctttggctctttgcctgagtgagagctgccttcttca

SEQ ID NO: 69250 - DNA, 227 bp, Homo Sapiens
taatctgtactcattgcggtggacactccaccgcatgtagcagctgggctgaaggatcctgttccacagtgggttttctgcaggggaagttctgattcccttagctgacgaatatgaccctatgtgtcctaaggattatgagaaagtagtgaagcgccataagagaggaacgacacgagacagcgggagctggaaagacaaaaagaatagaagaaaggtaaaatatg

SEQ ID NO: 69251 - DNA, 600 bp, Homo Sapiens
gaaatcagaacaaagaatggacagagttggggagtgaataatgtggttcttatgcaggaaaagtgttccagcacagaatacagccagtgcaaatgccctgggatagcaatgcactaaacatgtttaaagaactgcaatgagacagtgtgaccaaaagagaacgtgagtggagaaaatggcagagacaaattaggagaagcagtgagaagccagatcgcgtggttctatgttatcacatggtaaacctttaaaaattattatctgagcgagacaggaagcctttctagtgctttagaaaaaagaaataatatgctttaaattaggttttacaaagatcacattttggtgaatagactaagatgtcacagatggaagtcaagggaagtggcaagagcacatggaagaggatgcaagaagaatcatgatgagggatgggatgaaggcagcaaggggtaaccatcttgaccttctgttttttctctcccctgcaggaagccacaagcagcccagccctccttaatcaacttcaaggagcaccttcattagtacagcttgcatatttaacattttgtatttcaataaaagtgaagacaaacgaaa

SEQ ID NO: 69252 - DNA, 1344 bp, Homo Sapiens
cagtcgacggtaccggacatatgcccgggaattcggccattacggccgggggaggctctttccaacgctgtaaaaaaggacagaggctgttccctatggcagaaggcaaccacagaaaaaagccacttaaggtgttggaatccctgggcaaagatttcctcactggtgttttggataacttggtggaacaaaatgtactgaactggaaggaagaggaaaaaaagaaatattacgatgctaaaactgaagacaaagttcgggtcatggcagactctatgcaagagaagcaacgtatggcaggacaaatgcttcttcaaaccttttttaacatagaccaaatatcccccaataaaaaagctcatccgaatatggaggctggaccacctgagtcaggagaatctacagatgccctcaagctttgtcctcatgaagaattcctgagactatgtaaagaaagagctgaagagatctatccaataaaggagagaaacaaccgcacacgcctggctctcatcatatgcaatacagagtttgaccatctgcctccgaggaatggagctgactttgacatcacagggatgaaggagctacttgagggtctggactatagtgtagatgtagaagagaatctgacagccagggatatggagtcagcgctgagggcatttgctaccagaccagagcacaagtcctctgacagcacattcttggtactcatgtctcatggcatcctggagggaatctgcggaactgtgcatgatgagaaaaaaccagatgtgctgctttatgacaccatcttccagatattcaacaaccgcaactgcctcagtctgaaggacaaacccaaggtcatcattgtccaggcctgcagaggtgcaaaccgtggggaactgtgggtcagagactctccagcatccttggaagtggcctcttcacagtcatctgagaacctggaggaagatgctgtttacaagacccacgtggagaaggacttcattgctttctgctcttcaacgccacacaacgtgtcctggagagacagcacaatgggctctatcttcatcacacaactcatcacatgcttccagaaatattcttggtgctgccacctagaggaagtatttcggaaggtacagcaatcatttgaaactccaagggccaaagctcaaatgcccaccatagaacgactgtccatgacaagatatttctacctctttcctggcaattgaaaatggaagccacaagcagcccagccctccttaatcaacttcaaggagcaccttcattagtacagcttgcatatttaacattttgtatttcaataaaagtgaagacaaacaaaaa

SEQ ID NO: 69253 - DNA, 648 bp, Homo Sapiens
gtgcaatcccttggcaaagatttcctcccttgtgttttgcataacttggtgcaccaacatgcactgatctggaaggaagaggaaccaaagacatatctcgatgctacaactgacgacaaagttcgggtcatggcagactctatgcaagagaagcaacgtatggcaggacaaatgcttcttcaaaccttttttaacatagaccaaatatcccccaataaaaaagctcatccgaatatggaggctggaccacctgagtcaggagaatctacagatgccctcaagctttgtcctcatgaagaattcctgagactatgtaaagaaagagctgaagaggtgctatgctatctatatgaaatagaaaaaaaagaagagatatcattgctttccttcagtgcaccatttcttacagcactaaatgattgggggtggggatgacagtaaccattttcaataatgcttttactaagggaaagattatgtgacttcacaatgataccaatcctttctcaatccatgatgcagatcattttatcatgagttgaaagaaaattggtatttctattgctcctgtatttattcttgtaattatttggattttatggcaattgtagcattagccatggaataaacatatttggaggataaaaa

SEQ ID NO: 69254 - DNA, 1479 bp, Homo Sapiens
  misc_feature (1285)..(1320): n is a, c, g, or t
cctggagcccgacggcctgcggaggcaagaaactgctcaacaagtgcgccgcctcagccgcggaggagagcggggccggcaagaaggacaaggtgaccatagccgatgactactcagatccctttgatgccaagaatgatctcaagagcaaagcaggaaagggggagagtgctggctacatggagccctatgaggcacagaggatcatgacagaatttcagaggcaggaaagtgtccggtcccagcataaaggtatccagttatatgacaccccttacgaacctgaaggccaaagtgttgactcggactcggagagcacagtcagcccccgactgcgggagagcaagctgccccaggatgacgacaggcccgccgatgagtacgaccagccttgggagtggaaccgggtcaccatcccagccctggcagcacagtttaatggcaacgagaagcggcagtcatccccctcaccttcgcgggaccggcggcgccagcttcgtgcccctggagggggctgtaagcctatcaaacatgggagccctgagttctgcgggatcctaggagaaagggtggatcctgccgtccccctggagaagcaaatatggtatcacggagccatcagcagaggagacgccgagaacctgctgcgactctgcaaggagtgtagctaccttgtccggaacagccagaccagcaagcatgactactccctctccctgaggagcaaccagggttttatgcacgaatgaaactggccaaaaacaaagagaaatacgttctgggtcagaacagccctccgttcgacagtgtcccggaagtcatccactactacaccaccagaaagctacccatcaaaggggctgagcacttgtccctcctctatcccgtggctgtgaggaccctgtgagcggaccagacctgccctgctctgtgacagagcctgagacttggaggtgccagaggccccccaccaaccagcccagccactgttgctggctgtgtcgtttgtgttgtgtgtatggtactagcacaccactgcatgtctctagaatgctgttgccacttacgggggctggagaaggcctggataaagacagaagggcggcaacacaccaccccagcccccacccccaccctctccttgagtttctgtgaattaaaatatttgcaaattcacacctctgtacagggcaaagttttcccacaggagcccccctactgatgctgggagccaaatgctggtgctttgagagtcccggaggccccggggttcccgccccgctgnnnnnnnnnnnnnnnnnnnnnnnnnnnnnnnnnnnngtacagatgtgagaaggtggtcacacacagatgggtaagcccactgatctacttgtagtcactcagtgtaatcattaggctatcttcaaggaatcattgtgcagtcaaaaagaggattcaattatttatgaatagggtgtgtaaataaaatagtcattt

SEQ ID NO: 69255 - DNA, 1211 bp, Homo Sapiens
  misc_feature (499)..(533): n is a, c, g, or t
  misc_feature (701)..(716): n is a, c, g, or t
  misc_feature (978)..(1041): n is a, c, g, or t
accctgtgagcggaccagacctgccctgctctgtgacagagcctgagacttggaggtgccagaggccccccaccaaccagcccagccactgttgctggctgtgtcgtttgtgttgtgtgtatggtactagcacaccatctgcatgtctctagaatgctgttgccacttacgggggctggagaaggcctggataaagacagaagggcggcaacacaccaccccagcccccacccccaccctctccttgagtttctgtgaattaaaatatttgcaaatccaaagagatgccttccaggatgaacaaaggcagaccagctccgaggggcggggtagggtggggcgggagctccctggctgacatctctttgttctccagctgtctcaaattcacacctctgtacagggcaaagttttcccacaggagcccccctactgatgctgggagccaaatgctggtgctttgagagtcccggaggccccggggttcccgccccgctgnnnnnnnnnnnnnnnnnnnnnnnnnnnnnnnnnnnagtacagatgtgagaaggtggtcacacacagatgggtaagcccactgatctacttgtagtcactcagtgtaatcattaggctatcttcaaggaatcattgtgcagtcaaaaagaggattcaattatttatgaatagggtgtgtaaataaaatagtcatttaatatagnnnnnnnnnnnnnnnnctcgaggcatctatgatcgggtgcggagaaagaggtaatgaatgggccaatggtcatagatgtttcctgaacccaggtttctggtacaaggggtagatctgcggggacacccataatgggaagtcgcataaattccgaaaaagccaaggtttaacctgcttagaaacacgccagcaaaagacagcacaaaacaaaggaagaaaagcagacagcaaagacagagggcgaacacacaaacgcacacgaacacagacacaccgannnnnnnnnnnnnnnnnnnnnnnnnnnnnnnnnnnnnnnnnnnnnnnnnnnnnnnnnnnnnnnnccaaaggaaaacacagaaaaacgacgaggaggagagaagcagaagaaaggagagagaaacacacaaagcggaaacagacgaaagcgagaaacgcaaccacaccgaaggcagacagaaaggagagagacgaagagagggggcacgaaggcgcgagccgaagaagaaaaaag

SEQ ID NO: 69256 - DNA, 121 bp, Homo Sapiens
agcggccgcctactactactatacggctgcgagaagacgacagaagggcggcaacacaccaccccagcccccacccccaccctctccttgagtttctgtgaattaaaatatttgcaaattc

SEQ ID NO: 69257 - DNA, 1218 bp, Homo Sapiens
cgcttgtactataaccagcgtgtcaaaaagcaggctggtaccggtccggaattcccgggatatcgtcgacccacgcgtccggtttaggctggcccatagaaacaggtccagataaatttctaaaaaagcaaagtagatatttatgaatagtattcaatgcctaggattaacatctaaaatgactcagtagtactgctagccagccaataaaatataaactccatttgtcttagttatatagaactgtgtttccagcttagaaaaagtcaaaccaatgacttttagaacaatctactctcattttttattcagcctctagaacatggaagctttaaaagtgaattggctaaataggcaagaccttctgaaagttaacatcttaatgattaaaaacagtaagtacaggttagtaattacctgggtaattaattgaagccttattctgttttcataagacttacttgcttaattcaagcaaaacaaaatttggtctaaattacctagataattatgacagctttttacttgagaagtgtagaacttgcttcaggctacaaaactgtattattcctaaatggataaccaggtaggattctaactggcattattgtatgcttaagattgatttaacaacagctattcccagtaaggacaattttcaacaaatcagatccagttacattgtattatgatttttctaccttatggactattttggagggataagctattaagactaagactatgaatgagagttggggaaggagcaggaagggaggaacctgcacaccacattggaacctgcacaccacattaacacaaaggcaatcttctggctcggactgttctttactactgttcttaaagaaaatgttcattctgctgcagctaactagcctccatcttctacaccaaatactattccatgccatggaagtgctatgcaataactctcccaggtagcaccttataccgcttaaaagcctttaaaatctccaatctgaaggtgtcacagtaaagaaatgtaaacacttaggaaaacaaaaatgtaattacctgatgaagtcatctatgtccatggaacgggcccgtttgtcactaaaacctgtgctggttaggatttgctgtattttatctgctatgctgaaatcttctggtattatctatcaatataagattcagaataaatgaacgacatatctttaatgaggtcaaaaa

SEQ ID NO: 69258 - DNA, 2890 bp, Homo Sapiens
tggtacggtccggattaccgggatatcgtcgaccacgcgtccgcggacgcgtgggtggcgggatccccacgtggtggctttctcacgctagccctctttggtcctccttgacgtcccgggcctgtgggcccgctttctgccgagatgccgaaggtcaagtcgggggccatcggccgccgccgcgggcggcaggagcagcgccgggagctgaagagcgctggaggactcatgttcaacacggggatagggcagcacattttgaaaaatcctctcattattaacagcattatcgataaggctgccttaagaccaactgatgtagtgctggaagttggacctggaactggcaacatgactgtaaagttgttagaaaaggcaaaaaaggttgttgcttgtgaacttgacccaaggctagtagctgaacttcacaaaagagttcagggcacgcctgtggccagcaaacttcaagtactggtgggtgatgtgctgaaaacagatttgccattctttgatacttgtgtggcaaatttgccttatcagatctcttcgccttttgtcttcaagctgttgctacatcgaccttttttcaggtgtgctatacttatgtttcaaagagaatttgccctccgactggttgcaaaacctggagataagttatactgcagactctcaattaatacacagctgttggcacgtgtggaccatctaatgaaagtgggaaagaataacttcagaccaccgcccaaggtggaatccagtgttgtaaggatagaacctaagaatccaccaccaaccatcaattttcaggaatgggatggtctagtaaggataacctttgttaggaaaaacaagacactctctgctgcatttaaatcaagtgcagtgcaacaactcttggaaaaaaactacagaattcactgttcagtccataatattataataccagaagatttcagcatagcagataaaatacagcaaatcctaaccagcacaggttttagtgacaaacgggcccgttccatggacatagatgacttcatcagattgctacatggattcaacgcagaaggtattcatttttcctaggtatttggaaaacagaaattttcaaggtcaagaaaagaaatgaattttgtattttttgtatttgagaagataatgcttttgctttactgagacattatttacttgactatttttggttcaatactactactgttgtcaccatttatgattctgaattttaaagttggaaagttctaagtatcaaagtttttaatatataatgctggtccaatctattcataataatcttcaagttcaggagccgcagagacgcacaactttacacttatcatttctaacagtttattgtataaagatgttactcttctatttactgttatatactgtaaggccttctttaggcctttagctctgttcctccagtaataaaaaagttaaaatatgcttcactagtcacacattccccataccatttcgtgttattcacattccccgtaccatttcttgttattcacatgtacagtaaaacaattgtttcttaaattatttttattttggttctctcattctcttccctatttatcctatacagtgtctgttacgattgcctacctctttcgctatcctatagcgtcagagacttagggttctgggtaagcccaagtctgctactgccaccgtgcagtgccaggcatattaaagggcatgactcccaacatgtaaaatgaggaagctaaactggaatgaaattaacaataaaattatctttttttatggttcttagggagataactataggcttagcaaaatttcagagggttttgtaattgaaactggtttcaacttcagaaaaacagccatttcccataactacaggttcccagtattcctatgatttctggacaattaaaatttccagttcctttttcatatacctggtgcttagttttaagctattttaaaactgtcagactgagaatttcaatagatgtcataaactagttttattagctactatgtttaagtcaatataatactaagtgctgttaatatactataatagagttatagtagctattttgtttctataaaaaattaataaaaatatctttattgatatttggctttttttaatacctaacttaatagaagagtgtttccaattaatttaacaaagccagattttgaaatctggcttcaaagtcatagtaaatgttactacataattaaaataatgcttgttcttaatgtataatccagaacaaaggcatcaagctgcttttgttaaacaaatatgaaatatacattaagagtagatttttttgtttaatttcacaaaactattttgcagagttcacttgtatcatctctatccttatagtaaaaattttaagatttaactcggctttctcaggttatttccctctacccctatgaactgctgagttttagttccttttctggccttcagttttcactatctgtaaagctgaaggactgtattatattacctccagtatcttttctggtactaatttttaaaatacctgatcagaatgaagccatcatagtgtaaggcagcatatttgtctataaggagactttccaaagacagtacccatccaatgcaaataataaatttgaagctaatcatctgttgtgctttaaaatgagcaaattcacatgtctttattgccctttgaaagttggttaatctcaaaaactaccttttttttaaatatcctttgcaaggtcaattgtaacagttgtccatccttcctcttccctttgaaataaacacaaatagaatatatcttaccggacgcgtgggtcgacgatatcccgggaattccggaccggtcca

SEQ ID NO: 69259 - DNA, 2234 bp, Homo Sapiens
  misc_feature (41)..(83): n is a, c, g, or t
  misc_feature (87)..(121): n is a, c, g, or t
aaaaaaatgatacgatcactatagggcgctaggtcgttatnnnnnnnnnnnnnnnnnnnnnnnnnnnnnnnnnnnnnnnnnnnccgnnnnnnnnnnnnnnnnnnnnnnnnnnnnnnnnnnncagtcgacggtaccggacatatgcccgggaattcggccattacggccgggggccggctgctgcggctggcacttggccctttaatccccttcgtgggcccctcaacctggagcggataaattcttggcgcttctccgggggttgtgctctaccgtactcggatcgctctcttaggagtatcctaatctgctcggtgggagagaactgtcgccctaaacctggggttccgatccaggaactggaagttgacagcttggctgcctggctcctacatctgccttctccactcaccatctcatttctttctccaggattgtcagtggcttcgccccgaggagagctgactgccctgggctgctgcctccggcagagctgagccaaaatgtccccggaatctaaaaagcttttcaacatcattattttaggagttgcctttatgtttatgttcactgcctttcaaacttgtggaaatgtggcgcaaactgtcatcaggagcttaaataggacagattttcacggcagtggatataccagcatggctattatctatggagtgttctctgcttcaaatttgattacaccggtcagtggttgccatgtgtaggacctcaactctctatgtttgccagtggtttattttacagcatgtacattgccgttttcatccagcctttcccgtggtccttctacacagcctctgttttcattggaattgctgctgctgtgctttggacagcacaaggaaactgcctgacaatcaattcggatgagcacagcattgggagaaacagtgggattttctgggcacttctgcagtctagcttgttctttggaaatctctacatatattttgcctggcaagggaaaactcagatatcagagagtgaccgaagaacagtgtttattgccctaacggtgattagccttgtggggacagttctattctttctcattcggaaaccagattctgaaaatgtcctaggagaagatgagtcttctgatgaccaggacatggaagtcaacgagtctgcccagaacaatctgacaaaggcagtagatgcttttaaaaagtcttttaagttatgtgtcaccaaggagatgctccttcttagtattacaactgcttatacaggtctggaattaactttcttctctggtgtatatggaacctgtattggtgctacaaataaatttggagcagaagagaaaagccttattggactttctggcattttcatcggcattggagaaattttaggtggaagcctcttcggcctgctgagcaagaacaatcgttttggtagaaatccagttgtgctgttgggcatcctggtgcacttcatagctttttatctaatatttctcaacatgcctggagatgccccgattgctcctgttaaaggaactgacagcagtgcttacatcaaatccagcaaagaagttgccattctctgcagttttctgttgggccttggagacagctgctttaatacccagctgcttagtatcttgggctttctgtattctgaagacagcgccccagcatttgccatcttcaagtttgttcagtctatttgcgcagccgtggcatttttctacagcaactaccttctccttcactggcaactcctggtcatggtgatatttgggttttttggaacaatttctttcttcactgtggaatgggaagctgccgcctttgtagcccgcggctctgactaccgaagtatctgatctggtgtccgtgaggggacacgtatgacctcagaaacacagctggacacagagcttggtggaagaagtcgcctttgatcttcactatatattgggtgatgttcagtatggaaaatcaagggattaagactgttaaatcagccagagttggtgttcaagtttacagatatgagttatttaaagcaagtagaataagggaaagctgttctgtcaactgtaattgttcaaagatgttgtttttcatttcatctatctcaattcttataatcatgttatagaatgtaaatgttttcttctctctcctgctcttgttggaagatcctgccttgatttagaatactaggccatatgtcatataaatattttttctggaaaaaaa

SEQ ID NO: 69260 - DNA, 1611 bp, Homo Sapiens
cagccgcggctccggctcgtagcccacagcccactgccggcggctgggcgctgccgaggctcggggcgcgcgcagttggcgtctgccagtgccaagactgtgccgcccccacagccgaggcgcgaaagggggacgcccggcctctgggccgctgccttcgctttctcttcgttgttgcgaacgccgtccgctcaggaggcgccccgcgaccggcgcgatgagtgccaacgaggaccaggagatggaactagaagcattacgctctatttatgaaggagatgaaagtttccgggaattaagtccagtttcttttcaatataggataggtgaaaatggtgatcccaaagccttcttaatagagatttcctggacagaaacatatccccaaacacctccaattctatctatgaacgctttttttaacaacaccatatcatcagctgtaaagcagagtatattagccaagctacaggaagcagtagaagctaatcttggaacccgctatgacctatacattggtttgaatatgccaaagacaataaagagcagttcatggagaatcacaatcccatcaattccgcaacatcgataagcaatatcatctcaattggaaactcctaatacagccccatcaagtaagaaaaaagacaaaaaagaacgaactttcaaaagcccagaagcgtaagctggcagacaaaacagatcacaaaggagaacttcctcgaggctggaactgggttgatgttgtgaagcatttaagcaaaactggctctaaggatgatgagtagcacttggaatttgagacaaggaaagagcattctttaaagagtaaaactgggttcaaaatctttcattactattttctggtattgaggcgactttttataaaacacaattttttgtatgtttcttacattaaaaaggttgtaagttgaaagttcatgaagagatcttgttgtattaaattattttcacaaacttgccttaataaaaggtgaaaatgttactgtttagtatactttatgaagccccttgagctttataaatggacaggcatggggaataagaatcagtgttaatttaaatgatcttatcctggtggatgtgctattttcttaaaggagtatgaagcccttttcaaactatcatcccagtggagcggagtactcagtgaacagttactccatagtgcaatccatattaataggcttcttctcttaagtcttcatctcttcttttgcttaattactgaaccgtaaattacttcagagaaatttaaatgctggtatttgaactttatacatgatactttttgtagtttcttttaatttttgaaagatgaactgcttccttttaataaattaatatctatttatacttttctcttgatttgggtcaagatgtttgatcatgagtgctttgagtggtatgtggaataggagaatataaaaacaaatctgccaaatacactagaaagcattttagtaagaaatgctggccctttcttaaaacatttctcttgcatataccaggatgggagtaaaagatgccttaatatttagtttttgtattgttggagacattgattttaataaaatcctatttatctgc

SEQ ID NO: 69261 - DNA, 999 bp, Homo Sapiens
ggttacatattcatgttaagaaccccgtcttcccttaaaatacattaaaattatgacatttttgctttgtgattgaatttcaaatagcagtatggtatccttttatctagttaatatatgaaagtggcttgaatatagtcaaatccattttaggtactctactgactttttccttcacttgccaagcccttttattgttcactgttagaaaaatagagaaggtgagacagctgggggaaaatgtggagtaaatgataatcaaatgttgaattctaaaagtctctacatttacctaggttggctttctcccccagttcagaagtttccagcttggccaatcatcagaatcacttgaggaacttagaaagaactccctggctgtagctcctatgtaggtttaggttgagactctggattccacaatttttaaaggttaccatctgaggtttctgatcatagtctacttttgaagcagctgctgctgtttctttattccattgaacaccctggaattgacataattttatctatcagcatttctccccttttagtttatttaataattaacccggtctccagggcagttttcatatgaccatgtgtatattcactgctcacgaaaaagtttaatgttagattaccaaatttaatatagttacagaattactgcataagggcttcccttcttggagactcttacccagcatgggaacagtgatctgcccacatgacagggtggtatgccaggcatagttaactgcttttggttgtgaggtactcatcttcctttagttacccttagttatgtggcacacatgtccttattgcctagttcgtcatccacactttggatcttgtgaaaatgctgttagtatccaaccttaaaatatattagtatatgggtttttattaaaagaattactttgaattttctatttaattcatatgtaaataaaggaacatttcatttcacttaaaaaaattatatcagttattagg

SEQ ID NO: 69262 - DNA, 1046 bp, Homo Sapiens
  misc_feature (636)..(663): n is a, c, g, or t
  misc_feature (668)..(679): n is a, c, g, or t
  misc_feature (979)..(987): n is a, c, g, or t
gagattcaactgcacggatttgggatgtgagaactaaagccagtggtacacacattatctggacatacaaatgcagttgctacagtgagatgtcaggctgcagaaccacaaattattacaggaagccatgatactacaattcgattatgggatctggtggctggaaaaacaagagtgacattaacaaatcacaaaaaatcagttagggctgtggttttacatccaagacattacacatttgcatctggttctccagataacataaagcagtggaaattccctgatggaagtttcattcaaaatctttccggtcataatgctattattaacacattgacggtaaattctgatggagtgcttgtatctggagctgacaatggcaccatgcatctttgggactggagaactggctacaattttcagagagttcacgcagctgtgcaacctgggtctttggacagtgaatcaggaatatttgcttgtgcttttgatcagtctgaaagtcgattactaacagctgaagctgataaaaccattaaagtatacagagaggatgacacagccacagaagaaactcatccagtcagctggaaaccagaaattatcaagagaaagagattttaatgaatgtggaannnnnnnnnnnnnnnnnnnnnnnnnnnnaattnnnnnnnnnnnngcttggcgttcatgaggatatccagtcattttgtgctctggctgggaatataaaggagaaattcacttgcttcaatcattgctgcttcatattttacaataaactgtcccctgtcccctacccctgtgtttttatttctaaaacaatttgtgatactaggaagatgcagatatcaagtaaatgcaggtttattgaacataactattctagatgtaatattttgacagtcttattagaaaacccccttttttaaaaaaaatgtatgaaaccgataattaggacatttgaaggagcagtagnnnnnnnnnagtcctttaaaaaataacatctgtgactaataatttgagattaaaagatttgaagtctt

SEQ ID NO: 69263 - DNA, 621 bp, Homo Sapiens
gcacgaggaagaaaagaaatcatagggccaagttcaaaggaaatgcacagaacatatcttcacattagagttaagaattctctagcaaacaacagatttttttgttgttgttagtcacaaatacttagaactggaaggctctttgttattattgaatgtacccctcagccttctcagcatttccttatcccaagactagtgtgctttctgctacactgctagttttcagttttgttcttacccaattgttttttcttttcaacattaccaatttacagattcagtttattacatttacattaatcctcacttacgatttgagcaagctcatttccagaaaagtttactttaagatcatcaataggatttgctaatttcagtgaagtcattttgcttcaggggtaaattatcctagttaccaagtcctatttggacataaagaaaatcctacttatagaaaaggagaaaataattaaacagtcttcatttttaagtaactgatttaaaaggaaaataataaaatatgttcgtttatcatttcagaaattgctgtaacacactggaaaattcctgaacaatatagattttatcgttaataaaaaacactagctttcgttcctt

SEQ ID NO: 69264 - DNA, 944 bp, Homo Sapiens
cagtcgacggtaccggacatatgcccgggaattcggccattacggccggggaagggtaccgattaccacaagcaaccatggcaggccaagatctcagtcattcgcccttcaaagggacacgagagctgtatgggggctgtggtgtctgagtactttgtgctgacagcagcacattgtttcactgtggatgacaaggaacactcaatcaaggtcagcgtaggaggggagaagcgggacctggagatagaagtagtcctatttcaccccaactacaacattaatgggaaaaaagaagcaggaattcctgaattttatgactatgacgttgccctgatcaagctcaagaataagctgaaatatggccagactatcaggcccatttgtctcccctgcaccgagggaacaactcgagctttgaggcttcctccaactaccacttgccagcaacaaaaggaagagctgctccctgcacaggatatcaaagctctgtttgtgtctgaggaggagaaaaagctgactcggaaggaggtctacatcaagaatggggataagaaaggcagctgtgagagagatgctcaatatgccccaggctatgacaaagtcaaggacatctcagaggtggtcacccctcggttcctttgtactggaggagtgagtccctatgctgaccccaatacttgcagaggtgattctggcggccccttgatagttcacaagagaagtcgtttcattcaagttggtgtaatcagctggggagtagtggatgtctgcaaaaaccagaagcggcaaaagcaggtacctgctcacgcccgagactttcacatcaacctctttcaagtgctgccctggctgaaggagaaactccaagatgaggatttgggttttctataaggggtttcctgctggacaggggcgtgggattgaattaaaacagctgcgacaac

SEQ ID NO: 69265 - DNA, 1903 bp, Homo Sapiens
aagattcggcatcgacacggacgttgttgcacaaagcacttaaagaacgagagcatcttgttcattgcctttttcacctaagcatagggggaaaaactctcagggccctattaagatttataacctttgtaatgttcttcaccacagacaccttcttgtgagttttcagtctgactgtgggggtggggggtgtgaatgaaatggatgtcacagagtgtcatgtgtctgatgcagcctcctctgctgtgtattaaatgtcaaaatctgaatatatctggatatgtactaatcaaataataatcaatcaatcagcatatacatttcagccaaagccatagaagaaaaagcaatagttgcttgaattatgatcatctaccaccaactctgctcagccctgtaacagggtagggagagggtataacaggaagagctttgacttgtccctgtctatacattctctgtatcttttgggggtaacttcttggcagtttttcagtgttcagccatgtcagttgaaactagatttttctgtagattttttacttacccatgtgagcctaacactatcctgtaattcattttctcaggctatgtgtaaatgtagaaccctaatttttctataaaaaaacaaactaactaactgtgtaaagaaagaaaaagggaagtaccaatgggtttttccaccttatttttacctttgatctacccttgcagatttaacctgtcttcttccctcccattattctcattttccttttacctttctccaccatccagagccacaaaagcaaaccttctacctcctacctacttttctctgggacaaggataaaggaatatgattttccagagccccagagccagctcatcttccaggtgctgaaaccactttccaaataaactaaagcctggatttgatattacaaattttgggaaatcttagaataaagaacgagaacaaggaagtcattggctagtataattaagaaaggtaggattcagtgcttaccgatgatgcagtacttgatagaagaaaacagtctgggaggatagcgctcatttttcagttaccctttaaggagtccctttgtctttgggaaagtagcagaatggtccgcttctttcccatgagtggaaaatgtggcttgtccaactctcctccaggttgcatttcagtttctttccaaaacttattacctcccctaatcctgagactttggaaaaggtggaaggaagaactgttgctttatctccccctccctgcatgtgtcaacattgtgatgtcagtatttactaatctacattcagtggctgtacaaataacagctgtagtaagaagagattcaggatgctagaggtgaatatttgggtcatttacatgtacactacatagcaagttgatactcatgttgcatgttcttttaaattagtgattttgtgtcttaagtctttaacttccaatacttcatcatgtatgtaaccttccatgtttgcttctgataaatggaaatgtaggttcactgccacttcatgagatatctctgctcacgcttccaagttgttctcaatgacattagccaaagttgggtttgccattcatcccctaggcatggtaaatcttgtgttgttccctgctgtcctccgtattacgtgaccggcaaataaatctcatagcagttaatataaaacatctttggaggatgggagagaacaggagggaagatgggaaacaaaatagagaattcttaagattttgtttaaaccaaatgtttcatgtagaatgcaaaatgttggcacgtcaaaaatatgaatgtgtagacaactgtagttgtgctcagtttgtagtgatgggaagtgtattttactctgatcaaataaataatgctggaatactcaaaaaaaa

SEQ ID NO: 69266 - DNA, 756 bp, Homo Sapiens
  misc_feature (16)..(16): n is a, c, g, or t
  misc_feature (24)..(24): n is a, c, g, or t
  misc_feature (507)..(539): n is a, c, g, or t
aggaacctgtgaaatntgtagatntgcttggtgaccatgggaaacatgtcagtcctctgtgggagttgatcaaatggtgcctgggtctgtcagtgtacaccatcccttccattggactggctttgttggaagaaaagctcagatatagcaatgagaaataccaaaagtttaaggcagtggaagaaagcctgcgtaaagagctggtggatatgctaggtgatgatggtgtgttcttatatccctcacatcccacagtggcacctaagcatcatgtccctctaacacggcccttcaactttgcttacacaggtgtcttcagtgccctgggtttgcctgtgacccaatgcccactgggactgaatgccaaaggactccctttaggcatccaggttgtggctggaccctttaatgatcatctgaccctggctgtggcccagtacttggagaaaacttttgggggctgggtctgtccaggaaagttttaggaggaccttctgcaaggttaannnnnnnnnnnnnnnnnnnnnnnnnnnnnnnnnttctattaattgggtgaaaccaagcaccagcagacaagcagagaaacaactggggaatttattgactcatttagttattctttctacttttatttccttctctaactgttggtcttactaaaatggtaatatttgcttcttgcttttatgttactggaaaattaggacatgtaaatggataagtgcaataaagtttcctaaatgctggaaaaaaaaa

SEQ ID NO: 69267 - DNA, 549 bp, Homo Sapiens
  misc_feature (303)..(335): n is a, c, g, or t
ttataattatatattttcacctatttattattggtaaaataattgaaaaaatacgttttcaggaacaggtcttgatttctcacttattttgtttgttttcttcaggtgtcttcagtgccctgggtttgcctgtgacccaatgcccactgggactgaatgccaaaggactccctttaggcatccaggttgtggctggaccctttaatgatcatctgaccctggctgtggcccagtacttggagaaaacttttgggggctgggtctgtccaggaaagttttaggaggaccttctgcaaggttaannnnnnnnnnnnnnnnnnnnnnnnnnnnnnnnnttctattaattgggtgaaaccaagcaccagcagacaagcagagaaacaactggggaatttattgactcatttagttattctttctacttttatttccttctctaactgttggtcttactaaaatggtaatatttgcttcttgcttttatgttactggaaaattaggacatgtaaatggataagtgcaataaagtttcctaaatgctgaaaaaaa

SEQ ID NO: 69268 - DNA, 1034 bp, Homo Sapiens
cgcagtaactactaacggtctctaaggtagcgaggcctgggtggcgaattcggcacgaggggaagtcactccctgaggcagtggcgacagcggcggcgagaggatgaacaacaagttcgacgctttgaaagatgatgacagtggggaccatgatcagaatgaagaaaacagcacacagaaagatggtgagaaggaaaaaacggaacgagacaagaatcagagcagtagcaagagaaaggctgttgtccctggaccggcagagcatcccctgcagtacaactacactttttggtactccaggagaacccccggccgtcccacgagctcacagagctatgaacagaatatcaaacagattggcacctttgcctctgtggagcagttctggaggttttatagccacatggtacgtcctggggacctgacaggccacagtgacttccatctcttcaaagaaggaattaaacccatgtgggaggatgatgcaaataaaaatggtggcaagtggattattcggctgcggaagggcttggcctcccgttgctgggagaatctcattttggccatgctgggggaacagttcatggttggggaggagatctgtggggctgtggtgtctgtccgctttcaggaagacattatttcaatatggaataagactgccagtgaccaagcaaccacagcccgaatccgggacacacttcggcgagtgcttaacctacctcccaacaccattatggaatacaaaactcacaccgacagcatcaaaatgccaggcaggctgggcccccaaaggctcctttttcaaaacctctggaagccgcggttgaatgtgccatgaccctctccctctctggatggcaccatcattgaagctggcgtcatcggagtctcttgttctgttggcgtgctacctggaagatccttctgtcctggacaagaggaattggaagagcattttatgttttaagaacaggctgacacgcagcagctacaacaacagctgagatcacttaataaatggtgctaaacta

SEQ ID NO: 69269 - DNA, 1926 bp, Homo Sapiens
cttcgttgagagcgttgtctcttaccccatcgcgttctgggtagtcccctttgtcctgctcgtgattttaccttctgggcggtccccctttagtggctgtcgttagacagccgcacagttttcaggggtttgcgtggcctcgccgcacccattgctgcaaccactaccgtgtatgagacttcacccttgccgccagcccgaccatccattttaccatcccccaaggtcacattccccagatccccacttctcaggatgattaagaattttcattattgaagtgttaaatagcctgcataaccagctttgcttcccttcctcatgagggacatccagaacagacttgcacacaggctctgctcatatgggaaacaggcctgacacacagggtctgctcatatgggaaaatgatttcagtcacagtccttagctccaattctgtacttggaacctagattataatctagctcctaatcaactagattctgctccagttcagtttactaaggcattccctctaagctgcctcagtgaaaccagtgagagccactggattaccattctaagtgcagctgtgcctaagaaggagagtcccacaggagaggagaccagagggcataaggcaggggatgatacaaatcctggacagtcatcacatcagtaacacagcttcagaaagtggtgggcttggaggaggggagagaaagaaacaaatgtcccaataatttaatggcagagctagaagagagcatttacagctattttgggactctccaacagaacacttttcctggatgcacagacattcataatactggtaactctcatcaacagctctggcatgtacacgtggccacggtacccttcgtacaacacgggaagagaacaacaggacgcccaagaggcatctggacagcacacagcaaacagaaaggctgaacgcccccccatggaaccccattaaaaaacaatgtttgtctattacaaagtcacgttttccgtttttccgctttataaagtcagcgatgctggagggtgtctagcggaatccgtcctccaggaatgagtgcaaaaggagagcgcacggctcagggacgtcccttcagtgagcaatggaaggactggctggaggcctcccatccatttcggacaaacacacacatacagaaaaggattattgccagcttgtgtactctcacaatgtgatttttgtatttcgaaagcttgaattgtccttgatgctgtcggtgtgagttttgtattccataatggtgttgggaggtaggttaagcactcgccgaagtgtgtcccggattcgggctgtggttgcttggtcactggcagtcttattccatattgaaataatgtcttcctgaaagcggacagacaccacagccccacagatctcctccccaaccatgaactgttcccccagcatggccaaaatgagattctcccagcaacgggaggccaagcccttccgcagccgaataatccacttgccaccatttttatttgcatcatcctcccacatgggtttaattccttctttgaagagatggaagtcactgtggcctgtcaggtccccaggacgtaccatgtggctataaaacctccagaactgctccacagaggcaaaggtgccaatctgtttgatattctgttcatagctctgtgagctcgtgggacggccgggggttctcctggagtaccaaaaagtgtagttgtactgcaggggatgctctgccggtccagggacaacagcctttctcttgctactgctctgattcttgtctcgttccgttttttccttctcaccatctttctgtgtgctgttttcttcattctgatcatggtccccactgtcatcatctttcaaagcgtcgaacttgtgttcatcctctcgatcccgggaattccggaccg

SEQ ID NO: 69270 - DNA, 512 bp, Homo Sapiens
tgcggccgctgatcggacgctccccctctgtctctcacactcaggggacaattcaagctttcgaaatacaaaaatcacattgtgagagtacacaagctggcaataatccttttctgtatgtgtgtgtttgtccgaaatggatgggaggcctccagccagtccttccattgctcactgaagggacgtccctgagccgtgcgctctccttttgcactcattcctggaggacggattccgctagacaccctccagcatcgctgactttataaagcggaaaaacggaaaacgtgactttgtaatagaaccaaacattgttttttaatggggttccatgggggggcgttcagcctttctgtttgctgtgtgctgtccagatgcctcttgggcgtcctgttgttctcttcccgtgttgtacgaagggtaccgtggccacgtgtacatgccagagctgttgatgagagttaccattattatgaatgtctgtgcatccaggaaaagtgttctgttggaga

SEQ ID NO: 69271 - DNA, 1547 bp, Homo Sapiens
  misc_feature (81)..(117): n is a, c, g, or t
  misc_feature (907)..(907): n is a, c, g, or t
  misc_feature (1153)..(1168): n is a, c, g, or t
  misc_feature (1231)..(1334): n is a, c, g, or t
aagtgtatagatcactatagggcgctaccgctcatcatcgaacgacgagcgcagcgagtcatgtgagcgaggaagcggccnnnnnnnnnnnnnnnnnnnnnnnnnnnnnnnnnnnnncagtcgacggtaccggacatatgcccgggaattcggccattacggccgggggttgggggttgcgtcgctctctggtaaaggcgtgcaggtgttggccgcggcctctgagctgggatgagccgtgctcccggtggaagcaagggagcccagccggagccatggccagtacagtggtagcagttggactgaccattgctgctgcaggatttgcaggccgttacgttttgcaagccatgaagcatatggagcctcaagtaaaacaagtttttcaaagcctaccaaaatctgccttcagtggtggctattatagaggtgggtttgaacccaaaatgacaaaacgggaagcagcattaatactaggtgtaagccctactgccaataaagggaaaataagagatgctcatcgacgaattatgcttttaaatcatcctgacaaaggaggatctccttatatagcagccaaaatcaatgaagctaaagatttactagaaggtcaagctaaaaaatgaagtaaatgtatgatgaattttaagttcgtattagtttatgtatatgagtactaagtttttataataaaatgcctcagagctacaattttaaaaaatgatttagcacaagctaaatctcaaagcctggtataattttcttgtttaaatttggggattttaaatcagattatagtttagaatatttgcgtattaattatgggcaagcacacaccttctgaatagaaatatcgttcattactcatttagcagataattgggacctatgtctacttttcaaggcnaaagtgaagatgacagtccttgctctcagggagcccccactttaatgggagactgataaactggtaattagactgtgataaatagtatgatggaaattagcttaagctgtttaagtagggactcttcttattcggtggaaaggctgttccaggtacaggcaactggcctggcaacttggatacttggaaccttgtatttaaaagtgaatttaaccacaactgagacctaagaaattgacctagggnnnnnnnnnnnnnnnnattctatgtacatataaaccatttttatttcatgcattaaaaatagtatgataaagatttcannnnnnnnnnnnnnnnnnnnnnnnnnnnnnnnnnnnnnnnnnnnnnnnnnnnnnnnnnnnnnnnnnnnnnnnnnnnnnnnnnnnnnnnnnnnnnnnnnnnnnnntatttacattgtattcagctagccccttaaaggtaatgaccatttataaattattccttcagttggctatttcttgacataatcaaacttctgcaattgttatgattaagcttaaaccctgttagcaaaactgaaaactgaaatgttctcaatatcaacatatttaatttggactctttagaatttatacactaataaatttaaatgatgttt

SEQ ID NO: 69272 - DNA, 893 bp, Homo Sapiens
agaaatcccacaagccccgtttagttctcagggtcccccagggggttttcttctgttggggaaaacccccttttttgggccccattgtttcactttgtgacccttcctgggggccccgccgcccgccaaaaagggaatggtgttcttaggaaaaggttttcttcgaaggggtcccgaagaggcggtcccgaccaaggtttaattgtagacggtggttgtgctgtgggttttaggtaagttggggtgttcgattgtctggcgtgttacagttttttaaaaattgtagcctctgaggcatttttatttataaaaaacttagtactgcatatacataaactaatacgaacttaaaaattcatcatacatttacttcattttttagcttgaccttctagtaaatctttagcttcattgattttggctgctatataaggagatcctcctttgtcaggatgatttaaaagcataattcgtcgatgagcatctcttattttccctttattggcagtagggcttacacctagtattaatgctgcttcccgttttgtcattttgggttcaaacccacctctataatagccaccactgaaggcagattttggtaggctttgaaaaacttgttttacttgaggctccatatgcttcatggcttgcaaaacgtaacggcctgcaaatcctgcagcagcaatggtcagtccaactgctaccactgtactggccatggctccggctgggctcccttgcttccaccgggagcacggctcatcccagctcagaggccgcggccaacacctgcacgcctttaccagagagcgacgcaacccccaacctcaagcacaggcgccctacgcaacacggcaggagcagccgcaaactaggccggaaaactgtcg

SEQ ID NO: 69273 - DNA, 1394 bp, Homo Sapiens
  misc_feature (134)..(162): n is a, c, g, or t
  misc_feature (1084)..(1111): n is a, c, g, or t
  misc_feature (1176)..(1190): n is a, c, g, or t
  misc_feature (1313)..(1321): n is a, c, g, or t
tccaaaaaaataaagctctcagggagacatgaataaaatcaatgaacattagaaaataaaatatagatgcttaccattaacctaccaactcttaatatccttaaattatgtgatatataaagaggactgttacnnnnnnnnnnnnnnnnnnnnnnnnnnnnnggctttgctttatttatttgtagttgggggctaacgttttctcttttctttctattgatcctgttgtggttgggtttcctgtggagagagtagtttgtcctgttgcactagaacattatttactcactaaattgagtttttcagtcaattaacaaatatttattaagttcctactatgtaccaggcatagtagggctacaatggtaagcaagacagagtccctgcccccaaagagcttatattctaatggggatattaagggatgaatagaataccaatgtgtgcactgtacaggaatcatactatttaaaaataatttgtataaactataatgcttagcacagatggcgagttatctgtgctatgtgaaagctgtgaaatagtgctctaagagttgtcaagagctgtggttttacatcttttcctcattgcaaatttagtgactttctacacactatatggaaataaatgactagcaaataaaacagtcataaatacaaagcagaggttgcactcccccaatcccgagttaacccaggtctgcaataacaccatgttaaaggtgcagatagagacttggctcaaaaaggcttggagatgaggaagattggaatataatgatggttttgtctgttccttaactaaagtgcctctatgtatattcttttctatttgtagcaggataaatttggtctggctcagttttggaactgtattttgaaaatggctttgtcttacagtttaaggaatagacaggtggagggaaagtcacataaaggagcaagtttgtgtagctgtccctcttgccccttttaatcatcctcctttgatatggccatcctggtgggcctcctttgccatttccatttttggtttctttccctgaaaactgtgtgcaggtaattccatgtgccattgttgnnnnnnnnnnnnnnnnnnnnnnnnnnnncctactttttagattggtgctggtgtaagtagccacttttctctcttgggtgtgtattttaaacnnnnnnnnnnnnnnnaaattaatgccaaaaagaaaatgcataatttgtaaacttaattatatgtcttatatcttattagcttagtagttggaaccacttagtctttaggtgcaagactgttgttagatagtactgagnnnnnnnnngtatgtgttatgagactgtacatgtttttttaaaaatagcaatatgcaataaagagatgaattcattgggtgt

SEQ ID NO: 69274 - DNA, 990 bp, Homo Sapiens
  misc_feature (129)..(129): n is a, c, g, or t
  misc_feature (152)..(152): n is a, c, g, or t
  misc_feature (155)..(155): n is a, c, g, or t
  misc_feature (211)..(211): n is a, c, g, or t
  misc_feature (278)..(278): n is a, c, g, or t
  misc_feature (301)..(301): n is a, c, g, or t
  misc_feature (316)..(316): n is a, c, g, or t
  misc_feature (670)..(697): n is a, c, g, or t
  misc_feature (762)..(776): n is a, c, g, or t
  misc_feature (899)..(907): n is a, c, g, or t
ggtcatcatagcacccgcttacattatctccgctgttgtgttgatgtgagcgatacattcacacaggaacagcttgactgatacgaattatcgactcatataggattgcccctcgagccagaattcgcnacgagatcccccaatcccgagtnacncagtctgcaataacaccatgtaaaggtgcagatagagattggctcaaaaagctggnagatgaggagattggaatataatgatgttttgtctgttccttaactaaagtcctctatgtatatctnttctatttgtagcaggataaatntgtctggctcagttntggaactgtattttgaaaatggctttgtcttacagtttaaggaatagacaggtggagggaaagtcacataaaggagcaagtttgtgtagctgtccctcttgccccttttaatcatcctcctttgatatggccatcctggtgggcctcctttgccatttccatttttggtttctttccctgaaaactgtgtgcagggaaagtcacataaaggagcaagtttgtgtagctgtccctcttgccccttttaatcatcctcctttgatatggccatcctggtgggcctcctttgccatttccatttttggtttctttccctgaaaactgtgtgcaggtaattccatgtgccattgttgnnnnnnnnnnnnnnnnnnnnnnnnnnnncctactttttagattggtgctggtgtaagtagccacttttctctcttgggtgtgtattttaaacnnnnnnnnnnnnnnnaaattaatgccaaaaagaaaatgcataatttgtaaacttaattatatgtcttatatcttattagcttagtagttggaaccacttagtctttaggtgcaagactgttgttagatagtactgagnnnnnnnnngtatgtgttatgagactgtacatgtttttttaaaaatagcaatatgcaataaagagatgaattcattgggtgtacaaaaaaaa

SEQ ID NO: 69275 - DNA, 1282 bp, Homo Sapiens
  misc_feature (1080)..(1089): n is a, c, g, or t
ggggagacgctgcaaattgcttgtggacggtgtaggccgctgcaggccaccatgaaccggcttccggatgactacgacccctacgcggttgaagagcctagcgacgaggagccggctttgagcagctctgaggatgaagtggatgtgcttttacatggaactcctgaccaaaaacgaaaactcatcagagaatgtcttaccggagaaagtgaatcatctagtgaagatgaatttgaaaaggagatggaagctgaattaaattctaccatgaaaacaatggaggacaagttatcctctctgggaactggatcttcctcaggaaatggaaaagttgcaacagctccgacaaggtactacgatgatatatattttgattctgattccgaggatgaagacagagcagtacaggtgaccaagaaaaaaaagaagaaacaacacaagatcccaacaaatgacgaattactgtatgatcctgaaaaagataacagagatcaggcctgggttgatgcacagagaaggggttaccatggtttgggaccacagagatcacgtcaacaacagcctgttccaaatagtgatgctgtcttgaattgtcctgcctgcatgaccacactttgccttgattgccaaaggcatgaatcatacaaaactcaatatagagcaatgtttgtaatgaattgttctattaacaaagaggaggttctaagatataaagcctcagagaacaggaagaaaaggcgggtccataagaagatgaggtctaaccgggaagatgctgccgagaaggcagagacagatgtggaagaaatctatcacccagtcatgtgcactgaatgttccactgaagtggcagtctacgacaaggatgaagtctttcattttttcaatgttttagcaagccattcctaaacagcccaactggcatttaattacccaatactgtatataaggcaaatatggacagttactttcctcttgcctgttcatatccttcagtgacattgaggaagcagtgtttctctttttaaaggagaatagttgtcaaccttcattcatctcttacatctctcaccctctccnnnnnnnnnnctttgattttcccccttattgatgggactgatattcattctgtttttgatgaacatttggaaactgtcgggctttttattaaagctctgtagaattaaaatgttctggaattataagcaatctttgtttctgagtgttatttttattttggatatagctttgatgtaattaaactggaaactctttcctgaaa

SEQ ID NO: 69276 - DNA, 587 bp, Homo Sapiens
  misc_feature (41)..(61): n is a, c, g, or t
gcacgaggccagcctgggtgacagagcaagactccgtctcnnnnnnnnnnnnnnnnnnnnngaaattgaattgggggagtcatggtcaggggtgagacctgaaggacctccccctgtgtggccctggacacagcccaccctctgtgagccgtttccaattctaaaacagactcaatgtccccctcacccccacctcaaggtcaggatgcgaacacactgagtgaggagtggacgctgtccattgccacggccatgagggctggagaccagaacagcatggcccgaagcgtgcggggccccggatgacttggggacaccccagaatcccctggggagaacccttcctgcgcgctttcattttttgacctcatcactgagaaaggctcaatttggtgctcacgtgtccttaacacctgatctggcccaagctgggctccctttaagccaagagagcctcttgtggaccccgcctgcccgaatgaaatccgaacagttggggctgttcatggcaagtggggctggtttttcatttccattggttatttaaagtttcctttaaaataaacgattttaagttataaaaggtg

SEQ ID NO: 69277 - DNA, 873 bp, Homo Sapiens
ggatggtggaccatacgagcgctttctccacagaggaactgccacctcctgtccacttatcaaagccaggggaacacatggatgtgtatgtgcctgtggcctgtcacccaggctacttcgtcatccagccttggcaggagatacataagttggaagttctgatggaagagatgattctatattacagcgtgtctgaagagcgccacatagcagtggagaaagaccaagtgtatgctgcaaaagtggaaaataagtggcacagggtgcttttaaaaggaatcctgaccaatggactggtatctgtgtatgagctggattatggcaaacacgaattagtcaacataagaaaagtacagcccctagtggacatgttccgaaagctgcccttccaagcagtcacagctcaacttgcaggagtgaagtgcaaccagtggtctgaggaggcttctatggtgtttcgaaatcatgtggagaagaaacctctggtggcactggtgcagacagtcattgaaaatgctaacccttgggaccggaaagtagtggtctacttagtggacacatcgttgccagacaccgatacctggattcatgattttatgtcagagtatctgatagagctttcaaaagttaattaatgactgcctctgaaaccttgacaactaattcagattttttagcaataacaaaatgtagtaggcttaaaaaaaatcttaactctgctacatggctctgactgctgtgggggattgaaaagaatatgcttatgtttgatgaaagatatttaacaagttttgttttaacagagttgacttttcaaagaaaattgtacttgaattattactataatattagaataaaaatgtttatcaatat

SEQ ID NO: 69278 - DNA, 2146 bp, Homo Sapiens
  misc_feature (216)..(239): n is a, c, g, or t
  misc_feature (1474)..(1496): n is a, c, g, or t
  misc_feature (1515)..(1515): n is a, c, g, or t
  misc_feature (1790)..(1790): n is a, c, g, or t
  misc_feature (1875)..(1875): n is a, c, g, or t
  misc_feature (1877)..(1877): n is a, c, g, or t
  misc_feature (2092)..(2092): n is a, c, g, or t
tggctaggtagcgaggctgggtggtggaatcggcacgaggggtgtcgtttcctttcgctgatgcaagagcctagtgcggtggtgggagaggtatcggcaggggcagcgctgccgccggggcctggggctgacccgtctgacttcccgtccgtgccgagcccactcgagccgcagccatgtctggggacgagatgatttttgatcctactatgagcnnnnnnnnnnnnnnnnnnnnnnnnccttttatgttagatgaggaaggggatacccaaacagaggaaacccagccttcagaaacaaaagaagtggagccagagccaactgaggacaaggatttggaagctgatgaagaggacactaggaaaaaagatgcttctgatgatctagatgacttgaacttctttaatcaaaagaaaaagaagaaaaaaactaaaaagatatttgatattgatgaagctgaagaaggtgtaaaggatcttaagattgaaagtgatgttcaagaaccaactgaaccagaggatgaccttgacattatgcttggcaataaaaagaagaaaaagaagaatgttaagttcccagatgaggatgaaatactagagaaagatgaagctctagaagatgaagacaacaaaaaagatgatggtatctcattcagtaatcagacaggccctgcttgggcaggctcagaaagagactacacatacgaggagctgctgaatcgagtgttcaacatcatgagggaaaagaatccagatatggttgctggggagaaaaggaaatttgtcatgaaacctccacaagtcgtccgagtaggaaccaagaaaacttcttttgtcaactttacagatatctgtaaactattacatcgtcagcccaaacatctccttgcatttttgttggctgaattgggtacaagtggttctatagatggtaataaccaacttgtaatcaaaggaagattccaacagaaacagatagaaaatgtcttgagaagatatatcaaggaatatgtcacttgtcacacatgccgatcaccggacacaatcctgcagaaggacacacgactctatttcctacagtgcgaaacttgtcattctagatgttctgttgccagtatcaaaaccggcttccaggctgtcacgggcaagcgagcacagctccgtgccaaagctaactaatttgctaatcactgattttgcaaagcttgttgtggagatgtggctggacaggtttgccatcagagtggatataccgttgtattaaaaacaagataaaaaagctgccaagatttttggcgagtggttggtctgaagtccttgcaagacgctgatgctcaagctgttgacatactcattgcctactttaacacctgtcagagaaacgtgatatggggtaaggaggtgcttttttaaaatcgttcatagacttctgtaaaatgcaagataaattaaagttattataacagtgaacaacnnnnnnnnnnnnnnnnnnnnnnnccttgtcgggccgcctcgngccctcgaagaagcttctctaaacccattcgttttggcgccgcggggcccagttaggtaagtgaaacatgggtcatagcctgttttccctaggaagatccctggcccatgaactaagtgctttgaaattcctcacccaataaaaaaaaccgccccgggcgggccaacccggagccggttcttgaaaacaaaatcccaaagatgggaaagcttccttgagagggtccaattttaccttgggaacttcctattccaaaccaggagagagttccccanaggccggaaggcttcccgaattaatccaaatattataaccgcgcccccgcgggcgccctgtgggccaactcttacaatttcgggnangagaaaaaaccttggggtgtgggacaaaaatttctccactttgtatagagggccaaatttttctcttgggccccgcgaaacaatgtggggaaaaaaagccccacatccccacacataaaaacccggggggtaattgtggaattgtgaaaaacactcttgtggaagacttcccggccgcccgaggcgcgggggccatattccccgacgcacaaccnccttcttgtggtgcggggcccccctttggcggggagtaaaatcacaataaattt

SEQ ID NO: 69279 - DNA, 916 bp, Homo Sapiens
  misc_feature (134)..(151): n is a, c, g, or t
  misc_feature (699)..(853): n is a, c, g, or t
  misc_feature (861)..(876): n is a, c, g, or t
gcggccgctccaacatcctgtacagtactaaatagtattcatttatgaaatgagtagtgtttgggtggctggggttaaggaaaaatgagacttggaattgtagcttttatccaagttttgagtataaatagggnnnnnnnnnnnnnnnnnnaacctaaaaactgaaatgccatatagaaaaacagcattgtttttacagtttgtagtaagtaactttttaaagattttatcaaaaagaattttgtctatagtgagtaaaagaagttctaataatggtcctaatcactgcatttttaaaaaacaaagttcaacacaaatgacatttgttttaaactttagtagataaaaggtgaaccatgtgacatgggcatttttgtaagtcaaaaacaaatttcacatatggtaaacctaatattcacagtgtgttccctcacttgtaatctctgaatacaaatatactagcttttctaaagggaatcatttttttaaaagtagtgccactgacaagatgctacagtgaagattatccattcttaggatatttattttcagtgaacattttctgcacaaaggtagtgttgcactgggacacaagccttttaacagataaccagttgaaatcaaacactgcctccacaccgagttctgttgtgtatttgatagtaaattgatttaaaaataaaagtggtttttgttagnnnnnnnnnnnnnnnnnnnnnnnnnnnnnnnnnnnnnnnnnnnnnnnnnnnnnnnnnnnnnnnnnnnnnnnnnnnnnnnnnnnnnnnnnnnnnnnnnnnnnnnnnnnnnnnnnnnnnnnnnnnnnnnnnnnnnnnnnnnnnnnnnnnnnnnnnnnttttgggnnnnnnnnnnnnnnnnaaaaaaaatttttaaaaccttttgttggggggcggggccc

SEQ ID NO: 69280 - DNA, 586 bp, Homo Sapiens
  misc_feature (46)..(203): n is a, c, g, or t
  misc_feature (223)..(281): n is a, c, g, or t
gatcacttgagaccaggtgttcaagagcagcctggtcaacatggtnnnnnnnnnnnnnnnnnnnnnnnnnnnnnnnnnnnnnnnnnnnnnnnnnnnnnnnnnnnnnnnnnnnnnnnnnnnnnnnnnnnnnnnnnnnnnnnnnnnnnnnnnnnnnnnnnnnnnnnnnnnnnnnnnnnnnnnnnnnnnnnnnnnnnnnnnnnnnntgacagagactctgtctccnnnnnnnnnnnnnnnnnnnnnnnnnnnnnnnnnnnnnnnnnnnnnnnnnnnnnnnnnnntaatttaggattcttctgccattttcatttaactgatttaactgaagagcccaattaaattgtgaagggagccctgaaaaaattagctactctttgccactgcttctctgtgaatcaagggcttacccaatgcagaaataaagtagatgttgagaccaattaagatttcacctacaaattctgattttaaatgcctgtgtccatctccacagcctcagtgagaattgattgttttgtagataaatcctaatttaaacattggaaatgcctttttactaataaaatgctacaacaaattattgctt

SEQ ID NO: 69281 - DNA, 1515 bp, Homo Sapiens
  misc_feature (30)..(31): n is a, c, g, or t
  misc_feature (68)..(68): n is a, c, g, or t
  misc_feature (79)..(79): n is a, c, g, or t
  misc_feature (87)..(87): n is a, c, g, or t
  misc_feature (92)..(92): n is a, c, g, or t
  misc_feature (105)..(105): n is a, c, g, or t
  misc_feature (165)..(165): n is a, c, g, or t
  misc_feature (306)..(306): n is a, c, g, or t
  misc_feature (1259)..(1312): n is a, c, g, or t
ggaatagttatcccggtcagtggagaacannatcgggaaatggaggagaatcagcattgatatccagnaacattgaganggtacagnggaanggaaaaatttcanccacagaggcagtctctcatagagtataaagcagctgtcacacttcaaagagcagcgctnaaatcctagcgagtgccgtaggaaaaggaactattgctcctggcgaggaccccagaactcactgatgcacgccgagtgaactgaagaaacgagtggatgactatgtcagaagacatttggctctccaatgtcagatgtgtncagtagggagctccatgcccaagctcaagaacgactgcaacactactttatgggcagggccctagaagagcgagcccagcagcacagagaagctctgatagcacagatcagcaccaacgttgaacagctaatgaaggcaccaagtctgaaggaggcagaagggaaagaacctgagctcttcctaagtagatccaggcctgtggcagccaaggccaagcaggcccatctcacaaccctgaagcacatacaagcaccctggtggaagaagcttggagaagaatctggagatgagattgatgttccaaaggatgagcttagtatagaattagaaaatttattcattggtggaaccaaaccaccttagtgagtaaccctaagaattgacacaaatctcatattttaggagattatattggttctgcctctggcatgctggtagactagggccatcctaacttattattttccagaggttctcctccagacaagacctgcagtaagcaaagagttatattctacctctctctcaattttctttttcttttctctgtatcctcatccttagccacacacagatttgtgtggcttttattgtagaactaaacttagcatagtgttctgttgtttacatgaagtgtgtttttctttggtttcttctgttttccaactaaatatttttttctaaataaatattttcaacaattgatttgaaaaatttgtcaggattatttcaacttttcacatttgttatctgaaattcctatttccctgttaaataggaggtgtgtgcagaacctttattaatgtgaggaaaagaaatgctcaattgaaggacatttcccctgttttctataaaagcaatggttgaaacctcattttctattttgttatttctaaaaggaactgcataccaaaaaaatgcattctttctattaaactgtgagaactacccnnnnnnnnnnnnnnnnnnnnnnnnnnnnnnnnnnnnnnnnnnnnnnnnnnnnnntttatataaaatgtatcgtcttgttttccccgccctctggacataacaaaacactttttttagcatcttcttcctcggcgccccgggaaccccccatggtcacatgaacatgcgtcgcaccccgcgttccataggaagactcggtcgcttcacaacactcccccctctattctcccccaataaaccacacccttgagtccgaa

SEQ ID NO: 69282 - DNA, 636 bp, Homo Sapiens
aaaccccagacaaccatcaaaaggaaaccatttaaagttgttgtatgttatcaaaagtagagaaagtgaaaggagagcaagaatctcaatagcttgtcagctcatttgcagcttacatttttggtttcttccacaaaaatgataagccatcaccaaactcagaaaatgaacaaaattctgttaccctggaagtcctgcttgtgaaagtttgccacaaaaaaagaaaggatgtatgttgtccaataaggcaagttcccacaggtaaaaagcaggtgcctttgaatcctgacctcaatcaaacaaaacctggaaatttcccgtcccttgcagtttccagtaatgaatttgaacctagtaacagccacatggtgaagtcttactcgttgctatttagagtgactcgtccaagaagaagagagtttaatggaatgattaatggagaaaccatgaaaatattgatgtcagtgaagagcttccagccagaagaaaatgaaatcgtgaggatggggaaaagacatttgttgcacaaatgacagtatttgataaaaacaggtaatgttgatgaacaagcgaggctcccacaatgttctggaaatgttttcattctgaagcagaatataattatttatattgatt

SEQ ID NO: 69283 - DNA, 1320 bp, Homo Sapiens
  misc_feature (68)..(142): n is a, c, g, or t
  misc_feature (260)..(315): n is a, c, g, or t
  misc_feature (1144)..(1203): n is a, c, g, or t
aggctggaccggtccggattcccgggatcggcctccgaagcggagcggggctctgaggagacactttnnnnnnnnnnnnnnnnnnnnnnnnnnnnnnnnnnnnnnnnnnnnnnnnnnnnnnnnnnnnnnnnnnnnnnnnnnnggtcagccggagcctgctggggcgagcggttggtattgcaggcgcttactctccggggccgcccggcgagtagctggccggggaaggaggcaggaaccgcgatggcgcctcagaagcnnnnnnnnnnnnnnnnnnnnnnnnnnnnnnnnnnnnnnnnnnnnnnnnnnnnnnnnttcgggggttcggcggcgacggcttcgagcggcaaatccggcggcgggggctgtggaggcggtggcagttactcggcctcctcctcctccgcggcgttaccggtgaagaagtcgaaaatggagcacgtccaggctgaccacgagcttttcctccaggcctttgagaagccaacacagatctatagatttctttgaactcggaatctcatagcaccaatatttttgcacagaactcttacttacatgtctcatcgaaactccagaacaaacatcaaaaggaaaacatttaaagttgatgatatgttatcaaaagtagagaaaatgaaaggagagcaagaatctcatagcttgtcagctcatttgcagcttacatttttggtttcttccacaaaaatgataagccatcaccaaactcagaaaatgaacaaaattctgttaccctggaagtcctgcttgtgaaagtttgccacaaaaaaagaaaggatgtatgttgtccaataaggcaagttcccacaggtaaaaagcaggtgcctttgaatcctgacctcaatcaaacaaaacctggaaatttcccgtcccttgcagtttccagtaatgaatttgaacctagtaacagccacatggtgaagtcttactcgtggctatttagagtgactcgtccaagaagaagagagtttaactggaatgattaatggagaaacgcatgaacaatattgatgtcagtgaagagcttccagccagaagaaacatgaaaatcgtgaggactggggaaaaagacaatttgttgcacaaatgacagtatttcgataaaaaacagagtttcactctnnnnnnnnnnnnnnnnnnnnnnnnnnnnnnnnnnnnnnnnnnnnnnnnnnnnnnnnnnnngtttaagcagttctcctgcctgagcctctcggattacagatgtcagtactttgtgtgctctgaaataggaaatgtacagatccctattgccagacacatcattctctccatccagaa

SEQ ID NO: 69284 - DNA, 352 bp, Homo Sapiens
tattctagctctagacacatagaaggtttgtcatagttgacattataatttatgtaactattgctgccagcgcctaaatcttccatataagaatttgcaatgatttgattactatttgttaagtaaataaagcatttaaaaagaactattataatcctaaaaaatcccattatggttatgaagacactattcaagcatgaagaacttcctatgtggcaagtttgagcttttccttttgtgttttcatttcagatgtcagtactttgtgtgctcttgaaataggaaatgtacagatccctattgccagacacatcattctctccatccagaaagcaaacattgcaaggacaaa

SEQ ID NO: 69285 - DNA, 1087 bp, Homo Sapiens
  misc_feature (224)..(233): n is a, c, g, or t
ggggaaattccggttggataaaatggcttttccacattgcaactttgcatctctattaggaaaatttagattgaacctttcctctacttgatgcttagtttgagaacagttttcacaactttagagggtctctctcagagtatgttatactgtaaccttgaagtttgagatgaaacaaggtgtcagaggttttgaatctttcaaaggaattgccttttacagannnnnnnnnnattccctaagaagggaaaaagagagggaagaactacactaatgttagagataaggtatgttttggctcaaaatgtgtcatgaacctaaaggtaacttgatgggcagaaatgtctcagccatgtgaaccaagaagtgggaccacagtgcaaggctgtgggtggcagcactagatatggtggtggcaggagtgtgacatgtaggcactccatgggggacagctggacggtgtctatcaaaagtgcaaatgcgtaagctctttgaactagcaatgctactcctaagaattgtacctgtgtacaaggtacttgtgtacaagagtttttgttgaaacattgtaatagcaaaaagttggagagtgccaccaatacaggggaatggttaaatacattatggccagcttaaacaatggaatagtttgtagaaatttaaaacaatggatcctgtgtgtgtgtactaccatagaatgggccccaagatgcatgattaagtgaggaaaaaagcccatggtatcctaatgtttggaatggagaaagtgtgtagatgtatgtgtgtgcatatgttttcacacagacgtatacacgtgtatatcatatgtccacctgcatatgcctaggatgtctctgggaggatatctagcagcccggcagcctgaattgcctctgggaagaggggtgggaatgacttttcaatgtacaccttttgtaccttttgaattttgtaccatgtacatgtattatctattaaaaaatagttcttaatttttaatttggtatacttttcttaatagaaccaaaatggaagaaaattctgattctctaaatctgctttcttaaagataaagcctttgattcaa

SEQ ID NO: 69286 - DNA, 1530 bp, Homo Sapiens
ctgcgccccagcccggccgcggcacctccgcctcgccgccgctaggtcggccggctccgcccggctgccgcctaggatgaatatcatggacttcaacgtgaagaagctggcggccgacgcaggcaccttcctcagtcgcgccgtgcagttcacagaagaaaagcttggccaggctgagaagacagaattggatgctcacttagagaacctccttagcaaagctgaatgtaccaaaatatggacagaaaaaataatgaaacaaactgaagtgttattgcagccaaatccaaatgccaggatagaagaatttgtttatgagaaactggatagaaaagctccaagtcgtataaacaacccagaacttttgggacaatatatgattgatgcagggactgagtttggcccaggaacagcttatggtaatgcccttattaaatgtggagaaacccaaaaaagaattggaacagcagacagagaactgattcaaacgtcagccttaaattttcttactcctttaagaaactttatagaaggagattacaaaacaattgctaaagaaaggaaactattgcaaaataagagactggatttggatgctgcaaaaacgagactaaaaaaggcaaaagctgcagaaactagaaattcatctgaacaggaattaagaataactcaaagtgaatttgatcgtcaagcagagattaccagacttctgctagagggaatcagcagtacacatgcccatcaccttcgctgtctgaatgactttgtagaagcccagatgacttactatgcacagtgttaccagtatatgttggacctccagaaacaactgggaagttttccatccaattatcttagtaacaacaatcagacttctgtgacacctgtaccatcagttttaccaaatgcgattggttcttctgccatggcttcaacaagtggcctagtaatcacctctccttccaacctcagtgaccttaaggagtgtagtggcagcagaaaggccagggttctctatgattatgatgcagcaaacagtactgaattatcacttctggcagatgaggtgatcactgtgttcagtgttgttggaatggattcagactggctaatgggggaaaggggaaaccagaagggcaaggtgccaattacctacttagaactgctcaattaagtaggtggactatggaaaggttgcccatcatgactttgtatttatatacaattaactctaaataaagcaggttaagtatcttccatgttaatgtgttaagagactgaaaataccagccatcagaaactggcctttctgccaataaagttgcatggtaaatatttcattacagaatttatgttagagctttcatgccaagaatgttttcttacaaaattctctttttattgaggtttcactaataagcagcttctacttttgagcctcaacttaaagcagaactgttttctactggatttttcattaacagcaagctttttcttttatgtaaaataaatctattgtgaattgataaa

SEQ ID NO: 69287 - DNA, 866 bp, Homo Sapiens
acagtcgctcagaagcagaggctgcaaagaatgctttgaatggcatccgcttcgatcctgaaattccgcaaacactacgactagagtttgctaaggcaaacacgaagatggccaagaacaaactcgtagggactccaaaccccagtactcctctgcccaacactgtacctcagttcattgccagagagccatatgagctcacagtgcctgcactttaccccagtagccctgaagtgtgggccccgtaccctctgtacccagcggagttagcgcctgctctacctcctcctgctttcacctatcccgcttcactgcatgcccagctctgtgaaggtcagactgtgaggagaagccaccccttgagcgctccgtctcctgatagtgccagcctggcctggtttcctgtttgatgcgctggctccctccctccgaggctacttctcagggctggaagtcccgtcagttctgctgaatactatgtcccaggtgtgtgatggcggctgcaatctgtcttgtgggtattaatgcaatcttcagtggtggctactgttctctagctgttctacaaaactggagcatgctggcttgaaaaacccttgcccagttttgatcccttcaagactttgtcacagcctctatcacacatctgtttttctcgaagaaaaaaatataattaataaaaatgttttactcttttacactgtataattgtaagaaatagcgtattatttgtgaatgcatggtctgaaatttctgtacagtttggagatattttcaaacgaaacgtatgaggaagtcaacaataaaaccaagaaaagtgagtatttttataccacacattttaagtatgctgggaaggaccatct

SEQ ID NO: 69288 - DNA, 1296 bp, Homo Sapiens
  misc_feature (54)..(101): n is a, c, g, or t
  misc_feature (189)..(249): n is a, c, g, or t
tggagcgcgtactcagcggctctcgggtcccagcgtcccagccgcggcccgcgnnnnnnnnnnnnnnnnnnnnnnnnnnnnnnnnnnnnnnnnnnnnnnnntaggcacccccgtcccctccttccagcggctgcagcccccagccccaactctccgcgcttactcctgggacgcgcgtcctcgccccannnnnnnnnnnnnnnnnnnnnnnnnnnnnnnnnnnnnnnnnnnnnnnnnnnnnnnnnnnnnaggtcgccctcccggggcccgattgtctcggtgccccgctcccggcccgcgccctgccccgtctctcccttgcacttcctgagtcgcccgccgccgccgtcgcagactcgccgcgggagccccagcccaacccgagcccgacagccactgccccggctccagctccagccccacagcccgcggcgcccgcccgagggagccccggcgcccggggaaggctccagtgggctagcgcgccctcgcccagccccgcgccccagccctgcccggcccggcgaggaaggaccgggaagatgaacaacggcggcaaagccgagaaggagaacaccccgagcgaggccaaccttcaggaggaggaggtccggaccctatttgtcagtggccttcctctggatatcaaacctcgggagctctatctgcttttcagaccatttaagggctatgagggttctcttataaagctcacatctaaacagcctgtaggttttgtcagttttgacagtcgctcagaagcagaggctgcaaagaatgctttgaatggcatccgcttcgatcctgaaattccgcaaacactacgactagagtttgctaaggcaaacacgaagatggccaagaacaaactcgtagggactccaaaccccagtactcctctgcccaacactgtacctcagttcattgccagagagccatatgagctcacagtgcctgcactttaccccagtagccctgaagtgtgggccccgtaccctctgtacccagcggagttagcgcctgctctacctcctcctgctttcacctatcccgcttcactgcatgcccagtgtttctctcctgaggcaaagcccaacacacctgtcttttgtccacttctccagcaaattagatttgtctctgggaatgtgtttgtaacataccaacctactgcagaccagcagagggagctcccatgttgaatttgtttgttagctattttcccccctttcacaaaaactatttcttgacgacctttgagagatttcaataaaaattttaatcagagcaaaaatg

SEQ ID NO: 69289 - DNA, 1289 bp, Homo Sapiens
  misc_feature (986)..(1000): n is a, c, g, or t
cgcatgtactataacagtggtacaaaaagcagctggtacggtcggaatcccgggatatcgtcgacccacgcgtccaggcagggagaggggttctgtgctcctgagattagttcagatggtctaaccattgttctatatgtgcattttagttaatattgtgtattaaaggataagtcttaatgctcaaagtatgttaaaaatagatgtagtaaatcagtccctttgtgaatgtccttttgttagtttttaggaaggcctgtcctctgggagtgacctttattagtccaccccttggagctagacatcctgtacttagtcacggggatggtggaagagggagaagaggaagggtgaagggaagggctctttgctagtatctccatatctagacgatggttttagatgataaccacaggtctacaagagcgtttttagtaaagtgcctgtgttcattgtggacaaagttattattttgcaacatctaagctttacgaatggggtgacaacttatgataaaaactagagctagtgaattagcctatttgtaaatacctttgttataattgataggatacatcttggacatggaattgttaagccacctctgagcagtgtatgtcaggacttgttcattaggttggcagcagaggggcagaaggaattatacaggtagagatgtatgcagatgtgtccatatatgtccatatttacattttgatagccattgatgtatgcatctcttggctgtactataagaacacattaattcaatggaaatacactttgctaatattttaatggtatagatctgctaatgaattctcttaaaaacatactgtattctgttgctgtgtgtttcattttaaattgagcattaagggaatgcagcatttaaatcagaactctgccaatgcttttatctagaggcgtgttgccatttttgtcttatatgaaatttctgtcccaagaaaggcaggattacatcnnnnnnnnnnnnnnnagcagtttgagttggtgtagtgtattcttggttatcagaatactcatatagctttgggattttgaattggtaaatattcatgatgtgtgaaaaatcatgatacatactgtacagtctcagtcccataaaattggatgttgtgcctacacacaggatctagaagaatatgtcaaactataaactgcttgtgattgtgaatgactttgttctttgcttgtgtttttcaatttcctataatgcacatactaacttttaaaaaataaaggttattttaaaagcctgaaaaaaa

SEQ ID NO: 69290 - DNA, 828 bp, Homo Sapiens
  misc_feature (520)..(670): n is a, c, g, or t
  misc_feature (676)..(731): n is a, c, g, or t
  misc_feature (772)..(781): n is a, c, g, or t
ggcacgagggtttccagaatactgatcactttttttctctgaggcatctgacaaagtcacaaagtctcagactagaaataattacccagtatgatcatggcatccaagaccagagtctcagaactcattaagaaacagtttacttggaatggagaatacccatctgtaatacaggtcctgtcatttcattcatctcaaattattttgaattcttcccaaatggctgctggatttaggtggtaataggggctgtgggccataaatctgaagccttgagaaccttgggtctggagagccatgaagagggaaggaaaagagggcaagtcctgaacctaaccaatgacctgatggattgctcgaccaagacacagaagtgaagtctgtgtctgtgcacttcccacagactggagtttttggtgctgaatagagccagttgctaaaaaattgggggtttggtgaagaaatctgattgttgtgtgtattcaatgtgtgattttaaaaataaacagcaacaacaatnnnnnnnnnnnnnnnnnnnnnnnnnnnnnnnnnnnnnnnnnnnnnnnnnnnnnnnnnnnnnnnnnnnnnnnnnnnnnnnnnnnnnnnnnnnnnnnnnnnnnnnnnnnnnnnnnnnnnnnnnnnnnnnnnnnnnnnnnnnnnnnnnnnnnnngagaannnnnnnnnnnnnnnnnnnnnnnnnnnnnnnnnnnnnnnnnnnnnnnnnnnnnnnncgccgcccgcccccaagaaaaattttaataaaaggtttgtnnnnnnnnnncggcgcgccaaggaagaaagaaaaagaaggttttaacttctttcccc

SEQ ID NO: 69291 - DNA, 1355 bp, Homo Sapiens
  misc_feature (573)..(589): n is a, c, g, or t
  misc_feature (1287)..(1287): n is a, c, g, or t
aataaagcctgcaagttactaaattgtagtttcataaattctgtagtaaagtatcatcttggcagtgtgccaaaggtgaaaatgatgctttctctaacagagaaattcttagtgactccagtcgtagaaaaacgtctttacaacctgaataagattgaagaattgtgaacataccatggcctattggatgaatcatttgccgtaggctaaatcagactgtagggtttgtgatggatttatggagtatgtgggtatagaaatcatgaatctagcatttgttttcagagattcaagcatagtcttaagggtagatcagaaatgacaaatgaattcaaaacctagcaggtgcattgtaaatgtgtgcccagttatgttttggaaatggcagttccttggggtcatgtttctactggcaaaatttgcaatagtgttctattgtatgtaattttaaaatttataagattatccacgttggccaagtaaactgtactgccaatagaattctggaattgtgagaaattgtatcattgaagttcagtaggatgtgtggcttaaaaatttatcaggaccacnnnnnnnnnnnnnnnnntatttggtactgaggttcattgccagggcaggaggtatttccagaaaatactcatgcctgtgttctgttccttgctttcccaaatactgcatgtgactttcctaagcggcagctgaaagactcgagcccgtgctgtctcctttggttattatgacatgaaagtgtatcaagaactcagcatttctttgcatccatggacttggtttggagacataaggaatattctgaccctttttaaaaaaggattttctcatgtttttatttaacataaataaaagaataacattttatcttttgtggtattattttattgaataaaattgagttttatgataaaagtgcacctgttctgtaaagtaagttggggttaaggaatgtgaggtaaattacataattgaacattgtggaagacagaatcaaaagcagccctggaacttcagttatctatggaattaggcataccattcctcaagtggaaaccatgtttgtgcttacaagtaccggagtgtgccatgctgaatgttaacaaggactagtttaattttagaaactaatggttccaacccacctttcatgcatgcatttattgttgttatgctttgtaaaacattgtttgcacctaaatgggtggcttttcctaacattctcatggtcagcaaccagagagttgcaaccaactcatactacttgatttccgntcgcatgaggacagcttggtgtgtgcctttctccccagtcttttatttttaaaataactgtgttaatc

SEQ ID NO: 69292 - DNA, 1511 bp, Homo Sapiens
  misc_feature (884)..(1001): n is a, c, g, or t
  misc_feature (1133)..(1141): n is a, c, g, or t
  misc_feature (1270)..(1282): n is a, c, g, or t
  misc_feature (1364)..(1372): n is a, c, g, or t
gtagttttttgtccaaatgcaatcccatttctgtgcctcttagcatgcagttagatttggacaaacaagattcctaaggaatgactttattaactataatatggttacagctattatataaatatatattctggttatagttctaatatggagatgttgtgtgcaatgctggcctgtggtggtctgtgtaatgctttaacttgtatggaggaggccaggctcagagctgagatgtggcctgaaccttccctgtatcgatcctttaatttagaactgtcaagatgtcactttctccccctctgccttttagtggtatctgacatatactcaaaacagtaatttcctggtcacatcattaactgctaattctgtatttataaagaattttcagatggacatgtacaaatttgaactcaaaccatccccagtccagatacagggcagcgtgtaggtgaccacaccagagcctcagcctcggtccttctcagccgtcgggataggatccaggcatttcttttaaatctcagaggtagcagtaaacttttcagtattgctgttagcaagtgtgtgtttgccaatagatacccattatactaatgtgccaagtaaatgttcattgcacatctgcttccactgtgttcccacgggtgccatgaagtgtgtgaggagcccctcatctggagggatgagtgctgcgttgactactgctatcaggattgtgttgtgtggaatattcatctacataaattttatatgcacagtaatttccctttttatatgtcaagtaactatttgtaaaagttatactcacaaattattataatgattactaatatattttttccatgtttcattgcctgaataaaaactgtttaccactgttnnnnnnnnnnnnnnnnnnnnnnnnnnnnnnnnnnnnnnnnnnnnnnnnnnnnnnnnnnnnnnnnnnnnnnnnnnnnnnnnnnnnnnnnnnnnnnnnnnnnnnnnnnnnnnnnnnnnnnttttggcgggccccccggccctcaaaaaacttttaaaaccctttttttggggggccgggccccaaaagggaacagaacatggctttaagggttcccccaaaaaccccggccaacacaagggggctggttctnnnnnnnnnaaaaaaagcccccgggcgcaccaccagagtttttaaaaaaaccccgaaggggggtttccgggacccattcccggggcctacaaacacgaggggcgccaggggggaggccgggaaatacaaaatatccgnnnnnnnnnnnnntggaccacatttttgcccggagagaacggggggcgccaccctccttttataccctatttttccgccgccacacgtgggagannnnnnnnntcctccaacacgggggcgtgtataataagcacccccttttacactctccccccagcgggggccaccctaaaaaccatgttgtggggcccccgtgttgtggcggcataaaaataattagtcgcgccccgcccggggcgcg

SEQ ID NO: 69293 - DNA, 626 bp, Homo Sapiens
gcacgaggcgggtgataggatttcatattcttggaccaaacgccggtgaggttacccaaggatttgcagctgcaatgaaatgtgggctcacaaaacagctacttgatgacaccattggaattcaccccacatgtggggaggtgttcacgactttggaaatcacaaagtcgtcaggactagacatcactcagaaaggctgctgaggctaggcctgctgctgtttagttctccttgtcatattctcatttctctcaaagataagaatgctctcggataaaatgagcctgtgctcatgacagctgctctgttactcagggaccagtgcagggctgtcttacgacacttagatgagaaagtagacaaggaaagaggacagcagtgggcatctgccttgtggtcttgctgacagcgagaagcagtgggactgcttccttgacgccttagcttggagccccgttatgaggtgagccaaggctgactctcgcaagccaggactgagcttccctcggaaagacctttgagtggcaccattcacctaagttagcttttctggtcgctattgtttttatcccctttgctttgttgtttctgtgaaaatatattttcagttaagaaatgctaaaaaa

SEQ ID NO: 69294 - DNA, 1743 bp, Homo Sapiens
cagtcgacggtaccggacatatgcccgggaattcggccattacggccggggagaagggagcgaaggtttttgctgcgccaacgcagtgaccgaaggctccgctcacgcccggcctgatcctgcctgaagatggtgccactggtggctgtggtatcagggccccgtgcccagctctttgcctgcctgctcaggctgggcactcagcaggtcggcccccttcagctgcacaccggggccagccatgcggccaggaaccattatgaggtgctggtgctgggtgggggcagtggcggaatcaccatggctgcccgcatgaagaggaaagtgggtgcagagaatgtggccattgttgagcccagtgagagacatttctaccagccaatctggacactggtgggtgctggtgccaaacaattgtcctcatctggtcgtcccacggcaagtgtgattccatctggtgtagaatggatcaaagctagagtgactgagttgaacccagacaagaactgcattcacacagatgacgacgagaagatctcctaccgatatcttattattgctctcggaatccagctggactatgagaagattaaaggcctacctgaaggtttcgctcatcccaaaatagggtcgaattattcagttaagactgtagagaagacatggaaagctctgcaggacttcaaagagggcaatgccatcttcaccttcccaaatactccagtgaagtgtgctggagcccctcagaagatcatgtacttatcagaagcctacttcaggaagacagggaagcgatccaaggccaatatcattttcaacacttctcttggagccattttcggggttaagaagtatgcagatgccctgcaggagatcatccaggagcggaacctcactgttaactacaagaaaaacctcattgaagtccgagccgataaacaagaggctgtatttgagaacctggacaaaccaggagagacccaagtgatttcatatgaaatgcttcatgtcacacctccaatgagcccaccagatgtcctcaagaccagtcctgtggctgatgctgctggttgggtggatgtggataaagaaactctgcaacacaggaggtacccaaatgtgtttgggattggggactgcaccaaccttcctacgtcaaagaccgctgctgcagtagctgcccagtcaggaatacttgataggacaatttctgtaattatgaagaatcaaacaccaacaaagaagtatgatggctacacatcatgtccactggtgaccggctacaaccgtgtgattcttgctgagtttgactacaaagcagagccgctagaaaccttcccctttgatcaaagcaaagagcgcctttccatgtatctcatgaaagctgacctgatgcctttcctgtattggaatatgatgctaaggggttactggggaggaccagcgtttctgcgcaagttgtttcatctaggtatgagttaaggatggctcagcacttgctcatcttggatggcttctgggccaaaactgcagtcactgaatgaccaagagcagcacgaaggacttggaacctatccttgtaaagagttccttgatgggtaatggtgaccaaatgcctcccttttcagtacctttgaacagcaaccatgtgggctactcatgatgggcttgattctttgggaataataaaatgaaataatacttttattttctgaataaaagtttgtcactgattgtgaaaaa

SEQ ID NO: 69295 - DNA, 992 bp, Homo Sapiens
acaccaacaaacaacaaatagtgaatatagaacagttgttcaaaaaagcagctggtacggtccggaattcccgggatatcgtcgacccacgcgtccggtgaccgaaggctccgctcacgcccggcctgatcctgcctgaagatggtgccactggtggctgtggtatcagggccccgtgcccagctctttgcctgcctgctcaggctgggcactcagcaggtcggcccccttcagctgcacaccggggccagccatgcggccaggaaccattatgaggtgctggtgctgggtgggggcagtggcggaatcaccatggctgcccgcatgaagaggaaagtgggtgcagagaatgtggccattgttgagcccagtgagagacatttctaccagccaatctggacactggtgggtgctggtgccaaacaattgtcctcatctggtcgtcccacggcaagtgtgattccatctggtgtagaatggatcaaagctagagtgactgagttgaacccagacaagaactgcattcacacagatgacgacgagaagatctcctaccgatatcttattattgctctcggaatccagctggactatgagaagattaaaggcctacctgaaggtttcgctcatcccaaaatagggtcgaattattcagttaagactgtagagaagacatggaaagctctgcaggacttcaaagagggcaatgccatcttcaccttcccaaataatccagtgaagtgtgctggagcccctcagaagatcatgcactcatcagaagcctacttcacgaagacaccgcaaacccatccaaggccaatatcattttcaacacttctcttggagccattttcggggttaagaaagtatgcagatgccctgcaggagatcatccaggagcggaacctccactgttactacaagaaaacctcattgaagtcgagccgataaccagaggctgtattgagaactggagcaaccaggagagaccc

SEQ ID NO: 69296 - DNA, 685 bp, Homo Sapiens
gcagagcaacatgcccaagttttattgtgactactgcgatacatacctcacccatgactctccatctgtgagaaagacacactgcagtggaaggaaacacaaagagaatgtgaaagactattatcagaaatggatggaagagcaggctcagagcctgattgacaaaacaacggctgcatttcaacaaggaaagatacctcctactccattctctgctcctcctcctgcaggggcgatgataccacctccccccagccttccgggtcctcctcgccctggtatgatgccatgatgccaatgatgggccctcctcctcctgggatgatgccagtgggacctgctcctggaatgaggccgcccatgggaggccatatgccaatgatgcctgggcccccaatgatgagacctcctgcccgtcccatgatggtgcccactcggcccggaatgactcgaccagacagataaggatagaggggaggccttattgtatcggttttatattacctgttctgcttcaccaggagatcatgctgctgtgatactgagttttctaaacagcataaggaagacttgctcccctgtcctatgaaagagaatagttttggaggggagaagtgggacaaaaaagatgcagttttcctttgtattgggaaatgtgaaaataaaattgtcaactctttcagtt

SEQ ID NO: 69297 - DNA, 1151 bp, Homo Sapiens
  misc_feature (23)..(23): n is a, c, g, or t
  misc_feature (65)..(67): n is a, c, g, or t
  misc_feature (74)..(74): n is a, c, g, or t
  misc_feature (85)..(85): n is a, c, g, or t
  misc_feature (96)..(96): n is a, c, g, or t
  misc_feature (106)..(106): n is a, c, g, or t
  misc_feature (110)..(110): n is a, c, g, or t
  misc_feature (115)..(115): n is a, c, g, or t
  misc_feature (119)..(119): n is a, c, g, or t
  misc_feature (136)..(136): n is a, c, g, or t
  misc_feature (157)..(157): n is a, c, g, or t
  misc_feature (169)..(169): n is a, c, g, or t
  misc_feature (172)..(172): n is a, c, g, or t
  misc_feature (174)..(174): n is a, c, g, or t
  misc_feature (226)..(227): n is a, c, g, or t
ctcattatagggaaattgccctnggagcccaagaatccgcacggaggcgcgtagcagagatcatnnnaatattntggaaaggatnaatacgctctnccggagcacngacnaacangatnaatgagctggatgaacntcgtagcggccgtagtatccntccttcccgccntcntntagatgaaaggagaaaaaggaaagccccgcccctcgctcgctgctggagcgnnaggcttcggaagtcttcatgctgtctcgtgggttccgcggtgtcgtcgctggctgtgcgcgtcatttccgggcgtcacgtaacggagtggccaacggcctgcagagcaacatgcccaagttttattgtgactactgcgatacatacctcacccatgactctccatctgtgagaaagacacactgcagtggaaggaaacacaaagagaatgtgaaagactattatcagaaatggatggaagagcaggctcagagcctgattgacaaaacaacggctgcatttcaacaaggaaagatacctcctactccattctctgctcctcctcctgcaggggcgatgataccacctccccccagccttccgggtcctcctcgccctggtatgatgccagcaccccatatggggggccctcccatgatgccaatgatgggccctcctcctcctgggatgatgccagtgggacctgctcctggaatgaggccgcccatgggaggccatatgccaatgatgcctgggcccccaatgatgagacctcctgcccgtcccatgatggtgcccactcggcccggaatgactcgaccagacagataaggatagaggggaggccttattgtatcggttttatattacctgttctgcttcaccaggagatcatgctgctgtgatactgagttttctaaacagcataaggaagacttgctcccctgtcctatgaaagagaatagttttggaggggagaagtgggacaaaaaagatgcagttttcctttgtattgggaaatgtgaaaataaaattgtcaactctttcagttaaagcgaacaactcttcccccaaacacaccccgccctaataccacaccctcactattctcaaaccatctttttttccgccaacacccctcgaccacacacccacctatatcttt

SEQ ID NO: 69298 - DNA, 1307 bp, Homo Sapiens
  misc_feature (659)..(667): n is a, c, g, or t
  misc_feature (725)..(774): n is a, c, g, or t
  misc_feature (910)..(935): n is a, c, g, or t
  misc_feature (1080)..(1094): n is a, c, g, or t
  misc_feature (1127)..(1136): n is a, c, g, or t
atgcctcaaggtcttgtcatctcttttgctatgagaatgctttacatgattgagcaagtgcatgactgtgaaatcattcatggagacattaaaccagacaatttcatacttggaaacggatttttggaacaggatgatgaagatgatttatctgctggcttggcactgattgacctgggtcagagtatagatatgaaactttttccaaaaggaactatattcacagcaaagtgtgaaacatctggttttcagtgtgttgagatgctcagcaacaaaccatggaactaccagatcgattactttggggttgctgcaacagtatattgcatgctctttggcacttacatgaaagtgaaaaatgaaggaggagagtgtaagcctgaaggtctttttagaaggcttcctcatttggatatgtggaatgaattttttcatgttatgttgaatattccagattgtcatcatcttccatctttggatttgttaaggcaaaagctgaagaaagtatttcaacaacactatactaacaagattagggccctacgtaataggctaattgtactgctcttagaatgtaagcgttcacgaaaataaaatttggatatagacagtccttaaaaatcacactgtaaatatgaatctgctcactttaaacctgnnnnnnnnncatttattgtttatgtaaatgtttgttaaaaataaatcccatggaatatttccatgtnnnnnnnnnnnnnnnnnnnnnnnnnnnnnnnnnnnnnnnnnnnnnnnnnnccttgtcgggccgccccggcccctgaaaaagtttccaaaacatttctttgggcgcccgggcccccaaggaagggaacctgggcccaaaccgggttcccaaggaaaaaccgggtcctggaacaaggggttgggaatnnnnnnnnnnnnnnnnnnnnnnnnnnggggggggaaacccggaccgtttccggaaaaccaaccccccaaaggggaagtcccccggaagggccccctttaccgtggggtcctttttcccaaccggagaatgcccccaaggcgaagggctcccaaatatacccaaaatttaannnnnnnnnnnnnnnttgtggcgcacttctcattccgaaagaaaaccnnnnnnnnnnaaactttcctttttaaaggcccttttctgggcccccacaaatgggggaaaaaccccattatcaccacaaagacggggcactgtgaataaaaaacgcctctgaaaatttccggccacggggggggtctattcactcgccaccccttttgtggcctccccccctgtgagggag

SEQ ID NO: 69299 - DNA, 617 bp, Homo Sapiens
ttttcgtgaacgcttacattctaagagcagtacaataagcctattacgtagggccctaatcttgttagtatagtgttgttgaaatactttcttcagcttttgccttaacaaatccaaagatggaagatgatgacaatctggaatattcaacataacatgaaaaaattcattccacatatccaaatgaggaagcctgaaaaagacaaagcataaataatggctaaaatgtagccttcaatatgcaggataaccccacccctgcatctgacttccacaggcttggacagtttagtataacaactctcacctaaacacaatacaatgcagcaagtatggaaacactatatctattatacatgagagagattaaagacccaattaaaagtcttatacatcttgttccaaaaaataagataagtaatcttttagcaatactgcaagtcaaaaaattttctctctctccctttaaataaaaacccaaactatctgcttctggctagccatacatacaatactgctagaattggataatctggacaaatgcttctgtcaagcctaactgcatatgcaccaggaccaagtagacaggttggactgcccaggagagagctcaagag

SEQ ID NO: 69300 - DNA, 590 bp, Homo Sapiens
  misc_feature (25)..(25): n is a, c, g, or t
gcacgaggtaaactatggttgttantgtggcaggttgcaattaatagttggacactaaaatctggtctccccttcttccacaggaacagaattgccattgggcccagggagagactacacttcttgtctgctttggtgctagtgcggccttgtggccaagcacagaacgtgtgcagtgatgatggtgcaacttctaggtcgtccccagcatggaaaatgagccctgggcatggaagatgagccctggtcctgcagcggtgctctttcctcttctcacaagctggaatgtgcatgtgctcccacccagctttgaccatggggcgaaaacagtactctgcagtctggcagagcaacaaggtggaaagggcctgggtccttgagtgacgtcatgagccctctcactgtcccgactttgggactgttatatgataaggactttctgtgagtcactgtcttttagagtctctctgttttagctgcctggactttatcctgaataatatggctgttatcatgggtatagtgttactatgagcctcatctaagtaatttctactctgcctttgaccactaaactcatgttggacaag

SEQ ID NO: 69301 - DNA, 1018 bp, Homo Sapiens
gtttacggctaggtacgaaggcctgggtgtgcgaatcggcacgagggttgtgctgaggccgagggagtcgccatttggatggtgaaccctgaagtcggtgtctgctgcgttcacggcaggattcggttagtcattgtgcttcttctgtttctaggaggaacagcacagcatgctgggctctggatttaaagctgagcgcttaagagtgaatttgagattagtcataaatcgccttaaactattggagaaaaagaaaacggaactggcccagaaagcaaggaaggagattgctgactatctggctgctgggaaagatgaacgagctcggatccgtgtggagcacattatccgggaagactacctcgtggaggccatggagatcctggagctgtactgtgacctgctgctggctcggtttggccttatccagtctatgaaggaactagattctggtctggctgaatctgtgtctacattgatctgggctgctcctcgactccagtcagaagtggctgagttgaaaatagttgctgatcagctctgtgccaagtatagcaaggaatatggcaagctatgtaggaccaaccagattggaactgtgaatgacaggctaatgcacaagctgagtgtggaagccccacccaaaatcctggtggagagatacctgattgaaattgcaaagaattacaacgtaccctatgaacctgactctgtggtcatggcagaagctccttcctggggtagagacagatcttatcgatgttggattcacagatgatgtgaagaaaggaggcctggaagaggagggagtgggggttcacagcaccagttggtggacctgatgaacgggggcatgccatgccatgccattctttgcatctgaatagcttttcatttcaccgccagggcctcattcagggtgccaggcatttaggcttcaaattcacaaaacaaacccagtaatgtgaaaaagcgaaattctgcgaggcgggcgaacgactcccacgaataattcaag

SEQ ID NO: 69302 - DNA, 2416 bp, Homo Sapiens
  misc_feature (1538)..(1538): n is a, c, g, or t
aattaggctaggtacgaggcctggggtggtgaatcggcacgaggtgaaccctgaagtcggtgtctgctgcgttcacggcaggattcggttaggaggaacagcacagcatgctgggctctggatttaaagctgagcgcttaagagtgaatttgagattagtcataaatcgccttaaactattggagaaaaagaaaacggaactggcccagaaagcaaggaaggagattgctgactatctggctgctgggaaagatgaacgagctcggatccgtgtggagcacattatccgggaagactacctcgtggaggccatggagatcctggagctgtactgtgacctgctgctggctcggtttggccttatccagtctatgaaggaactagattctggtctggctgaatctgtgtctacattgatctgggctgctcctcgactccagtcagaagtggctgagttgaaaatagttgctgatcagctctgtgccaagtatagcaaggaatatggcaagctatgtaggaccaaccagattggaactgtgaatgacaggctaatgcacaagctgagtgtggaagccccacccaaaatcctggtggagagatacctgattgaaattgcaaagaattacaacgtaccctatgaacctgactctgtggtcatggcagaagctcctcctggggtagagacagatcttattgatgttggattcacagatgatgtgaagaaaggaggccctggaagaggagggagtggtggcttcacagcaccagttggtgggacctgatggaacggtgccaatgcccatgcccatgcccatgctatgccatctgcaaatacgcctttctcatatccactgccaaagggaacatccagatttcaatggactgccaatggggacttatcaggcctttcccaatattcatccacctcagataccagcaactcccccatcgtatgaatctgtagatgacattaatgctgataagaatatctcttctgcacagattgttggtcctggacccaagccagaagcctctgcaaagcttccttccagacctgcagataactatgacaactttgtcctaccagagttgccatctgtgccagacacactaccaactgcatctgctgggtgccagcaccttcagcatctgaagacagtgacttttgatgatctttcccggaggtttgaagagcttgaaaaagaaaacataggtctcttaaaccaggcaactttcacgttttgggagttgagactgagcaatttctccttgtaacaaagaatctccatgaaattctgtttcatctgttaaccgtcactcagcacaacactccctctgggctctcttcctgctcctccagattctgctgctttccagttctctgttgatcctgagactaacaattggagactgaggccagagcaactggctcctggcagctgtgcttgtccgtttcctgtcagagtgatcccaggtttcctcctggcccgtcccatggtccctccacaggagtgtgagaggatgggggaagcactgtngggaagaccaccaaagatggctggacagtgggagagagcaccgttgtgaagcatcccagcctcgtgttgaggttccagacttagaaacagacccctctgtacagggggattgtggtgagtgagaatcaaggccaccttgtgtgttttctcactctcgaatgcaagtgggagagggaaaatgactcgggacgccattgtaacggttcctggaagctgggccctctcattggcatatacagtactcctcgctgcagggcactgtcccaccgggatccagttgcaaagtttgtcttgacagttgaaggcctcgcttagttgtactggattctcagggagccctctgtggccttttgctttgcgtgctgtttcccttgtaccagagggcggcaccgtggaaattctgttttccctgtagcatattgtgttggattgcattactggcagagaaaggacaaggtgccattcaagtcctagggtgggcttccagctgccttaatagaagtactcaagtcttttgggtagtgagctggaaagcctacaggaaaagaggggtacctgttttcatttgaaaactttgattcatggaacctttaaaactaatctcagaaaaatttttggtgcccatgcagctgtagttgttcactgctttcctggatggatgggactcttatgtcataacttctgttactcctttggcccatagctaaggtcatccttccccacaggggtggctttgggattggatgatacagcttttgcttctgtgtagtatacctgtacatacttgtttcaggcagcctttctttaatgttttcagttggtttgtattctgtagctcagtagctgctaataaagttaaagatctgtgtcctgctttc

SEQ ID NO: 69303 - DNA, 2085 bp, Homo Sapiens
catgtcttaagattttttgacagacttaagtttctaattcaggttgtcaaactggccatttgacttcagagatttgttttcattaaaaaataagcctgccgccaaaataaatcacttatcaaaatgtgaactgttttcctcatgttcagttatgttaaagtagtatgataaatgcatgcctagagtagtgctctcgttgatgaagcacatgtatgaggagaccagcagcaaaacataaccatatgtgttttgcgtttacttcctctagaaaagaatttgcaggcaaccatgtttaatttgaactatctaagatggtagattttagaagctaggaataattgagttttatagcactattttcagaatacaaaaagatacacaatcattctgttttttgaaattccatgtgattcaaactgttccctattatttgggtattaatttgcactaatagcaaaatgtaatggcagatcagctttgagagtggtcctaagcagtaaactggatgatgttgcattagaaaaacatcaataattcatatttaagttttagtagttactactgatttgataatcacttaaattttatatatcttaatgtattttttcagactcctaattaattcccacattcactgtaactaggggcatagtccattctgttaggattatatcctctccttagaaatgttttccatcctgttgtggggatttggtattaatgtttcttcattgattatggaacttttgttccctgaagctagttaactgtgtctaaagttaaataaatacagcagaatgattgttttagcctgctcgaactgatacaaatccctgaaaccatgattggcatatgttagataacaaatgaggatgtctaagaggcatatgctgctttggaggtgtagtgaacgtgtgtacagaagttttcaatcttaactatatagtgttagtgtgatgctatactattggaaaaatagcagcttttttctattttataagttgtatgcataaacataagatttggaatgtttcatttataaactgccttcttcaacacatgttaatagtgttttctcaaagtattgatagtatgtcttccagaatttcacaatatgcttacagtaaatatttcctagcttgttgaaatgttcaattctttgttggatttcttcttgattctgtgggggtgtataacaagcctgaaggacattgtaatcatttcttacaaggtgaaaattaagaaagattgtgtatgagagcctatatagttgttttatccattatcatctttgattaagactttaaaaaaatgctatttccagttaatgcatttggccctattgaattttcagggaccagaaaacattaaaaagttctgcatcttataatggtaaccaattaagcttgagattgttctgaaagtatcaattgctttaaaactgttgtaagtacagttggcaagatctccaagctgaaacttacacgttaaaacttttgcctgtaagaatttgcacatgaatgttaatggaaaacacaaaacttaagatggcccaaaacaaaagccacaaacagttcatcatttggtgcttagtctttgtaagggctctctgtggtttgacttactccagctaccgttaaatgagggcaaatcaccttaaaacatgttcatttgattcataacaaggaaaattgggtctatgattttttgccaatcttagcctaaaagaaattgctttagcttctggtcagcactgattaaaatgtgaatagtgaagtggctatcctaaactggtttatctccacccacactatcatagatttcttaggtaaatacaattcttatctagtggtattctacttgtattcagaatactgtattaaaattttactatttcatttttgtattctgtgcttattttttttgctcacgcatgtatgcttagtataaatgtgtcacttctaaagttttgtctctgacttttagaaataaatttcagaaaaattgtttcaaaagattttgaaagcacattttgttttgtgagtcaaatgacaaatatatttcctgattacaaaacagcagaaa

SEQ ID NO: 69304 - DNA, 1210 bp, Homo Sapiens
  misc_feature (42)..(76): n is a, c, g, or t
  misc_feature (936)..(958): n is a, c, g, or t
acgacgagcgcagcgaagccatgtgagcgaggaagcggccgnnnnnnnnnnnnnnnnnnnnnnnnnnnnnnnnnnncagtcgacggtaccggacatatgcccgggaattcggccattacggccggggatggaatggctgaacatgtggttagtcttttattttaagaagaattgagaattgatagatttggagatgagctttgcaaaggctgtttgcttttcatgtctataggtctgtcattgtcctttttcaaagcatttctgaagttattcctacttggatatagttaatggaattggcttaatttgatgacataataaatcacttataaaattttaaatatcaagtgaaaatttagaaaggccattactattctataaaccttataaacttgctctgggagaatgcattctaaattatatatagtgtttcagctcccattgtggtgttcatagtcttctaggaacagataaacttaagtattcaattcactcttggcattttttctttaatataggctttttagcctatttttggaaaactgcttttcttctgagaaccttattctgaatgtcatcaactttaccaaaccttctaagtccagagctaacttagtactgtttaagttactattgactgaattttcttcattttctgtttagtccagtgttaccaaggtaagctggggaatgaagtataccaacttctttcagagcattttaggacattatggcagctttagaaggctgtcttgtttctagccaagggagagccagcgcaggttttggatactagagaaagtcatttgcttgtactattgccattttagaaagctctgatgtgaattcaaattttacctctgttacttaaagccaacaattttaaggcagtagttttactggccatttaagctctttgtacagtgtcaatttgtnnnnnnnnnnnnnnnnnnnnnnntctcaaataaaacatgagataacattttaagacttccaaatcagagaagtgcttcaaattattttgtttggattaatttttaaaatgtaaagcatatacttgttgcttagttattttgtttattattttcatgtttgagttctgtgcaatattttctattatgtccgttgataggacagtgacaaaattcgtaagtgaatacttaatttaaaagtgttaacattaatgctcaataaacaaatatcccacaaa

SEQ ID NO: 69305 - DNA, 1727 bp, Homo Sapiens
atcctaccatagagttttaaaggctttcaggatataacatgtattttcccctgagtctgagtgtctacatgattatagaatgcatgtctcttgcttcatggtgatatataatatgcatggaatactgaaaaataggtatttcccaaaggctcctatataccaggcatctcagactgacactgaaaaccttttgaagcatttttaacaacaaataatggactatttcacagactgatgccaataattagttttctggacctacagttgaaagcaaaattatctttttaactaaataggatcagcttcaaaatcctttttggagatgtttttatctattaaatgcctttattaacaacaccatcttccattttctattactcaaattcgatttctcctgcatacaaggtaatgagtagaatggctgtgaatccagttaacattccagcattctgaatcatgaacaaggtgaaatcggtttttcttccaggtgtaccttttctctcagcatatcattcatctctgtgaaacatatctgccagagaaatatacgaggaacatgcctccagcaagatgcaaatataatatttggagcgaaattgttgcccaccagaaatgccagaaagctagccgcaacatagcgaaggaacatgcagaaaggaagttgaatagcaaggcttgtcgagtgctcatccctgcattgagtaggatcacaaagtctcctaactcgtggggaaactcctcacataggattgctatggaagtactgagtccctgaaggagagacaaggtgcaggaagccccaatcgccaggccatcgatgaaattgtggagggcatcgcagagcgttatcatccaggcaatcgtccctatttctgacagtttgggccccttcaaacaggtacatgaacttggctctttttttccatcctgtagagataccacactgacattatcaaaatggatatgtccattagcttctgtgacagcaggatttgcatagcatgtcacaccattgatggcaggtaatgctttaggttgatgagttttttcttgaggaccaaagttatcatttccaaagtgggtatgaccattctgaccatatgtctttaataacatctttagcattctttcaaaaaagaaaagtaggtaaaatccaccaacacagcaactgccttctcaacataactgtcgactttgggatcaaatccaaatgcctctggaataagttggaaaattgcatttgaaaaaagagtcccaatagccagccccacaaaaaaggtcaaaatctttgggaaataagatttctttatcagtggagtcaaaatcaatccgaggagagatgccagattaataatcgtcactgacaggaatccatatccccaaacttctgaatgacttggtcttgttttgtgcttgggccgatcctcacatgggtgaaagttcaattgctgtaagactgctggacagatgacagagaatttggagctggttatttgggtagcatttgaaaagccatgaagggaaaagatctcttcagcagttaaacactggttgaagtgcagctggccaggctccgggacgcccacgcgggaggcggctcccatctgctccagcaagtgctggagctgcgccgccgacaggctcagattcgcgccgaacacgctcagcacatcctcgctgaaggctagccctggcccctccgccactcctccgaggccggcggccgc

SEQ ID NO: 69306 - DNA, 1433 bp, Homo Sapiens
cagtcgacggtaccggacatatgcccgggaattcggccattacggccgggtagaaaatggaagatggtgttgttaataaaggcatttaatagataaaaacatctccaaaaaggattttgaagctgatcctatttagttaaaaagataattttgctttcaaccgtaggtccagaaaactaattattggcatcagtctgtgaaatagtccattatttgttgttaaaaatgcttcaaaaggttttcagtgtcagtctgagatgcctggtatataggagcctttgggaaatacctatttttcagtattccatgcatattggatatcaccatgaagcaagagacatgcattctataatcatgtagacactcagactcaggggaaaatacaagttatatcctgaaagcctttaaaactctatggtaggatcaaagattcaaatggtttcagagaggttttatttcaattaatttgttctagtgctttcaagagcaagtacatcaaaatgtagaaggtaaaatgtatgcaacactaatataaattattccaagtctttaaggagccaaagaaaaaaaagatttctcacagctttttgttctgttttgtatttcaattaggaacttgcagtattattttgaaaaccattctaaaataataggagttaggaaataaataaagttttgctagccctgctaagttcaggcttagaggcttatcgctaagtataaacttcaccagattccacgaaaagctggatagctttttttctgacttatgttgtggttgcacccctcacaaatggcagaacagtatgtaaagctggtaacacctcggtttcagtgcaccatgtgtttgctttgtgaaggtgaagaatatgttggtttagagaaagaaattggatgtaattttatgcaatttacttttaaagacaaacataactatttagcagagaatattttaataaatgcaaaacaacagctggactgctgtacatcaaggacagattaactggaaaacatatgttccttatgtgtgattgagagccattcagaaaagacttcctttgtgttcagcctatacttttccatatggtataccttgaaaaaaattagcacaccatggttatttttctaccttttataaaagacagagcctgtttactcatttagaagatagagaaaattggtctaaaattgaacatcctagattcacactcccaagtcacttaaggtgatttgatggtgaggaaaatgattgacaaagcccaacaatgatctcaggaattacattttccaacagaccaaaaaatgttttcatgtagcagcaatgcagatttggtgaatatttaatatatattttagtatgtatttcactttatgactgacaattaaaaaatattgtttggccaaatagtaaacacccttttgaaaccaaaaaa

SEQ ID NO: 69307 - DNA, 583 bp, Homo Sapiens
tggttgtggagaggtgaagacaaactgacaaattggaaaccgtgtccaagagtaaaacttgcattagtggatttttcaaaagcctgttggaggtatttggagtattcttgcaacatacttgctttatcatttgaaggtgtttgggtgcctgggctcaaattttcttcttgaaccaattctgagtgttctcctgaggtgtgtaaatccactcgtggttctgcaatattgaaaggatcctctttctggctttctgatttgttggagtattgatccaaaatactttgtaaaacctcatcaggaattccagacttgtcatgacaagatttaatttcagcatttagagctgaggagtcaataagtgacaatggtgcctcattgtccaaaacactgacacctgcagactgaatgacagactgttgggagaccatgtgtcctacgtttatagaaaaggcactgttgctgctggcagttggtaaatatcttcttttctttgaaaactgcatggcatcatcataattactacttatctgaccttgtttgccacttgtactttggagaagaccaaccgtctccacactattat

SEQ ID NO: 69308 - DNA, 611 bp, Homo Sapiens
gatgtgtagcatccaaagcagacaaataaagacctggctgagatccaaacaacatcccaaaaggaggctttggcaatgaagatggcaacactgaggtaacagattggccgaaaccacactccaaaggagacgtagtgtatatttgtttttctggaaacaaagtgtggttgtggagaggtgaagacaaactgacaaattggaaaccgtgtccaagagtaaaatttgcattagtggatttctcagggtatacaaatatgatgtctgatgtaagtgagccatgtagtacaagagtaaagacacccaccagccagagttacaggtaaggtcccaaaagtggccaggctggaggtcttctaatgtaattttgttttattttgagaacactgccattggaatgtttctacacgatcctattaagaataatgtgatgccctttcaatgcaacttttcatatttagtttattttgttagcgtgattttagctctgtttgtattatgatttttaatcaaaatcaatagattaaaaatagtttgacattcaaagtgacaatgtttagcaatcaaatttacatgtatagatcgtcagggaatagcccaaatgttttaaacgc

SEQ ID NO: 69309 - DNA, 1028 bp, Homo Sapiens
  misc_feature (186)..(199): n is a, c, g, or t
  misc_feature (624)..(634): n is a, c, g, or t
ggtaccggtccggaattcccgggatatcgtcgacccacgcgtccgagcaaagctgatagtgtttgctgtttctttggcagctaagtgagggtcttgggatgacttgctgtgttcctcaagctgcactttggggccatctctgcagtattagccccctttttgcttggtggtactctgtctgtgccnnnnnnnnnnnnnnatagtcactcttgcatggcttccatgtctggtttgtggcatttggggataaggtgctgaagccagagcatttgcagtttgtttgaggcctcgttgccaatgatagatcactcctgttgacctggtatgtctgcttgcttgctgcttttccttgctttctcttggaagaggaaaggactctggtcaggcccaggctgagtgagatgagctgcagctggctcatggccttcttagagcagagagaggagtatgtcattttactaagttcctaaacaaacatttatgcaggcaacactccttgcagatccagaaactgaggcacaatagggttatgacttgctcaagaatatgtagctgctagggggtaaatcaaggcatcacaatttctgttcagcgggcaggaataggctgtgaattgctagcacnnnnnnnnnnnaagcaattactttttgacttgttcctctgaaagtgcaagaggcgtacacctttcccaaatgtagactagaatctgcaggatgccaccccactgtatagttctgctttcccagagaggaagaacttttagaaaccaaatgatcttaattgttattgcccacccctggcttttccgggtagaaaattcacagtaggaatgattgttaagagagagtgcttggaaccatgggttaacaggaaaggctacctaacttcacatatctgcaaccagagcagccaccaagcattacttagcagcaggaaaatgattgtatttgagttcctgtgtgtccaaaactgaggcaccatgttctttgaaaacatgccacctcaaggctgggcgcggtggctcacac

SEQ ID NO: 69310 - DNA, 979 bp, Homo Sapiens
  misc_feature (313)..(323): n is a, c, g, or t
  misc_feature (748)..(761): n is a, c, g, or t
atggctaaggtaaaggctgggtggctgcctctggttggcagattatgtgaaattaaggtagcctttccccggtaaacccaagggttccaagccactctttgttaaacagtcattccctgctgggaattttctacccggaaaaagccaggggtgggccaataacaaattaggatcattgggtttctaaaagttttttcctctctgggaaagcagaactatacagtgggtggcatcctgcagattctagtctacattggggaaaggtgtacgcctcttgcactttcagaggaacaagtcaaaaagtaattgcttnnnnnnnnnnngtgctagcaattcacagcctattcctgcccgctgaacagaaattgtgatgccttgatttaccccctagcacctacatattcttgagcaagtcataaccctattgtgcctcagtttctggatctgcaaggagtgttgcctgcataaatgtttgtttaggaacttagtaaaatgacatactcctctctctgctctaagaaggccatgagccagctgcagctcatctcactcagcctgggcctgaccagagtcctttcctcttccaagagaaagcaaggaaaagcagcaagcaagcagacataccaggtcaacaggagtgatctatcattggcaacgaggcctcaaacaaactgcaaatgctctggcttcagcaccttatccccaaatgccacaaaccagacatggaagccatgcaagagtgactatnnnnnnnnnnnnnnggcacagacagagtaccaccaagcaaaaagggggctaatactgcagagatggccccaaagtgcagcttgaggaacacagcaagtcatcccaagaccctcacttagctgccaaagaaacagcaaacactatcagctttgcttcagtcttctgaaatgaaaatattaataaggaagaccctcgtgccgaaatcgccacccaggcctcgctaccttggacc

SEQ ID NO: 69311 - DNA, 727 bp, Homo Sapiens
tccaccactgcattacttggatcaacataatcagaactgcctttataagaattaatttggaagagattcacgatttcaccatgaggacacttatctctttcagtggtcctcccaagaaattatttaacaaactgaaaggagattttgattaaaattttgcagaggtcttcagtatctatatttgaacacactgtacaatagtacaaaaaccaacatagttggttttctagtatgaaagagcaccctctagctccatattctaagaatctgaaatatgctactatactaattaataagtaaacttaaggtgtttaaaaaactctgccttctatattaattgtaaaattttgcctctcagaagaatggaattggagattgtagacgtggttttacaaaatgtgaaatgtctaaatatctgttcataaaaataaaaggaaaacatgtttcttcaaattgcataatggaacaaatggcaatgtgagtaggttacatttctgttgttataatgcgtaaagatattgaaaatataatgaaataaaagcatcttaggttataccatctttatatgctattgcgtttcaatatttaagatttaaagtgattttttggtcacagtgttttgttgataaaatttttttagaattgaagtttgaattctaagacttgaaacaacctgatcactgaagccaactttgtcccagcacattccttaagtcctaattgggaa

SEQ ID NO: 69312 - DNA, 757 bp, Homo Sapiens
  misc_feature (102)..(102): n is a, c, g, or t
agaaagtctcttaaggaaagagtagaaagaaatacagtcagaaaaggaggccctgcagtctgatcttctagaaatgaagaatgctaatgaaaaaacaaggcntgaaaatcagaatcttttaattcaagttgaagaagtatctcaaacatgtagcaaaagtgaaatccataatgaaaaagaaaaatgttttataaaggaacatgaaaacctaaagccactactagaacaaaaagaattacgagataggagagcagagttgatactattaaaggattccttagcaaaatcaccttctgtaaaaaatgatcctctgtcttcagtaaaagagttggaagaaaaaataggtaactatggttttgcagatgttgtcacaattaattagacagattcttgttagtgttagaatagattgggaaatatagtagccaaataatgagttgttaaaaacacagttcgtagctgtcttttcctcgagctcacattcttgcccctctaacacctgtttgccttctctttcaaaagtgttactttctattgtttaacccaagcaagattggtgtgatttataaatggcttcatgatttattttggatttttcattcatttagcaaattttatttaaatgcccaactattctagaccctggtgatagaaaagtggttgaggtacagaccatgtgctcagagatctcactgttgtttgaggtgtggacaagatacagtactaacagcataggaacttaacactgttttgagtt

SEQ ID NO: 69313 - DNA, 1674 bp, Homo Sapiens
  misc_feature (26)..(26): n is a, c, g, or t
ttgattttttgccttcccttcaattntaaactgaagcattttaatatgggtagaaactctacaccaaatacactaaacattttggtgcttagtggatttctttttaggtaactggtacttacttccaaagactgaatacaagccacactccatcatatcccttaaacttcatgaaaaaccattcaagatccccttgctgcaacactgttctcttcttctctactaaattctatttccaaaattggtaatagagccagaaggatccccagtacccagccctctgcctggcacaaagtggtagcacaattaaattcagtatgggtggagcatggtacagtcttggtgccatagaaggagtagttgcatagtcacacatcatttgataagttggatgttccattacatagaggaacacaaaattccagggtttttggaggaagggattagatagtgactaagccgccagaattgaggtggccattcctttttgtataggctaagaaacaggttatcagtgaaaagttaattatggctttggcactagaatagcactgttgcaaagtatttaagcaccccccatctcagccctttattttatctttcatgtgggctaatgtgaggataatcttacagatattataggaatttcttttctatctttatgaaaacaacgtatataaaatatatctagaaaacctttgtttgagactcttatttaatgggcttttgattctaatgataattgtacctttatctttcaaaagctgatatttcctacctaagcatctcccgagaaaaatatctcattaaaaagcccataaataataggggagaagaaagccttaggtatcaattccaaaacagtgattgaaatttcccaaaataattatggcttctgtcatctccagagataatctggcttggtttaccccataatctaatttcagaaaagaaagctttattttaacactcatctgaatcaacattaaagccttttctctcaaagcgtttattgagaaactcaaatgaatatactttttgaattactgtcatcaaaagtgtacggcttcctgtgctgcttgtgtcaaatggaacctgccctctaaagcactttctttcctttacttgcgtggtttcatgtaagctgtgctgtttagaaacaacatctcagactttacaaagaaatgacaaagaaggcaattgcactttttaagggatatcgacaagcagtttctgttttctaaaggacaaaatacagagtgtgtgtcatttttaattagattctttcccctgctgagttggaaattccagtgcagcactgattgaccacagttgccaatctaaaagcacaaagacagaagtaaagctttatgctaattttatttcaatatgatagaaaatttatcttggtatgtccttttttagataactccagcaggaaactgtaactgctatgtctttaggaaaatgtagaagaaagaacattattgttctttaattcctacaaggtactcgaaaaccttaagtgaaaaagatttctatctttttatcttagcgcatttatggaaaaaatattaactatcctgaatattttataattttgtaggaaaaatatgcatctattttttcttgacttcttttatatagtaataaaagttattttggaagctcaaa

SEQ ID NO: 69314 - DNA, 2006 bp, Homo Sapiens
  misc_feature (1526)..(1604): n is a, c, g, or t
cttacggctaggtacgaggctgggtttgaatcggcacgaggcggcccccgggagctgtgccctatggagctattgcggccgtgggtggtcgcgggcgatgcggggctgccagctcctcgggcttcgtagctcttggcccggggacctactaagtgctcggctcttgtcccaagagaagcgggcagcggaaacgcactttgggtttgagactgtgtcggaagaggagaaggggggcaaagtctatcaggtgtttgaaagtgtggctaagaagtatgatgtgatgaatgatatgatgagtcttggtatccatcgtgtttggaaggatttgctgctctggaagatgcacccgcttcctgggacccagctgcttgatgttgctggaggcacaggtgacattgcattccggttccttaattatgttcagtcccagcatcagagaaaacagaagaggcagttaagggcccaacaaaatttatcctgggaagaaattgccaaagagtaccagaatgaagaagattccttgggcgggtctcgtgtcgtggtgtgtgacatcaacaaggagatgctaaaggttggaaagcagaaagccttggctcaaggatacagagctggacttgcatgggtattaggagatgctgaagaactgccctttgatgatgacaagtttgatatttacaccattgcctttgggatccggaatgtcacacacattgatcaggcactccaggaagctcatcgggtgctgaaaccaggaggacggtttctctgtctggaatttagccaagtgaacaatcccctcatatccaggctttatgatctatatagcttccaggtcatccctgtcctgggagaggtcatcgctggagactggaagtcctatcagtaccttgtagagagtatccgaaggtttccgtctcaggaagagttcaaggacatgatagaagatgcaggctttcacaaggtgacttacgaaagtctaacatcaggcattgtggccattcattctggcttcaaactttaattcctttcctatcatggagcatgaaccagtcatatcctgttgaaagcctggaactgaaggataatctggcaaatgagacagcagcagagcatctcctcttaaggatacgtgccttggactcatgtttgaatcgaacagtctcaaagtggaagaacaaattcttgtcacttttttacagctttctttggagctgcttcagtccatctcccagaggcatttggtctgtatctttgctcaactgctaatttctcttggctgtagggtgtgtggttaaggtacaaccacccctaaagctcagttttgaagtgagtgtatttatagcttctctgctggtgctgccttctagagggatgatagatcatttgaacccaatgacaatttttaaccagaaaatttaattgtacctgaatcaacctttcagcctaggacgaagtctaggcccaagtcagagtattaatgatcatgagaattgtgtgctgaaccagtaaacgagtttaccttttgnnnnnnnnnnnnnnnnnnnnnnnnnnnnnnnnnnnnnnnnnnnnnnnnnnnnnnnnnnnnnnnnnnnnnnnnnnnnnnntggcggcccgccccggcccccaaaaagtttccaaaaccatcctttggccgcggggccccaaaaggaaaggaaccagggcccaaactggttccaaaggaaacccggggcatgaataagggcttggaatcccccccataaaaaaaccccggggggaacccaaggttttgaaaaaatccaaaggggattccgggggcctttactgggttcaacaacggggggcccaggggagcttcaaattcaaattcacccccccgcccctgccatttattggaagaaggtggtgggaattccattaaacactttccgccccgaacgtggaaagcccttccccaaaaggggctgtgatagaacccgtgaaatctgccaagggcgggaaataacaaaaccctgtggggcgccccc

SEQ ID NO: 69315 - DNA, 1070 bp, Homo Sapiens
  misc_feature (561)..(561): n is a, c, g, or t
  misc_feature (568)..(568): n is a, c, g, or t
  misc_feature (617)..(617): n is a, c, g, or t
acttaggctaggtacgaggctgggtgtcgaattcggcacgagggattggcggccccgggagctgtgctctatggagctattgcggccgtgggtggtcgcgggcgatgcggggctgccagctcctcgggcttcgtagctcttggcccggggacctactaagtgctcggctcttgtcccaagagaagcgggcagcggaaacgcactttgggtttgagactgtgtcggaagaggagaaggggggcaaagtctatcaggtgtttgaaagtgtggctaagaagtatgatgtgatgaatgatatgatgagtcttggtatccatcgtgtttggaaggatttgctgctctggaagatgcacccgcttcctgggacccagctgcttgatgttgctggaggcacaggtgacattgcattccggttccttaattatgttcagtcccagcatcagagaaaacagaagaggcagttaagggcccaacaaaatttatcctgggaagaaattgccaaagagtaccagaatgaagaagattccttgggcgggtctcgtgtcgtggtgtgtgacatcnaacaagngagatgctaaaggttggaaagcagaaagccttggctcaaggatacagangctggacttgcatgggtattaggagatgctgaagaactgccctttgatgatgacaagtttgatatttacaccattgcctttgggatccggaatgtcacacacattgatcaggcactcaggaagctcatcgggtgctgaaacaggaggacggtttctctggtctggaaattaaggccaagtgaacaatccccctcatattcagctttatgatttatataggcttccaggtcagtccggtcttgggagaggcatcgctggagaaggaagtccattacgcctggaaaggttccgagggtccggtcggaaagtgaggcggagaaatgggttccggggctcgcagttcaccggagggccactgtggacaactcctcgggggcgccactggcgggagaggcgaaacctgcgttggttacggaaccgcgcccgtacttgggatggttgttggataattaa

SEQ ID NO: 69316 - DNA, 740 bp, Homo Sapiens
  misc_feature (57)..(69): n is a, c, g, or t
  misc_feature (249)..(539): n is a, c, g, or t
  misc_feature (625)..(685): n is a, c, g, or t
aacttaaaatatggcgtcggggagagggataaaacctgaatgccatattttaagttnnnnnnnnnnnnngcaaacacaaagatgcttcaagatcttcaggagaagtatggtatacaagtttcagggaccctatttgacaattttcagagtgctctctatgctgattccgagtcgagtgtgtcagctgtgattacagtgcctgtggatctaggccgggttgggggggtgtgggcgggggaagggaagtcnnnnnnnnnnnnnnnnnnnnnnnnnnnnnnnnnnnnnnnnnnnnnnnnnnnnnnnnnnnnnnnnnnnnnnnnnnnnnnnnnnnnnnnnnnnnnnnnnnnnnnnnnnnnnnnnnnnnnnnnnnnnnnnnnnnnnnnnnnnnnnnnnnnnnnnnnnnnnnnnnnnnnnnnnnnnnnnnnnnnnnnnnnnnnnnnnnnnnnnnnnnnnnnnnnnnnnnnnnnnnnnnnnnnnnnnnnnnnnnnnnnnnnnnnnnnnnnnnnnnnnnnnnnnnnnnnnnnnnnnnnnnnnnnnnngggagttggtggggagaggttctagaatgtcatgtagcaaccagtttaaggactgggactcagggatccaactcccacagtttccnnnnnnnnnnnnnnnnnnnnnnnnnnnnnnnnnnnnnnnnnnnnnnnnnnnnnnnnnnnnnaaaaggattggactaggtaatctccaagatcctaggaacccaggagaaagatgag

SEQ ID NO: 69317 - DNA, 685 bp, Homo Sapiens
  misc_feature (86)..(146): n is a, c, g, or t
  misc_feature (574)..(598): n is a, c, g, or t
gggagttggtggggagaggttctagaatgtcatgtagcaaccagtttaaggactgggactcagggatccaactcccacagtttccnnnnnnnnnnnnnnnnnnnnnnnnnnnnnnnnnnnnnnnnnnnnnnnnnnnnnnnnnnnnnaaaaggattggactaggtaatctccaagatcctaggaacccaggagaaagatgagaaaatgtacaagaatgaacactcaggtggaaatgctgcaatcctgagaagctcccaggatgaatgaaaggcacaggacctcttacccctcacccctgcccccctcaagagctggtttctcaaacctttctcttaggccccttcaaagggggaaaactaaaaattatacaagttatagttcaaggactttaaatagattatttatatgattgctcataaggatgaggctgtgaggagggaacaccttatttaatctaatgaaattccataggaaagaggccttttgtatattgaatcaatttatctgccttctcagtgcatctgtcatattctgaaagattctgggttgatcttttgcgataacctctatggcnnnnnnnnnnnnnnnnnnnnnnnnnattttttaacattttgtataatgattggaggttggtaaaaagtaacacaacagtacttttttaatacaaacttggtgtggtcaaaaa

SEQ ID NO: 69318 - DNA, 1786 bp, Homo Sapiens
  misc_feature (1106)..(1114): n is a, c, g, or t
  misc_feature (1696)..(1714): n is a, c, g, or t
atgaaaagtaatctgctgaaagacttggttgcccactgcctaactgtgtacagtgttaccagtgtcccattatggataattctcaatatgttaacacctaggtgttcccaatacctttttcccctcatgtcactactgaattttgacaggaggaaggaatagaatgatagcttgttttatttgtaaagctttcagtgaaacactacatacagtcgaagaaaacgaacataggcccaacaattcaagaaccattacggccgggccgcatagtgccattggatagggaagaacttcagaaatctgtggtactcttggccttgtctttgtcttccctgaacgtgtctccactctgtgaagccagcatctaggggctaaagatgcaaaggaaagcagcatgcattgtctgtacaaatgtgcagcgaaataccccaaagcttttcctactgtacagatctctcgagtctgctttaagtgatttcttttcttcttgattattttcttatatttctatatgtatagtgtaatagccttttgttaactaattttcttttttccttttagtaattaagcacgatcatgtccctttttaagccttacctgagaggaacaatgccttaaaataaaaaagcattaatgagatgaaagtatgcacagaataactttcctctacttattctgtactttgccctcatgagttccaatgttgtgtgaagacaggcagatgctgcacagtgaattgcagatgatattacagaagtgatgtctgtaggtcacattaaatactgacttgagcagtgggtgacacaacacagtgtttgtcttccacagggaagcttaaaacaaaagatatttttaacccactgacagaacaacaaggttaagcttcatctgcttggtgtcccacagaacttgcacaagcagttgttattgggaaagtacagtctcaaaaccagcaacagcagcagtacctacagccctttttttggagagaagtttaaatgctttactgttggggcagtccatttctaatcctgacttggtgacagtatcatgtgtatttataaaacaaggctagccatatttaggacaactgaagaaaagctggnnnnnnnnncaagcaaacttgaacactgaagcaacctcaagcatctctttattttgatgatatatttttgtaaggaaaatattcagatgatcaggaatgtatataactgaaatcaagaaaaagaacagtatgcatttaaaaagacagaattatgaaattatatgagtgcttagaatggggctaagggaagtgctgaaatagagcaaaggatggaagataatatagactaccacccactgtaaatgtttgcaagtggctgtgttttaaatgggattattacagttgatctctatgaatgtcagagccctaactttcaggctttgcattttgtatatgggaagaaatatgacaatcctaggtaattaaaccatagacccaaagcccttacgtttgatgcaatttatttttaaaataggccttgtttttcagcttcatctgcagttctatgtgaagattgataaatcagtttttacttgttttattaataaaacgtaatttggatatcttgagttgatggttttgtgatttagctgggtaaactatctttgtaacagataagttatttataaaaattaaaaaacttatattctnnnnnnnnnnnnnnnnnnncctgagcaggcggccgcaagtttattccctttagtgagggttaatcgaagattggcactggccgtcgttacc

SEQ ID NO: 69319 - DNA, 1033 bp, Homo Sapiens
  misc_feature (75)..(75): n is a, c, g, or t
  misc_feature (97)..(97): n is a, c, g, or t
  misc_feature (105)..(105): n is a, c, g, or t
  misc_feature (155)..(155): n is a, c, g, or t
  misc_feature (161)..(161): n is a, c, g, or t
  misc_feature (175)..(175): n is a, c, g, or t
  misc_feature (196)..(196): n is a, c, g, or t
tgcaggcgcaggcagcaatggacgacgcacgatacgtgtgcccacatcaacagccggacgactttgtgtgatgtnttggagaggagtcacgcacccntcctcacngcagatgtgcgtttagttgagatagttgcatacatagcatgtattctatnatattntatgggcatttccntaggtggagatcagcctcgtntgatgtgttaaaatgcataaaatggagattctgcagcagtttgaatgcactccagatggggaattgctgtaaccctcttactgtaacatgtcatctcctgcgtcgtgatggggagagggtaatgttacttcacaaaggacatgtcagatccttcttcatggacttttttagttactgttttttctctcaaacttgttttcgaatctcctgggagtgagggagaaacagggagctgaatcctcccccaagctgttccaggccagaggactctgcagtaccttctcctacatctagtaacaaagaatggtgataaccatgcactggttcaaggttctggagttctccatgaaacttgggttaattttgctcagagtatccggagttagccactaggctgcgggtgaaatgggatggagtagaacaacagcaggcttcctggagccacatgggctgactagggcactctgtggctggcctggcacgggctcagcccaggaagaggagaaacgatcccttgcctgcccctccctgtggcagggctaactgcctggccctcctggctcgcagccagccagccccctggcagcaggttctcctcagggcttgggtcttcaacctgtggcgacaggaggcagggcagactgtggaggacaggatgcaggtcagggagagggaaggcaggggtggaccgccatgagcatgaaaagacccgaagcaagttgactcttgcaatgtgcaactgttatgttctgcaaaatgagcaacgatgtatcaaattgatgcaaatttagatgttgatacttacaataaagtttttaatgtgttttactcttcaaa

SEQ ID NO: 69320 - DNA, 1052 bp, Homo Sapiens
  misc_feature (776)..(905): n is a, c, g, or t
  misc_feature (912)..(914): n is a, c, g, or t
  misc_feature (916)..(916): n is a, c, g, or t
  misc_feature (919)..(936): n is a, c, g, or t
  misc_feature (942)..(942): n is a, c, g, or t
  misc_feature (945)..(962): n is a, c, g, or t
aactgttgatattagccaggtaatgtgataaattctataggaacatatgaaaatacaacttaaataataaacagtggaatataaggaaagcaataaatgaatgggctgagctgcctgtaacttgagagtagatggtttgagcctgagcagagacatgactcagcctgttccatgaaggcagagccatggaccacgcaggaagggcctacagcccatttctccatacgcactggtatgtgtggatgatgctgccagggcgccatcgccaagtaagaaagtgaagcaaatcagaaacttgtgaagtggaaatgttctaaaggtggtgaggcaataaaaatcatagtactctttgtagcaaaattcttaagtatgttattttctgttgaagtttacaatcaaaggaaaatagtaatgttttatactgtttactgaaagaaaaagacctatgagcacataggactctagacggcatccagccggaggccagagctgagcactcagcccgggaggcaggctccaggcctcagcaggtgcggagccgtcactgcaccaagtctcactggctgtcagtatgacatttcacgggagatttcttgttgctcaaaaaatgagctcgcatttgtcaatgacagtttcttttttcttactagacctgtaacttttgtaaatacacatagcatgtaatggtatcttaaagtgtgtttctatgtgacaattttgtacaaatttgttattttccatttttatttcaaaatatacattcaaacttaaaattnnnnnnnnnnnnnnnnnnnnnnnnnnnnnnnnnnnnnnnnnnnnnnnnnnnnnnnnnnnnnnnnnnnnnnnnnnnnnnnnnnnnnnnnnnnnnnnnnnnnnnnnnnnnnnnnnnnnnnnnnnnnnnnnnnaacacannnanacnnnnnnnnnnnnnnnnnncacccncannnnnnnnnnnnnnnnnnaaaaaacttttctcaaacacatctttcctaaaacccagccccatccccctaaatacacttcaaaacccttccccccatcctttttttctt

SEQ ID NO: 69321 - DNA, 884 bp, Homo Sapiens
gtgaggaaggtagctttagtgaaaacagggtttggagttgaacctatacgggttcaaattcgacttccgtccaccaccgagacctgcgctccctgagggactcgctttcccatccgcgaaaccaggacggcgccgcctacaccccgcggcgttcggggcgggctgaatgggtcgctgagtaggggctacacccacgcccttcgctccccgcccccggcacggagcgacggccacggcagtgtccccaaggcaccgaaaccgaggcgggggtctcggtccctccgcgcaaggagggaggcggaccgtacgtggcaggactcaccgccccgcacgtggcaggactcaccgccccgcgccgcgttctccgagccatggcgccagcgctgtggcgggcctgcaacggactcatggccgccttcttcgcgctggcggccttggtgcaggtaaatgacccagatgcagaggtgtgggtggtggtgtacacaatccctgcagtactgaccctgcttgttggacttaaccctgaagtcacaggtaatgttatttggaaaagtatctctgcaatacacatactcttttgtacggtgtgggctgttggcttggcgtcctacctcttgcatcgtacacaacagaacatcttacatgaggaagaaggcagggagctgtctggtctggtgattattacagcatggattatcctgtgccacagttcctcaaagaatccagttggtggaagaattcaattggctattgccattgtaatcacacttttcccatttatctcatgggtctacatatatattaacaaggaaatgcggtcctcttggccaactcactgcaagacagtaatttaaataaattcaagaacttcgtttttaaaatga

SEQ ID NO: 69322 - DNA, 852 bp, Homo Sapiens
gttttgcaaaatgataatttattacttagtacttgattgttttgcaaggtactaggatattaacacatgggctacagtacctttctccagtctttaaagaaatttttcctaaatatttccttggtagtatattcatggtcgagcatttttgcaaagaacgtagctacttcctctgctttggggctcagcttcatgactttaccatcataataaaacttgacattctctggaagaggctcatatggtggggcaaatactggacctttatgttctaggaatttccacttgatgccttcaggatagcgctcttcttcccactgattagtgctctggaatgacttctgggcctcacattcaaggcctggatcaaaagaaccagtgtctctcattttgaaaaagccaacgctcacaagtaagatgaaatactgtggtgaataaaggaaaatacatttcaacagctcagtttaagaatactggacagaagagatcaacaatgaaggagctcagtaacaagtgagggacttgaaaatgtaaacagttgttttaccacaatggcatacatgacagagggattgcttacattgtttgtaaggaaaaggcctcctcagagtggtgacgtcagatggaaggtagaggagaaaacaaccctatgagaaaggacataaaggaagacgaggaggaaatgatagcttaactggggcatgttgagtttaaggtacttacgcattacctggaactatctagcaaacactgataagtgaatctaaagctcagtgggaacaactttttgaaaatgtatttttaaaatggtcgaacataagaaaaaaatgagtaatacaataaacaccatat

SEQ ID NO: 69323 - DNA, 682 bp, Homo Sapiens
acgagggctggggttgtagcggaacttgctcatctcgatttcccggaagccatgggagctgatgagggagaaggcgagcaccgcgatgggcagggcgcagtcggacaggatctctcgcacgcaggggtgcaggtaggggctcttcttgaattggtagagggtgtagcccagccagagcgtgcccagcatgatgaggaggctgagcacggcggtcgcctggcctgagtgtctgaactaaaatgtggtgacctggaagaagaactcaagaatgttactaacaatctgaaatctctggaggctgcatctgaaaagtattctgaaaaggaggacaaatatgaagaagaaattaaacttctgtctgacaaactgaaagaggctgagacccgtgctgaatttgcagagagaacggttgcaaaactggaaaagacaattgatgacctggaagagaaacttgcccaggccaaagaagagaacgtgggcttacatcagacactggatcagacactaaacgaacttaactgtatataagcaaaacagaagagtcttgttccaacagaaactctggagctccgtgggtctttctcttctcttgtaagaagttccttttgttattgccatcttcgctttgctggaaatgtcaagccaaattatgaatacatgacccaaatattttgtatcggag

SEQ ID NO: 69324 - DNA, 2049 bp, Homo Sapiens
  misc_feature (300)..(435): n is a, c, g, or t
  misc_feature (961)..(969): n is a, c, g, or t
ccgaggagggaacccaaaaccctttagaaattggttttaaattatttttttccccccggaaaggaatggggaaatttcctttcccccttctcctgttttcgggaaccaccagagggccttgtgggaaagcgcgccccttgggttggggtttgccgagtatttatttccgggggcttcccacctgggccaatgttcttccccacttttccctgggggtttccaaaaggcgaatccctcccctgcccttcaagacctcccccgagtaaggctggggacttacagggcagggcgtcacccatnnnnnnnnnnnnnnnnnnnnnnnnnnnnnnnnnnnnnnnnnnnnnnnnnnnnnnnnnnnnnnnnnnnnnnnnnnnnnnnnnnnnnnnnnnnnnnnnnnnnnnnnnnnnnnnnnnnnnnnnnnnnnnnnnnnnnnnngggaacaactttagaatgaaggaaatatgcaaaagaacatcacatcaaggatcaattaattaccatctattaattactatatgtgggtaattatgactatttcccaagcattctacgttgactgcttgagaagatgtttgtcctgcatggtggagagtggagaagggccaggattcttaggttgatctatctgtgggttatgacttcccacaatagccacccccggcccccaccagtccttttattggctctggatggaaaatccctacccatgtgatggtccctggtctctcctatagtttgaccaacagttgacccaaaaggttatggtcttcagcgttttaattatatccacgactagatactggggtctgtattcttcaaagtgtggggctgcctattctcccaggaaccaaatggcctccgtcttaagaaagtatgcttactaggaaataccctgcctaccttaggaataaatgctacttaaggaaaaaataagagagctgaaaaagctggtgccatttgnnnnnnnnngggaaggaatgagatttaactggtgctcaaagcttctccgatacaaaatatttggtcatgtattcataatttgcttgacatttccagcaaagcgaagatggcaataacaaaaggaacttcttacaagagaagagaaagacccacggagctccagagtttctgttggaacaagactcttctgttttgcttatatacagttaagttcgtttagtgtctgatccagtgtctgatgtaagcccacgttctcttctttggcctgggcaagtttctcttccaggtcatcaattgtcttttccagttttgcaaccgttctctctgcaaattcagcacgggtctcagcctctttcagtttgtcagacagaagtttaatttcttcttcatatttgtcctccttttcagaatacttttcagatgcagcctccagagatttcagattgttagtaacattcttgagttcttcttccaggtcaccacattttagttcagacacctccgcacgctcctctgccctctccagctcaccctccaggatgaccagcttacgagctacctcctcgtatttgcggtcagcctcttccgcaatgtgcttggcctctttgagctgcatctcctgaatctccatcttctcctcatccttcatggcccggttttctatcaccttcattcctctctcactctcatctgcagctttttctgcctcctccagcttctgcagggccgtggccagtcgttcctgagccctgtccaactcctcctcaacgagctggatgcgtcggttgagggcggccacatcaccttcagctttctcgcgccgctcgcgctcgccgtccagctcccgctgcaggccctgcgcgcggtcttccgcctcgtccgcctgctgctgcagggcctggatcttgcgtttcaccgcctccagggagttgaggccggccatggcgcggaggcgcagaggcgcacgggcagcggcggacgctcggctgggctcggctccggcgagaaaagcacagccgcgccccctcgtgcgggaatcgccacccaggcctcgctaccttaggacctatgaccggtcccttggagggg

SEQ ID NO: 69325 - DNA, 518 bp, Homo Sapiens
  misc_feature (11)..(11): n is a, c, g, or t
  misc_feature (28)..(28): n is a, c, g, or t
ccgggggagcntgccttctgagcaggtncagtgttctgttaagatggcacagccccctgagatatcctctatgggaaaatgggacttctgggcttccctgctgcctcctgtctcactcctatttcctcatatctttgcagaaagggtcaacacgtgggcagtgcttcccatggcagtaagaacaagtcaccacctctttgtcacagaagccaagagaaaagatgagccatgagcccctgacgcccgtccacttgagcagagaccccggtcagagccaattcccaacacagccagctccttcccactccgccccaggaatcgagccagcctcgctcagtcctgttctgccactcacagttcagacacctccgcacgctcctctgccctctccagctcaccctccaggatgaccagcttacgagctacctccacgtatttgcggtcagcctcttccgcaatgtgcttggcctctttgagctgcatctcctgaatctccatcttctcctcatccttcatgg

SEQ ID NO: 69326 - DNA, 496 bp, Homo Sapiens
  misc_feature (56)..(56): n is a, c, g, or t
  misc_feature (271)..(271): n is a, c, g, or t
  misc_feature (331)..(331): n is a, c, g, or t
  misc_feature (386)..(386): n is a, c, g, or t
  misc_feature (402)..(402): n is a, c, g, or t
  misc_feature (439)..(439): n is a, c, g, or t
  misc_feature (457)..(457): n is a, c, g, or t
  misc_feature (472)..(472): n is a, c, g, or t
ctaacaatctaacactttcatagaatcatttggatcttgtatagagtgtaacttanttggggataaacacttcaacttttcggcagaaaatactttggattctccccaaggtcatttgtattcagagtaaatcagtggtccacccccataaaactgtaagacaagcctcctgtatgaagccagaagcacaagtgccttcagagggcagttgattccaagtccagttgcctccctagcttgtgtgtggcctgcctccaccatagcaagggantagggagggaggcagggaacgttttttcttttctacatcttcacaggttcggctgggggnaagctgataggcctaaggcattaccttactattttaagatacccctgatcgcacnacttggcagaaacaanggttccctcacttgctaagtcaagcttcctttttggnaacctgggcaaaggccanttgccaccttggacntttgaaagaagtttaagcaaagac

SEQ ID NO: 69327 - DNA, 1806 bp, Homo Sapiens
  misc_feature (569)..(578): n is a, c, g, or t
  misc_feature (851)..(864): n is a, c, g, or t
  misc_feature (872)..(914): n is a, c, g, or t
  misc_feature (1053)..(1327): n is a, c, g, or t
  misc_feature (1609)..(1609): n is a, c, g, or t
  misc_feature (1780)..(1780): n is a, c, g, or t
gcacgaggggaccactgatttactctgaatacaaatgaccttggggagaatccaaagtattttctgccaaaagttgaagtgtttatccccataaaactgtaagacaagcctcctgtatgaagccagaagcacaagtgccttcagagggcagttgattccagtccagttgcctccctagcttgtgtgtggcctgcctccaccatagcagggactagggagggaggcagggaacgttttttcttttctacatcttcacaggttcggctgggggcagctgataggcctaaggccataccttactatttaagatactctgatcgcacaactgcagagacagggttccctcactgctagtcagcttcttttggaaactggacaggccattgccacctgcactttgaagaagtgagcaaagacgtggccacatttctaataagttgaaatggtctttctcccttcctcagagagcaaccagcttcttttttttaaaagtcctttctatctgttggatacaacagtgtgcttttggtgcacattttttagcaatagttgtgaattaatggcaaagnnnnnnnnnnttatttaccagccctcagttgtgtttgcccgaggggcctttgagcaaagaaatgggttttgctgggtcattttgccctgtgtgctaagccttgggtggctgcattcccctcctgtcatagatctgacccccagcatgattgtatttctttcccctccagtcaaaccgtaatacagtttccagaaaattcgacagtctgcaatgccaaaagggtaaaaatctgtatttcacagttgtatagaataaaggctttagttacaccacaacaccccgnnnnnnnnnnnnnncctctcgnnnnnnnnnnnnnnnnnnnnnnnnnnnnnnnnnnnnnnnnnnnacacaaaaaaatttcttcttttacaaacccccactctccccttactcctggacacctcttcccgccgcaatcccccccgatataagagcgctataaaaccatatccccccgcccaacccatttgccctccccgtctttnnnnnnnnnnnnnnnnnnnnnnnnnnnnnnnnnnnnnnnnnnnnnnnnnnnnnnnnnnnnnnnnnnnnnnnnnnnnnnnnnnnnnnnnnnnnnnnnnnnnnnnnnnnnnnnnnnnnnnnnnnnnnnnnnnnnnnnnnnnnnnnnnnnnnnnnnnnnnnnnnnnnnnnnnnnnnnnnnnnnnnnnnnnnnnnnnnnnnnnnnnnnnnnnnnnnnnnnnnnnnnnnnnnnnnnnnnnnnnnnnnnnnnnnnnnnnnnnnnnnnnnnnnnnnnnnnnntactacagctgatatagtctctcatgcaccccgcccctcttatacccgcgatcacctttccccccctatttctcttttctcgcccgatcttacgcccgctcgcccgcgcctttccttcttatcgcgcgtcccctcgttgttataccgcgcgggaaataccactgagcgtctcccgcgccgcgcgtcctatatcccactccgtgaacccaaactccactccttatcgtcgccttcgtgattaagccgccgccccgccacgccgcataaatccccgcgcgcatncatcatttacccctttattaagcccatcatgcacccgcagagtatagcctcccaaccgcgcccccctttattacaccacccgcccacccgcctcctcgattgcacccccatccttgcgccgtatattgacaccgtattcacctatggactgaagcgagataccccctagcntaataccaagagccctcatcgccgct

SEQ ID NO: 69328 - DNA, 1037 bp, Homo Sapiens
  misc_feature (41)..(41): n is a, c, g, or t
  misc_feature (84)..(85): n is a, c, g, or t
  misc_feature (107)..(107): n is a, c, g, or t
  misc_feature (123)..(123): n is a, c, g, or t
  misc_feature (252)..(252): n is a, c, g, or t
  misc_feature (294)..(294): n is a, c, g, or t
tatggtctttaggatgcctgggcaagatggcagagcacccnccagcaagtggtcctacagcaggatggttccccttcccctccnnagtaggagtgacagtgcagtgnttttaagcacagcctntgggaagcacacatattgagatcactggatccccccggagtcagactgcttgtctcttccctctctgaaggccatggccatcagcaggagctccacatcgagccccaggccagaccccccttccccttnacagagaggaacttattgcacaattgggtgccttttagcttntgtgtgttgaaatgggcgttttggaagcaagggtcaggggacagcttctaaaggtgtgagtctctgacctgagcatctgggcctcgcctgggcccttcttcctcccccaggggtggaaacgtggaggggccagcagcaccccggggtctgcccaggggagtcaaggccccgaggtgggggggcctattccaggaggagtgggatctcggccctgtccagagcgagttaatgtgtccatctgcccaaccctgtcctgagaaaggacctggttttggccaggacctgacaaatacccaatggcagcagtgtcaacagacgggagtccagccagggtgggtgcccttgtcattgaggttagggacagctatccccaggttatgcctggccccacccagcagggagttggggtccccccacaggctgtgagctctgtgggccctgggatgtgatctagctcagatgccctctcatccttgatgtcatagttgagtgcacccaagtggcacccactggcggccaggggcacagcctggtggtggtggcaatagaactgtgcccctcctcagctcctcgcttcccctcccacagccccagccttactccaccatgcggacaatcattttgtacggatcacgggagcaatgctgtacggttttgtacactggtggtttgtttcctagaaaacccattgtgtctctggatttctagcacattactaaaagagcctctgctttgtaaacatg

SEQ ID NO: 69329 - DNA, 1036 bp, Homo Sapiens
ccccgcgtaaaccatactggctaggtagcgaggcctgggtgtcgaattcggcacgaggtggctctgctcacaccagagatttccatagcaggagcggttggtgcagaagtaggttcagatgaacctcagttaacgtcgccacccctcctcccaccatggtaccctgtaggagccctgtatgacatctgagcgtggtggaggtaggagggttgccagctgcagtgaccctgccacagaggcagggtcagtgcagaggtcgctttggttccgcttccctgggccacagaacggaacacagcataggttctgcagcaggagccgcagtggcaggatggagggtgcgaagggcaaggagtgcactgctgggcattcctggccagccccggccctctggtgcctgcttcctgtgacttcagaaggcaggtggacagagcctccctctggccttgtcctcttcccagccacagaacgggcagggtggcacccgaccccaggggagcagtacctggtcccccaacccctcctccccacctccaaggccaagctgggtcccatagccagcacggcatggttctccccttccccccttcccaggtcaggggagttggacaagtagcaggtgtttgtttttaaagcacagccctttgggaaagcaacacattattgagactcactgtgataaccacgggagtcagaatggctttgtacctcgtgcctctctggagggccatgggccaccagcaggagctccacagtcgaggccccaggcaagaacgccacgtcccatttcaacgaggagggaaccctcactgcaccaatgcggtgcatcgcaagctacgagagtcgaaacggcggcaggaagcagggcaggggacagcatctaaagggggaacacgacatgagcactgggcccagcgggcaccaccaccaccaggggtgaaagcgagggccaaacacgaggcggcgggaaacgcccggagagggcacacaggaggagccgcacacgcagagcaagcaccggcaagacgaaagatgg

SEQ ID NO: 69330 - DNA, 519 bp, Homo Sapiens
ctggactcccgtctgttgacactgctgccattgggtatttgtcaggtcctggccaaaaccaggtcctttctcaggacagggttgggcagatggacacattaactcgctctggacagggccgagatcccactcctcctggaataggcccccccacctcggggccttgactcccctgggcagaccccggggtgctgctggccgctccacgtttccacccctggggaggaagaagggcccaggcgaggcccagatgctcaggtcagagactcacacctttagaagctgtcccctgacccttgcttccaaaacgcccatttcaacacacaaaagctaaaaggcacccaattgtgcaataaagttccctctctgtgaaagggagggggttctggcctggggctcgatgtggagctcctgctgatggcccatggccctccagagaggaagaggacaaagccagtctgactcccgggggaatcacagtgagtctcaataatgtgttgctttcccaaagggctgtgc

SEQ ID NO: 69331 - DNA, 1297 bp, Homo Sapiens
ttactctgttactctaagtaaattcagttgtgtgataaaaatgggtcaaatgtaatatgtattctataaattgtagaaaaaacatttcttagaaaaatttccaaagatgaaggactttagtattcagggatagtgcactgctctttgaaaactattaagtatttgggaatgtctggattatggtgggccaatgcttttgatcaactgccctgcacaaaaatgaaaaatgcttgagacagtgtatgcgtatatgtttattcctggaggatttaatctatttagttataattgtgactaaaagtttcacatctcaaaaagtttattagagattatgggctgtacttcatgggttttaatatttctttcaattataccagaatgtaaagctaacaaatctcttttaaggataaagtagccaatatttggtgcagcttcaatgtctttctgaagattaaggatattttgccacgtcacatccaattaataatgagcttttgttctacgtttttgagcctgcttcctgcatgcataaaattaatacttcagccctcttccaaaggattcaaatttacactggttagctgtgcgctatcattctttttattttctttccaagtacatgaaaaatccattctcttggtgtcactaccagtctgcttagttttaagtgaaattccttttatgtctacttggtttttacttgtgtcaacatttagtatgctacctcttctattgaaggatgaactcctaatgccctctgttgtgacaacaatggcattttttatagcttgtgtaacttccttttcaatatttgaaaagacttctgaagaagaactgcagttgaaatccttttccatttctgtgaggaaatatcttccatgttttacatttctttccagaattatacaatatttgtttcttatctcagtcatcactatggtgcttctgacgttgatgactgtcacactggatcctcctcagaaactaccggacttgttttctgtattggtgtgttttgtatctggcttgaacttcctgttcttcttggtatactttaacattattattatgtgggattccaaaagtggaagaaatcagaagaaaatcagctagctgtattcctaaacaaattgtttcctaaacaaatgtgaaaatgtgaacagtgctgaaaggttttgtgaactttttgctatgtataaatgaaattaccattttgagaaccatggaaccacaggaaaggaaatggtgaaaagtcattgttgtctacacaaaataaatgtatatggagaccaaagac

SEQ ID NO: 69332 - DNA, 990 bp, Homo Sapiens
  misc_feature (152)..(160): n is a, c, g, or t
ttacatgcatgtgtggcatagctttaaataaaattcactttatgaatcaataagtgaaatggcaaaaaggagaggtggatattatttaaaagaagatgactgtttaaacacaaaaccatcacagagggaagagaggtttagaaaggtacagnnnnnnnnntctacaccaggtaacactggaggatgcagggctacatttgccactgaagaaacattgttctcttgcatctgaattccagtgctttccaaatagatgggtagatgatgaaaaatggagcagcttcttttatttcttcttcttttctccttgaattctagtacgagacagttctctgcctgccaccaaggcagaaagcagcattttgctcacctgctcttcagtctggcagggtcccacgctcagttttccagcatagctgcagggtgctattgtaatgactcagggatggtgctgacaacgtgggttgcctctgtggctgcgggaggggagccaaagaaggtgttggtttgattcctctgctgatctcggaggtaaggaggaaccgacgaacttttgatatggaggatcctggtgtccatcacctgacagtcaatctgcatcatcacttcgtagtcctgcccattgatcacattctcatttatgtttattgctggtaacacaattgacatttttggtcttgtggtcttgttatgggtggtagctggtaacagcaggtgatcccttcgaaatgacacaacataaaatgtgtctccccttctgcggatggcttcaaaaaagtcttgataacttctgggtgaagcataatacacttgtagctcactccctgagttcctgctgatactactagtggtttctgtgtattgaacagccatcagctgagaatttgagccctgttccagagcaccctgaagaatacgggttttctgttgattatttgtcattcttcttgacttggtcctttctacttcatgtctatgaacccatcctcg

SEQ ID NO: 69333 - DNA, 705 bp, Homo Sapiens
  misc_feature (68)..(68): n is a, c, g, or t
atgtccggccaccagttgtgcctcggcgcccccccgcccacatcagcagtgtcaggcaggcctccacncaggtccacgcacggtgcctcatacccagagagtagccaacattggtactcagaccacaggacccagtggggtaggatgctgtacaccaggccggccgctcctgccgtgcaaatgttcctcagcagcacatagcacctatcgggtccaggagccggctgtgcacatcccaggacaggagcccctgaccgcgtccatgctggctgcggcgcccctgcatgagcaaaagcagatgattggggagcgtctctacccccttatccatgatgtccacacccagctggctggcaagatcacgggcatgctgctggagattgacaactcagagctgttgctcatgctggagtctccagaatccctccatgccaagatagacgaggcagtggccgtgctgcaggcacaccaggctatggagcagccgaaggcgtacatgcactgaaaccagaaaaggaaatcctcgcttccatggctgccaaaaggacagtgtttctggctctcagccctaaggccctgcaaactctaacttatttcccaattagtctgtatctatacttgggctctgtatgtgaatgaaggttggtcacccatccagcctattaccttttgctttgtgtattaaaagtgctgcaaaatctgaaa

SEQ ID NO: 69334 - DNA, 759 bp, Homo Sapiens
  misc_feature (73)..(73): n is a, c, g, or t
aagctggatcagctgcagttggaagggttgaaatacatagaaagaaatgaacaaaaaatgaaaaaagttgcanaaatattaagtcaagaaaaaacaactctgcagaaaattaatgattggataaaattaaaaactgatatgtatgaaggacttccattcttttcaaaattgtgatgagtatatgcttatgttctcataaatgaaggtctgtttagaagatcaaccacattcaataaggaattgtggggttcgacatgagttaactttgaaatacgtatgaattctggagaatcctgaaaaagacggtgcttcaaccagcttgcatagcacagagaatattcttggttacagaattcatatgggaactaggcttttaagatgttaataattagctaagctttagtaacccttactgtgctagtagattttagtagatattggtgttatattgtttgatgtttgaaaatatattaatatatgtgccgaacaagaaaccgaaagctatattgtactgtgtatttttactttagtcctcataatcatgttgaatttatgtgatcattgattttatttcatatggaaaagctaatttcttcttaaatttacattacctaatattctcactagctatgttctccaatccacactgccttttattgtaatatcatctaaatagatgcagaaaaatggaattttctctattaaagtattttacatttgacataaaaaagagacagatacagttttctattcagatat

SEQ ID NO: 69335 - DNA, 1019 bp, Homo Sapiens
gggggcccaaagaaactataattttgaaccaacagacctctgctggcatctgcgattgcatttttcctgttttaacaacggctgtgctagacgaagtggtgaagcccaatctgtgacactgcatacagatgtaggtgatattaaaattgaagtcttctgtgagaggacacccaaaacatgtgagaatttcttggctctttgtgccagtaattactacaatggctgtatatttcataggaatatcaagggtttcatggttcaaacaggagatccaacaggaactggaagaggaggcaacagtatttggggcaagaagtttgaggatgaatacagtgaatatcttaagcacaatgttagaggtgttgtatctatggctaataatggcccgaacaccaatggatctcagttcttcatcacctatggcaaacagccacatttggacatgaaatacaccgtatttggaaaggtaatagatggtctggaaactctagatgagttggagaagttgccagtaaatgagaagacataccgacctcttaatgatgtacacattaaggacataactattcatgccaacccatttgctcagtagctatgatagacctggacaaataacttgacaaattgctggaacacacttattgtggtttacccggttttaattatgtcagagattgcatcatccttctgcttgtttacaactatgatcttctatgaaatggtggtaccaaggggcgcccaacagcttttatccccattcttagagcatattctttattataatgattatccaacatatttctttaattttaatacaaaaaatacatcatttaatttttgttacatatgaacattcatttttaaatgctcagcctcaagtgcaggcatttttgagtggcctgattacatattcctcccacagcaagtccgtatcctggaagtgttattttataataaaatttaaaaagttttaaagaattaaatcgtaggacaaattaattaaaatattgtgtaaaatt

SEQ ID NO: 69336 - DNA, 690 bp, Homo Sapiens
  misc_feature (276)..(372): n is a, c, g, or t
taattaactttcatattagcagattaaactagcagagcaggttcaagggaaattaaatgatatggaccctaatttgtatcattctgagttgattgtgtggtttattcattctggaaacatgttgatacttacagtcagccactgcttttgataagtgatattgattaggttgaatcttcttgtaaatagtatttaccagttagcaaagtctgtgttttcagaattacagtgagcacagaggtgttcataaaatgggaattgagtcccactcggtannnnnnnnnnnnnnnnnnnnnnnnnnnnnnnnnnnnnnnnnnnnnnnnnnnnnnnnnnnnnnnnnnnnnnnnnnnnnnnnnnnnnnnnnnnnnnnnnctcatgtgacacccacagttatgccggatgttgccagatgcccctaggggacagagtcaacccccaactgaggaccactgtcctacagagtcaggaaatattgtagggagaaaaaaataacaacaacaaaggcctgtgttaatgttaaatagatgagattatggaatgtgtatattaatgttaaaaattgtaccttgatcaatgtactttttataaacttgccatagatatctcagatttgaaacctcaagacagatttattattcttaaatgctgtatgataatgaagaaaaataaaaatttatttcttgcaaagtt

SEQ ID NO: 69337 - DNA, 647 bp, Homo Sapiens
  misc_feature (233)..(329): n is a, c, g, or t
caagggaaattaaatgatatggaccctaatttgtatcattctgagttgattgtgtggtttattcattctggaaacatgttgatacttacagtcagccactgcttttgataagtgatattgattaggttgaatcttcttgtaaatagtatttaccagttagcaaagtctgtgttttcagaattacagtgagcacagaggtgttcataaaatgggaattgagtcccactcggtannnnnnnnnnnnnnnnnnnnnnnnnnnnnnnnnnnnnnnnnnnnnnnnnnnnnnnnnnnnnnnnnnnnnnnnnnnnnnnnnnnnnnnnnnnnnnnnnctcatgtgacacccacagttatgccggatgttgccagatgcccctaggggacagagtcaacccccaactgaggaccactgtcctacagagtcaggaaatattgtagggagaaaaaaataacaacaacaaaggcctgtgttaatgttaaatagatgagattatggaatgtgtatattaatgttaaaaattgtaccttgatcaatgtactttttataaacttgccatagatatctcagatttgaaacctcaagacagatttattattcttaaatgctgtatgataatgaagaaaaataaaaatttatttcttgcaaagtt

SEQ ID NO: 69338 - DNA, 1017 bp, Homo Sapiens
cagtcgacggtaccggacatatgcccgggaattcggccattacggccgggggggaccggcggttgtctgtggccggaggctgatcagtgttctagaacagatcagacattttgtaatgatgcctgaaataaacactaaccacctcgacaagcaacaggttcaactcctggcagagatgtgtatccttattgatgaaaatgacaataaaattggagctgagaccaagaagaattgtcacctgaacgagaacattgagaaaggattattgcatcgagcttttagtgtcttcttattcaacaccgaaaataagcttctgctacagcaaagatcagatgctaagattacctttccaggttgttttacgaatacgtgttgtagtcatccattaagcaatccagccgagcttgaggaaagtgacgcccttggagtgaggcgagcagcacagagacggctgaaagctgagctaggaattcccttggaagaggttcctccagaagaaattaattatttaacacgaattcactacaaagctcagtctgatggtatctggggtgaacatgaaattgattacattttgttggtgaggaagaatgtaactttgaatccagatcccaatgagattaaaagctattgttatgtgtcaaaggaagaactaaaagaacttctgaaaaaagcagccagtgggtgaaattaagataacgccatgggtttaaaattattgcagcgacttttctctttaaatggggggataacttaaatcatttgaatcagtttggtgaccatgagaaaatatacagaatgtgaatatgtaggtaaatgattacagaaaaatttatctgcttaacaaacttagaatgacttttttccttttaaatttagttctatcattaaattatcactaaaattagttctatcatttggtactatcattaaatgtattatatacacctgatacttttaaaacttgggttggaaaaaactaacctaataattttggatcacacacccctggaaaat

SEQ ID NO: 69339 - DNA, 1630 bp, Homo Sapiens
  misc_feature (52)..(93): n is a, c, g, or t
  misc_feature (97)..(131): n is a, c, g, or t
aaaaagaagaaaaattttgggataatactatagggcgctagctcgtctaatnnnnnnnnnnnnnnnnnnnnnnnnnnnnnnnnnnnnnnnnnnccgnnnnnnnnnnnnnnnnnnnnnnnnnnnnnnnnnnncagtcgacggtaccggacatatgcccgggaattcggccattacggccgggctacaaagctcagtctgatggtatctggggtgaacatgaaattgattacatttgttggtgaggaagaatgtaactttgaatccagatcccaatgagattaaaagctatgttatgtgtcaaaggaagaactaaaagaacttctgaaaaaagcagccagtggtgaaattaagataacgccatggtttaaaattattgcagcgacttttctctttaaatggtgggataacttaaatcatttgaatcagtttgttgaccatgagaaaatatacagaatgtgaatatgtaggtaaatgattacagaaaaatttatctgcttaacaaacttagaatgactttttccttttaaatttagttctatcattaatttatcattaaatttagttctatcatttggtactatcattaatgtattatatacactgatactttaaaacttgtgtggaaaaaactaacttataattttgtatcacacaccctggatatgtgttctgtttctaagcgacatttgtgagagcattattgtaaaatgagagcgagcaaataaaaccttaatttaatctttgcagatacatacttatgggaacattcgaacaaatgagtgaaactctgtgtttacagtaggctgtgataaacatttccggagcactttgcagaggacttgctattgccaggtgctttatgtatcattaaatttttctcatagttcagaaaaatgtgcaaaggaaactattgtcacgctcctatcaaaacagtcttaattaactattcatattagcagattaaactagcagagcaggtacaagggaaattaaatgatatggaccctaatttgtatcattctgagttgattgtgtggtttattcattctggaaacatgttgatacttacagtcagccactgcttttgataagtgatattgattaggttgaatcttcttgtaaatagtatttaccagttagcaaagtctgtgttttcagaattacagtgagcacagaggtgttcataaaatgggaattgagtcccactcggtaagagttgcttaaattgacactgttgacatttgggctggataaaacccctgtggtggggtctgtgctgtgcattgcaggatggtgagcagcgtccctctcatgtgacacccacagttatgccggatgttgccagatgcccctaggggacagagtcaacccccaactgaggaccactgtcctacagagtcaggaaatattgtagggagaaaaaaataacaacaacaaaggcctgtgttaatgttaaatagatgagattatggaatgtgtatattaatgttaaaaattgtaccttgatcaatgtactttttataaacttgccatagatatctcagatttgaaacctcaagacagatttattattcttaaatgctgtatgataatgaagaaaaataaaaatttatttcttgcaaagttaaaa

SEQ ID NO: 69340 - DNA, 1174 bp, Homo Sapiens
  misc_feature (64)..(65): n is a, c, g, or t
  misc_feature (822)..(836): n is a, c, g, or t
  misc_feature (1034)..(1045): n is a, c, g, or t
gaagcactttcaaagaaagaactgtctgccgaagagctgtataagcgactcgagaaactcatanntgaggacaaagcgaatgatgaacagatctttgactgggtagaggctaatctagacgaaatccagatgagttcacctacattccttagagctttaatgactgctgtttgtaaagcagctattatagccgactcttctaccttcagagtggacactgctgttatcaagcagagagtgccgatcttactcaagtacctagactcagatacagagaaggaactgcaagcactttatgcactacaagcatcgatagtaaaacttgatcaacctgccaatttgctgcggatgttttttgattgtctatatgacgaggaggtgatctccgaggatgccttctacaaatgggagagcagcaaggaccctgcagagcagaatgggaagggcgtggctctgaaatctgtcacggcattcttcacgtggctgcgggaagcagaagaggagtctgaggataactaaaacttcaaatacacaaaatgaaacaaaagaaacaatttaagtatttttttaaaaagtttcacgtcttcgccaatcacagtgcagcaaggccaattctcgcagaaacccccacgtgtgcacgagtgggagaggggaaagagaaaaaaaggtgatcatggaggaaaaaggtactggataaaagtaaacttcaaaccttagggcgggagcactaaaaccaaaatacatgtattatttatagaaaatattttctgttttaatcttttctttttaaacaaggactcatacttaaaaaaatgtttagcnnnnnnnnnnnnnnngttgagaacttttaatttattttaaggactgcaaatgccagtgtaattttttaatttgcagtttctgtaaacaacttgtataatagaaaagcagagaaataaatttccctccccttcaagatgcacctcatgtttgttttaaggtatagcatttagtccagatttgagaaagtttggggtgaacaaggtaagaaagannnnnnnnnnnnggcatcaaatctttctgcctgcctctcagcttgcttcagaagatttaaaaaatcacaatagtaatcaaaacatacataacattgaaacagaaggaaatgctgtggaccacagaactccaagaattgttt

SEQ ID NO: 69341 - DNA, 645 bp, Homo Sapiens
  misc_feature (590)..(603): n is a, c, g, or t
gaaaaggggagaaaacggagaagagttaaggaggataaaaagaagcgagatcgagaccgggtggagaatgaggcagaaaaagatctccagtgtcacgcccctgtgagattagacttgcctcctgagaagcctctcacaagctctttagccaaacaagaagaagtagaacagacaccccttcaagaagctttgaatcaactgatgagacaattgcagagaaaagatccaagtgctttcttttcatttcctgtgactgattttattgctcctggctactccatgatcattaaacacccaatggattttagtaccatgaaagaaaagatcaagaacaatgactatcagtccatagaagaactaaaggataacttcaaactaatgtgtactaatgccatgatttacaataaaccagagaccatttattataaagctgcaaagaagctgttgcactcaggaatgaaaattcttagccaggaaagaattcagagcctgaagcagagcatagacttcatggctgacttgcagaaaactcgaaagcagaaagatggaacagacacctcacagagtggggaggacggaggctgctggcnnnnnnnnnnnnnngactctggagatgccgaagcacacgccttcaagagtcccagc

SEQ ID NO: 69342 - DNA, 1013 bp, Homo Sapiens
  misc_feature (33)..(33): n is a, c, g, or t
  misc_feature (55)..(55): n is a, c, g, or t
  misc_feature (71)..(71): n is a, c, g, or t
  misc_feature (93)..(93): n is a, c, g, or t
  misc_feature (116)..(116): n is a, c, g, or t
  misc_feature (121)..(121): n is a, c, g, or t
  misc_feature (149)..(149): n is a, c, g, or t
  misc_feature (171)..(171): n is a, c, g, or t
  misc_feature (207)..(207): n is a, c, g, or t
  misc_feature (234)..(234): n is a, c, g, or t
  misc_feature (258)..(258): n is a, c, g, or t
  misc_feature (370)..(370): n is a, c, g, or t
  misc_feature (528)..(528): n is a, c, g, or t
  misc_feature (827)..(827): n is a, c, g, or t
tgagatacagagtgaccaccaggcgtttgactnagtatcaagacagctcaagcgntgaagcagtacaaatntgcgtccagtgaagtttgactnctgagaagctgaatatccagagnaaacntgatgagccaccagatgctcaggaactncaggaagcccagaatgaacgtntgagcaccagaccccctccgaacatgatctgtctcntggtccctcatacagagaaatgcatcntgctgaacaagtgaccaataatcntaaagaacttgcacagcaagtaactccaggtgatatcgtaagcacgtatggagttcgaaaagcaatgggatttccattccttcccccgtcatggaaaacaactttgtggatntgacagaagacactgaagaacctaaaaagacggatgttgctgagtgtggacctggtggaagttgaggctgcctgatggcgaggtgcagctgtgccacacagactgggtggactggcctagaggcaggggctccccaccccgctccatcacccgggctnaccgacgcggaggcggaaggagttgaaggagtgcctgttgatgccgtccagcttactcatcagggcgatgctgaactccaccatgacaccaatgtgggcatgctgccgctccagctcctgcgggacaggctgtgggtcagatccttgcatctccagagcccccagacctagtgggccctggcgcgccactcttgttgaggacatggcccttggcggctcctgctcttcctgttgtctccgtccccacactgtctccctcttcccttccatctgtgtctgcacagagcaaacacagcatnatctacacaggaatgtagattctttgtctccagcaaagaattcaacccaaactgatttcctctgtttggcttggttgatagcgtgggcttagttggaaatgaagctaaggggcctgagtctaatcttagcaagctgcccatcacagagaagatgccaacgaattatttgctgcataaaacagaatg

SEQ ID NO: 69343 - DNA, 1036 bp, Homo Sapiens
  misc_feature (100)..(100): n is a, c, g, or t
  misc_feature (482)..(509): n is a, c, g, or t
  misc_feature (707)..(720): n is a, c, g, or t
  misc_feature (850)..(861): n is a, c, g, or t
  misc_feature (946)..(958): n is a, c, g, or t
ccatccaacgcttccggctgcgtcatatcatgcaacagtccgatgagcgcgtgcccaccatattgatgctcatcatagcccccagttacattatctccgntgttgtgttgaatgtggcgatacattcacacagaacacttgactgatacgatttatcgactcctatagggattgccctcgagccagaattcgcacgaggaaactcaatacacaaaattaacaaaagaaacatttagtatgtttttaaaagtttcacgtcttcgccaatcacagtgcagcaagccaaattctcgcagaaacccccacgtgtgcacgagtggaggaggggaaagagaaaaaaaggtgatcatggaggaaaaaggtactggataaaagtaaacttcaaaccttagggcgggagcactaaaaccaaaatacatgtattatttatagaaaatattttctgttttaatcttttctttttaaacaaggactcatacttnnnnnnnnnnnnnnnnnnnnnnnnnnnngttgagaacttttaatttattttaaggactgcaaatgccagtgtaattttttaatttgcagtttctgtaaacaacttgtataatagaaaagcagagaaataaatttccctccccttcaagatgcacctcatgtttgttttaaggtatagcatttagtccagatttgagaaagtttggggtgaacaaggtaagaaagannnnnnnnnnnnnnggcatcaaatctttctgcctgcctctcagcttgcttcagaaaatttaaaaaatcacaatagtaatcaaaacatacataacattgaaacagaaggaaatgctgtggaccacagaactccaagaattgtttnnnnnnnnnnnngtgctaccctgagaaaagtactcttaatactcttgaaatctttagagcaactttaaggcttgtaaatacatagaacaaatatttnnnnnnnnnnnnngaaattgactcagtactatttcttttcactttgaaaatataaagaacaaaataaagacaaacattgcaagtttaaaag

SEQ ID NO: 69344 - DNA, 1542 bp, Homo Sapiens
  misc_feature (216)..(229): n is a, c, g, or t
tgcagtactactacggtctctaggtagcgaggcctgggtggcgaattcggcacgaggtgcaaagaagctgttgcactcaggaatgaaaattcttagccaggaaagaattcagagcctgaagcagagcatagacttcatggctgacttgcagaaaactcgaaagcagaaagatggaacagacacctcacagagtggggaggacggaggctgctgccnnnnnnnnnnnnnngactctggagatgctgaagcacacgccttcaagagtcccagcaaagaaaataaaaagaaagacaaagatatgcttgaagataagtttaaaagcaataatttagagagagagcaggagcagcttgaccgcatcgtgaaggaatctggaggaaagctgaccaggcggcttgtgaacagtcagtgcgaatttgaaagaagaaaaccagatggaacaacgacgttgggacttctccatcctgtggatcccattgtaggagagccaggctactgccctgtgagactgggaatgacaactggaagacttcagtctggagtgaatactttgcaggggttcaaagaggataaaaggaacaaagtcactccagtgttatatttgaattatgggccctacagttcttatgcaccgcattatgactccacatttgcaaatatcagcaaggatgattctgatttaatctattcaacctatggggaagactctgatcttccaagtgatttcagcatccatgagtttttggccacgtgccaagattatccgtatgtcatggcagatagtttactggatgttttaacaaaaggagggcattccaggaccctacaagagatggagatgtcattgcctgaagatgaaggccatactaggacacttgacacagcaaaagaaatggagattacagaagtagagccaccagggcgtttggactccagtactcaagacaggctcatagcgctgaaagcagtaacaaattttggcgttccagttgaagtttttgactctgaagaagctgaaatattccagaagaaacttgatgagaccaccagattgctcagggaactccaggaagcccagaatgaacgtttgagcaccagaccccctccgaacatgatctgtctcttgggtccctcatacagagaaatgcatcttgctgaacaagtgaccaataatcttaaagaacttgcacagcaagtaactccaggtgatatcgtaagcacgtatggagttcgaaaagcaatggggatttccattccttcccccgtcatggaaaacaactttgtggatttgacagaagacactgaagaacctaaaaagacggatgttgctgagtgtggacctggtggaagttgaggctgcctggtatttgattatatattatgtacatactttttcattcttaacttagaaatgcttttcagaagatattaaatatttgtaaattgtgtttttaattaaactttggaacagcgaatttggatgttcccagaggttggacttgtattaggtaataaagctggacctggggactcgtgagtcca

SEQ ID NO: 69345 - DNA, 832 bp, Homo Sapiens
cggggcgggaccgctgggcactcccgcgcgtactcggccgcctgagcgatactaaaatgtctgatgatgctggtgacaccttagccactggagacaaagcagaagttactgagatgcctaatagtgattctttacctgaggatgcagaagtgcattgtgattcagctgcagtttcacatgagccaacaccagctgaccccagaggggaggggcatgaaaatgcagctgtgcagggtgcaggggctgccgccattgggccccctgtgcagcctcaggatgccaacgccctggagccccctctcaatggagacgtgactgaggatacacttgctgaatgtattgattccgtcagccttgaggcagaacccagatccgaaatacccctgcaggaacagaattatctggctgtggattcccctccaagtggaggaggatgggcaggctggggatcctggggcaaatctctgctgtcgtcagcatctgccacagtaggtcatggattgacggcagtcaaggaaaaagcaggagccactctacggattcatggtgtaaattctggatcttctgaaggagcccaaccaaatactgaaaacggagtccctgaaataacagatgcagccacagatcagggccctgcagaaagcccacccacttccccttcatcagcctctcggggtatgctgtctgccatcaccaatgtggttcaaaacacaggtaaaagtgtcttaactggaggccttgatgcgttggaattcatcggcaagaaaaccatgaatgtccttgcagaaagtgacccgggcttaagcggaccaagacgctcatggagagaacg

SEQ ID NO: 69346 - DNA, 550 bp, Homo Sapiens
  misc_feature (17)..(17): n is a, c, g, or t
  misc_feature (52)..(52): n is a, c, g, or t
gttattagcctttaggncatgaaatgttggagtctcagggttgctgatttcngctaatgggaaaaatggactaaggtctttaaaaatagttggcagccttctcccacaggagaccaagtgaaagataagtgtgattttagatctttcttgtccatagttgttttcagtggagtcttccattctgtatcttaccctaagatctggttcttccctccccatccccaccccccacccaccgcctgccagctcacactaatagatgattcttaattgccaaatgtgttagagtttgtatatcctactcctgggccttacatgtcgcctgttggggcttaagaccaggttgataagtaggaactgaaagtcttccagattcacagtagaaaattttatagacatttctgttaaagaaatatatcgattttatgtttttcaattatgttactgtaaataccttgtacctgttcatggattattttattctaaaatattttgtcaaatgtgtatcaaccaaattaaaaagaaaggttttcatgtcagcaacatcaaa

SEQ ID NO: 69347 - DNA, 857 bp, Homo Sapiens
  misc_feature (141)..(141): n is a, c, g, or t
ccagaccaggaggtgagatacttctcctgggcttggataatgctggcaagaccactcttctgaagcagcttgcatctgaagacatcagccacatcacacctacacaggtttcaacatcaaaagtgtacaatcacaaggttntaaactgaatgtatgggacattggtggacagaggaaaatcagaccatactggaagaattattttgaaaataccgatattcttatatatgtaatcgacagtgcagacagaaaaagatttgaagagacgggtcaggaactagcggaattactggaggaagaaaaactaagttgtgtgccagtgctcatctttgctaataagcaggatttgctcacagcagcccctgcctctgaaattgcagaaggactgaacctgcataccatccgcgaccgagtctggcagatccagtcttgctcagctctcacaggagagggcgttcaggatggcatgaactgggtctgcaaaaatgtcaatgcaaagaagaaataaaatctagacgaatggagatgcaggagctgcgggagccgaattcggtcctgaaaaacactaatttgctgctttctgaccaaatgtttttccatctgtgtacagctccagctgtttgaagagagggaacaacacggtttagaaagaatccccattccagcagtagatttaactgatctctgaggttcagtatcatttttcaaataaaggaattatattatttcctctgcataattgaaatagtattaaatgtctcaaagcacatgattagaaaatgagatcttttaaatgagcaagagattgcattgcagtttagacaattccagtgggcttttttttcctctcaaaaaaa

SEQ ID NO: 69348 - DNA, 816 bp, Homo Sapiens
gggaggaggaggaggagggactcggcgggaggatgggcttgctctcaattttgcgcaagttgaaaagtgcaccagaccaggaggtgagaatacttctcctgggcttggataatgctggcaagaccactcttctgaagcagcttgcatctgaagacatcagccacatcacacctacacagggtttcaacatcaaaagtgtacaatcacaaggttttaaactgaatgtatgggacattggtggacagaggaaaatcagaccatactggaagaattattttgaaaataccgatattcttatatatgtaatcgacagtgcagacagaaaaagatttgaagagacgggtcaggaactagcggaattactggaggaagaaaaactaagttgtgtgccagtgctcatctttgctaataagcaggatttgctcacagcagcccctgcctctgaaattgcagaaggactgaacctgcataccatccgcgaccgagtctggcagatccagtcttgctcagctctcacaggagagggcgttcaggatggcatgaactgggtctgcaaaaatgtcaatgcaaagaagaaataaaatctagacgaatggagatgcaggagctgcgggagccgaattcggtcctgaaaaacactaatttgctgctttctgaccaaatgtttttccatctgtgtacagctccagctggtttgaagagagggaacaacacgggtttagaaagatcccccattccaccaggagatttaactggacctctgaaggtccagaatcattttttcaattaaagggaaattatattattttcctcctg

SEQ ID NO: 69349 - DNA, 1325 bp, Homo Sapiens
  misc_feature (177)..(177): n is a, c, g, or t
  misc_feature (273)..(273): n is a, c, g, or t
  misc_feature (295)..(295): n is a, c, g, or t
  misc_feature (339)..(339): n is a, c, g, or t
tcagtgcagcagttccgatgaagcgcatggccacgcatatgtgatactcatcatagcacccagctacactttgctccgctgtatgtgttggaatgtagcgatacaattcacacaggaacacttgactgatacgatttatacgctcctataggaattgccctcgagccagaattcgcnacgagggtacttcatatttaaacagagatatcgcatttgttctttctctgaggacaagagaaaaaagccaggttccacagaggacacagagaagtntgggttcctcctgggttctttntgccaactttccccacgttaaaggtgaacattggttctttcatntgctttggaagttttaatctctaacagtgaacaaagttaccagtgccttaaactctgttacacttttgggaagtgaaaactttgtagtatgataggttattttgatgtaaagatgttctggataccattatatgttccccctgtttcagaggctcagattgtaatatgtaaatggtatgtcattcgctactatgatttaatttgaaatatggtcttttggttatgaatactttgcagcacagctgagaggctgtctgttgtattcattgtggtcatagcacctaacaacattgtagcctcaatcgagtgagacagactagaagttcctagtgatggcttatgatagcaaatggcctcatgtcaaatatttagatgtaattttgtgtaagaaatacagactggatgtaccaccaactactacctgtaatgacaggcctgtccaacacatctcccttttccatgactgtggtagccagcatcggaaagaacgctgatttaaagaggtcgcttgggaattttattgacacagtaccatttaatggggaggacaaaatggggcaggggagggagaagtttctgtcgttaaaaacagatttggaaagactggactctaaattctgttgattaaagatgagctttgtctacttcaaaagtttgtttgcttaccccttcagcctccaattttttaagtgaaaatataactaataacatgtgaaaagaatagaagctaaggtttagataaatattgagcagatctataggaagattgaacctgaatattgccattatgcttgacatggtttccaaaaaatggtactccacatacttcagtgagggtaagtattttcctgttgtcaagaatagcattgtaaaagcattttgtaataataaagaatagctttaatgatatgcttgtaactaaaataattttgtaatgtatcaaatacatttaaaacattaaaatataatctctataataatttaaa

SEQ ID NO: 69350 - DNA, 1023 bp, Homo Sapiens
  misc_feature (536)..(536): n is a, c, g, or t
  misc_feature (544)..(544): n is a, c, g, or t
agctgttcctccagatagccatttgttcatttattaacaccagaggcaataacaacgctaaaaataaacatgcatcaattgtacaataaatacttacaaaaacctctgtctgtcacaattagtgagtgcaaacagaacttctacccaaccttagtgcatttttattttcacaagtaaaacagaaaaggaaaatagtgaatttaatgctattcagcacctttagtaaagtcaaaaaactcaacatctccatatatcaaaaacatttgcatctgtatcaccaaacatgtaaagttaattattttgttccatctttaacatgaattattttatttacattactttttagttcaataaattttaacaatatttaaaaattatctaaattcataaaagtatttcataaatttcaacatttaattattatgtacatataaggaagtccatgaaaaaagttaaaagaaaatgtagtcataaagttcaagcaacattaccaatttagcaaaaattccaaccaaatcaaggcagagggcattcanacattcanaaatctttatctgctgccaacatgtacaggaacatttccagtaataaaagtcagtatgagaaataatgttgaaatcaccagtagaaaatatatcttaataggcatgaaatatgtttaagcaacagtaatgactttatagaaaacttgtattacactgttttatatgaactacctggtttgattgtatgataaagttgtattttagaactacagaagttgatttcaaaaaatatattgtagcagccataattttatttccagttaaaacacagtaaaatgtgaaaagaaaaatttataattaactaaataatacccccagtattagaaaattttaaatcccatgctattctagcaataatggtctctaatataatgtagtctgatgtaagaattgtggaaagccaataataaacaatcagacacaggtatgggcttaaagtttcactgaaatacttaggtagcaaaatatatgaaaaagt

SEQ ID NO: 69351 - DNA, 1083 bp, Homo Sapiens
  misc_feature (50)..(90): n is a, c, g, or t
ctccgcgtccgctctctataagtgttcagtgttgacatagcctttgtgcnnnnnnnnnnnnnnnnnnnnnnnnnnnnnnnnnnnnnnnnntatattgtccatactgtaaataagtgtatgcttatttatttggggggaaaactatacattaaaggacctttgtcctaaagctctctcccaggccaccttgttactcattggacacggagaggcattcattgtgaggtctactggatgaggcccatagttgagacttgtagacatttatttatactgtgtcatgttttataatttatacataaaatgtctggttgactgtataccttgtttttgaagaaatttattcgtgaaaggaagagcagttgttatttattgtgaggtctcttgcttgtaaagtaaaagctttttttccttgtaaaccatttaagtccattccttactattcactcactcatctgtctcccttcatttcactgttagactcttttccactttcaacaaacttgcatgtcagtttctgtcatgtttatttattggattctctgctgcctgatctgtacatacatgatccctcgggttttgtttacaaggaaccttgactgaccaaaaggcattataactctgactcaaatacaaggtacagaagataagcatctttgaggaaactcctacttcagttcttttgttatgatgaagacatttgtgagagaggagatgattagaattctagtaatgtacttttaagatgttacagatacaaagaaatgatgtgggtgtcaggagactaaaggatgttgaaggctacacattcaaccttttgttaggtgtttcctttaagctactcagctgtaccttttaaattagttctttttcaaccagtatatcactaaaagttatatcaaagctttatcagttcaagtttcttgcttttcataatacttttttctgatgcaattttatattttcaaacatggcaagttaaaatataaattcatttaaatatatagttttgtacttttctaccatgtaaatgtgcaatgtatataaaagttataatgtgtatttgtaaataaatgatgagtg

SEQ ID NO: 69352 - DNA, 963 bp, Homo Sapiens
accaggctggtaccggtccggaattcccgggatatcgtcgacccacgcgtccgtggcgaacgaggttatcaagtgcaaggctgcagttgcttgggaggctggaaagcctctctccatagaggagatagaggtggcacccccaaaggctcatgaagttcgaatcaagatcattgccactgcggtttgccacaccgatgcctataccctgagtggagctgatcctgagggttgttttccagtgatcttgggacatgaaggtgctggaattgtggaaagtgttggtgagggagttactaagctgaaggcgggtgacactgtcatcccactttacatcccacagtgtggagaatgcaaattttgtctaaatcctaaaactaacctttgccagaagataagagtcactcaagggaaaggattaatgccagatggtaccagcagatttacttgcaaaggaaagacaattttgcattacatgggaaccagcacattttctgaatacacagttgtggctgatatctctgttgctaaaatagatcctttagcacctttggataaagtctgccttctaggttgtggcatttcaaccggttatggtgctgctgtgaacactgccaagttggagcctggctctgtttgtgcccgtctttggtctgggaggagtcggattggcgagttatcatggggctgcaaagtgggctggtgcttcccgggaacattgggtgggggaaatcaataaaagataaattttgccaggggcccaaagagtttgggagccccctgcactgggattagcccctcaggaattttattaaaccccatccagggaaagtgctccattggaaaattaaccgcaatggaaggagcggcacctattttccctcctcgaatggaaacttggccaactgggggaaagggtcccttgaaaaaaccaccaacctttgggaggggcatggtccaacaaaa

SEQ ID NO: 69353 - DNA, 1483 bp, Homo Sapiens
tgtaatatagaaccagtggtacaaaaaagcaggctggtaccggccggaatcccgggatatcgtcgacccacgcgtccggtgaacatggcgaacgaggttatcaagtgcaaggctgcagttgcttgggaggctggaaagcctctctccatagaggagatagaggtggcacccccaaaggctcatgaagttcgaatcaagatcattgccactgcggtttgccacaccgatgcctataccctgagtggagctgatcctgagggttgttttccagtgatcttgggacatgaaggtgctggaattgtggaaagtgttggtgagggagttactaagctgaaggcgggtgacactgtcatcccactttacatcccacagtgtggagaatgcaaattttgtctaaatcctaaaactaacctttgccagaagataagagtcactcaagggaaaggattaatgccagatggtaccagcagatttacttgcaaaggaaagacaattttgcattacatgggaaccagcacattttctgaatacacagttgtggctgatatctctgttgctaaaatagatcctttagcacctttggataaagtctgccttctaggttgtggcatttcaaccggttatggtgctgctgtgaacactgccaagttggagcctggctctgtttgtgccgtctttggtctgggaggagtcggattggcagttatcatgggctgtaaagtggctggtgcttcccggatcattggtgtggacatcaataaagataaatttgcaagggccaaagagttggagccactgaatgtattaaccctcaggattttagtaaacccatccaggaagtgctcattgagatgaccgatggaggagtggactattcctttgaatgtattggtaatgtgaaggtcatgagagcagcacttgaggcatgtcacaagggctggggcgtcagcgtcgtggttggagtagctgcttcaggtgaagaaattgccactcgtccattccagctggtaacaggtcgcacatggaaaggcactgcctttggaggatggaagagtgtagaaagtgtcccaaagttggtgtctgaatatatgtccaaaaagataaaagttgatgaatttgtgactcacaatctgtcttttgatgaaatcaacaaagcctttgaactgatgcattctggaaagagcattcgaactgttgtaaagatttaattcaaaagagaaaaataatgtccatcctgtcgtgatgtgataggagcagcttaacaggcagggagaagcgcctccaacctcacagcctcgtagagcttcacagctactccagaaaatagggttatgtgtgtcattcatgaatctctataatcaaggacaaggataattcagtcatgaacctgttttctggatgctcctccacataaataattgctagtttattaaggaatattttaacataataaaagtaatttctacatttgtgtggaaaaaaa

SEQ ID NO: 69354 - DNA, 1001 bp, Homo Sapiens
gggctccgtcgctgcgcggcccaccccggatgtcagccccccgcgccgaccagaatccgtgaacatggcgaacgaggttatcaagtgcaaggctgcagttgcttgggaggctggaaagcctctctccatagaggagatagaggtggcacccccaaaggctcatgaagttcgaatcaagatcattgccactgcggtttgccacaccgatgcctataccctgagtggagctgatcctgagggttgttttccagtgatcttgggacatgaaggtgctggaattgtggaaagtgttggtgagggagttactaagctgaaggcgggtgacactgtcatcccactttacatcccacagtgtggagaatgcaaattttgtctaaatcctaaaactaacctttgccagaagataagagtcactcaagggaaaggattaatgccagatggtaccagcagatttacttgcaaaggaaagacaattttgcattacatgggaaccagcacattttctgaatacacagttgtggctgatatctctgttgctaaaatagatcctttagcacctttggataaagtctgccttctaggttgtggcatttcaaccggttatggtgctgctgtgaacactgccaagttggagcctggctctgtttgtgccgtctttggtctgggaggagtcggattggcagttatcatgggctgtaaagtggctggtgcttcccggatcattggtgtggacatcaataaagataaatttgcaaggggccaaagagtttgggagccactgaaatgtatatacccctcagggattttcagtaaaccccatccagggaaagtgctccatggagaatgaccggatggcgggagtggactagtccctttgaaatgctactggcactgtgaacgcgcacgaaaagcagcaccttgaggccaggtcacaaggggacggggacgacgccaagggcgcggacgaactgccccagggacagaaatggcacgacgccata

SEQ ID NO: 69355 - DNA, 2021 bp, Homo Sapiens
  misc_feature (44)..(85): n is a, c, g, or t
  misc_feature (89)..(123): n is a, c, g, or t
  misc_feature (1260)..(1260): n is a, c, g, or t
  misc_feature (1437)..(1452): n is a, c, g, or t
  misc_feature (1567)..(1567): n is a, c, g, or t
  misc_feature (1574)..(1574): n is a, c, g, or t
  misc_feature (1759)..(1759): n is a, c, g, or t
  misc_feature (1830)..(1830): n is a, c, g, or t
  misc_feature (1856)..(1856): n is a, c, g, or t
  misc_feature (1896)..(1896): n is a, c, g, or t
ggaaaactgatcgactcactatagggcgctagcgcgtttatatnnnnnnnnnnnnnnnnnnnnnnnnnnnnnnnnnnnnnnnnnnccgnnnnnnnnnnnnnnnnnnnnnnnnnnnnnnnnnnncagtcgacggtaccggacatatgcccgggaattcggccattacggccgggggtcctaagatggctgctgggcgaccacttcctgacagctccagttaatgggactgccagcaggctagacatccttcgccggaatgtgcagcgcttagttctgtgcccgggaggggcttctctctcttttgggattggagtgtggcattgccgccagaaagcctgcagaattccgggttgtgcagccaagcaggaacggtgtacctttctagacccatcctcttgcaatcttggaccctaagaaaagatgtggagtgggctgctacctcctggcctaaatgaaagtgacgctgagtcaaactcggaagatgaagctacgttggagaactctggacttaacttacaggaagataaagaggatgagagcatcagaaaaacagaaatcatagatttctcaacagatgaaccaaaaactgaaacagagtcaaatgtaaatgcctatgaagagtgtccttctggaattcccatagatatgtggaataaatttcaagaattgcataaaaaacattctgaacagaaaagcacaacctcaagattcagagggaaaagaagaaaacgctccagaaaagataaattgaagaatgaaaaagaattacatagtgaaccgtcctcaaatgaaacccagtggaaagagcttactcagtattttggagtcaatgatagatttgacccgcctgttaaaaggaaaaaagttgagaagtcaggccttgaaaagaggatagaccaggctgtggaggagtggaatattgagaaggctgaggaactcagcaaccagctagctactcgagagcttggtgtaaaaattgccaaagcagttgcctgccacaactttgtaaaagccaaaaaggaggttgaaaattcacaggctgcccgaaaaaagaagaaacttgcatgggggtttgaagcaaagaagagatgggaaaccaaaagcaacatgggatacatgtaacttgccagagtgcttcaagacatttgtagactcaaatgctcaatttactgagaatgttttcctgcctatgttaatatgtcagaaaattgatagcactaaaacaaaaataagcataaaatttgggattttgattatccnacaacctccccccaaacccaacacaacaaacaccctacccccacctcgccaaacgcacaaaacatccgccccattcctcctcccccaacccacaaaccaccacaaaacctctctttgctgcggccctcctcccccctcaaaaagatcctctctcaaccacttctcttttcttgcggnnnnnnnnnnnnnnnnttccgtcaccggtgaccacccgcgcccacctctattcgtctccctcccaagaaaagaacacaccgggggaccgtcacacgaaaacacaaggcgcgctgtggacatatcctcccgnacccacnaacaacaacacaaaacaccacccccgcgccgggtgggggcgcataccaaccacagaggcccgttttttccttcgaaaccaaaccacccctccagacacaagggcgggtctcccctgcctgcgggtggggccctcttctctcggtggcgcagctttctcctacagccccgcgccggggggcgcccnctccggagcgcggacgccgtcctccacgatacttcctaaaacatttatgtcccccgccacccgacgcggcngccgatcctatatccgtacgaacganaatatggcgtcggggggatacattctcgtccataagcacnatattctccctcgtgccccacttactgcgcaagacagtactctccctccccaccaatcggtgcggtgtgttgctgaacaccccgctcccacctatcccgcacaccgtgcgcgttattaagcccta

SEQ ID NO: 69356 - DNA, 1564 bp, Homo Sapiens
  misc_feature (365)..(393): n is a, c, g, or t
  misc_feature (473)..(487): n is a, c, g, or t
tggctagagtttccactatcccaatcaaagaattacagtacacatccccagaatccataaatgtgttcctggcccactctgtaatagttcagtagaattaccattaattacatacagattttacctatccacaatagtcagaaaacaacttggcatttctatactttacaggaaaaaaaattctgttgttccattttatgcagaagcatattttgctggtttgaaagattatgatgcatacagttttctagcaattttctttgtttctttttacagcattgtctttgctgtactcttgctgatggctgctagattttaatttatttgtttccctacttgataatattagtgattctgatttcagnnnnnnnnnnnnnnnnnnnnnnnnnnnnncctcatgtaacattggtgaaggatccaggaatatgacacaaaggtggaataaacattaattttgtgcattctttggtaannnnnnnnnnnnnnngtaactacaaagctttgctacaaatttatgcatttcattcaaatcagtgatctatgtttgtgtgatttcctaaacataattgtggattataaaaaatgtaacatcataattacattcctaactagaattagtatgtctgtttttgtatctttatgctgtattttaacactttgtattacttaggttattttgctttggttaaaaatggctcaagtagaaaagcagtcccattcatattaagacagtgtacaaaactgtaaataaaatgtgtacagtgaattgtcttttagacaactagatttgtccttttatttctccatctttatagaaggaatttgtacttcttattgcaaggcagtctctatattatgtcttcttttgtggtgtcttccatgtgaacagcataagtttggagcactagtttgattattatgtttattacaatttttaataaattgaataggtagtatcatatatatggaattaaattgatgtggctatctttgtttttttataaagtaaggcacagtcattcagtcttaggtaaataatgtactctcttaatatgttaatactcatgagaattgggatctgatgcatcaccatttgattggtagcaacagtggttgtaaaacttggttgctgaattgagttgtttctatgttaagtgtcaaaatgatagtgtagggaaagtacaggtggtggggacatatgcattaagaatcttgttagtgttgcaatctaaatagaatggaataaacaggtgttaagacatatttatagtggtaaattgttgtagtatggtattctgtaaacttgaaaacttgatctactctttgtaggtatcatttgaaagcaaacttgaaaatgttttgtacatagtacatacttgtatagtcctgtgagatgaagtatggctatcagaccaaaggataagccaaactgtaggtagcagaatggaaattattattttgagaggaaaatttgtctttgaatggtgattatgacttaatcattttaaaactgataaacttgacaaaaaccctgtatgaaataaacatgaaattaatagcactg

SEQ ID NO: 69357 - DNA, 373 bp, Homo Sapiens
  misc_feature (157)..(157): n is a, c, g, or t
  misc_feature (293)..(327): n is a, c, g, or t
accacagcacaataagtaagtaatacagagtgttagaatcgagcataacgatacacaacatggcagtctcagtctagttagacatgagatcatgatgggacgttttctatactcgacaattatgtgtaggagatcacgcaaacatagatcactgatntgaatgagatgcataaatgtgtagcacagctttgtagttacaaaaaccaacaaagattaccaaagaatgcacaaaattaatgtttattccacctttgtgtcatattcctggatccttcaccaatgttacatgaggnnnnnnnnnnnnnnnnnnnnnnnnnnnnnnnnnnntcagaatcactaatattatcaagtagggaaacaaataaattaaaat

SEQ ID NO: 69358 - DNA, 465 bp, Homo Sapiens
  misc_feature (363)..(398): n is a, c, g, or t
tttttggctagagtttccactatcccaatcaaagaattacagtacacatccccagaatccataaatgtgttcctggcccactctgtaatagttcagtagaattaccattaattacatacagattttacctatccacaatagtcagaaaacaacttggcatttctatactttacaggaaaaaaaattctgttgttccattttatgcagaagcatattttgctggtttgaaagattatgatgcatacagttttctagcaattttctttgtttctttttacagcattgtctttgctgtactcttgctgatggctgctagattttaatttatttgtttccctatttgataatattagtgattctgannnnnnnnnnnnnnnnnnnnnnnnnnnnnnnnnnnnctcatgtaacattggtgaaggatccaggaatatgacacaaaggtggaataaacattaattttgtgca

SEQ ID NO: 69359 - DNA, 975 bp, Homo Sapiens
  misc_feature (50)..(50): n is a, c, g, or t
  misc_feature (234)..(297): n is a, c, g, or t
  misc_feature (522)..(546): n is a, c, g, or t
  misc_feature (574)..(590): n is a, c, g, or t
ttgtagactgtagtttattgattagttcaagcccatcacgaactaattanacatattgttggtaaaaacagagattgaaattactgtttttatcatatttaaatccctctggtgtatttattgaaatttaattaaaaatatttctacatattgatttgaagccaggatattgatggacctacagatttaacagctcttcaaagttttaactagcattataaaatggcctattcnnnnnnnnnnnnnnnnnnnnnnnnnnnnnnnnnnnnnnnnnnnnnnnnnnnnnnnnnnnnnnnnagtgcagtttggcacctctcttccaggccttcctaagtttttgttagttgtgtcttcgaatttattgtagttcaccgctggtcagtaatctggttcataaggaagctggggcagtgaaaaacacttcgttgatccatccagccctaaagttcattgactaatagctcatgcatcttattaaatgggattctggacttctacaatagtgtggaaagccacatcacnnnnnnnnnnnnnnnnnnnnnnnnngccagtgcctattgagtatatcaaaccnnnnnnnnnnnnnnnnngttttaagaggggtcaggctggcagataaaagtctcttatgaagcagatataaatccagtaagctatttttttctacctatgggcaagttcataagtcattgctggatctgaaccagtgttcttttgtgttaagtacaaccatatttcagtcagtccagaggcagttaaccctgtagcacttactagactggtgacaactggctggatgtggagaataagtgtcaaaacctggcttcaatgtctatttcttatgtctaatggagttcttatattacagtgtttgtttagctatggttactaatatgtttgttatatttattttcggggagaggatcttgttattgtttcctgagattatttaaaatgttttttctttgatgtaaa

SEQ ID NO: 69360 - DNA, 2191 bp, Homo Sapiens
  misc_feature (69)..(69): n is a, c, g, or t
  misc_feature (124)..(214): n is a, c, g, or t
  misc_feature (222)..(309): n is a, c, g, or t
  misc_feature (321)..(321): n is a, c, g, or t
  misc_feature (337)..(337): n is a, c, g, or t
  misc_feature (340)..(373): n is a, c, g, or t
tacctataccgccttgatgagtgtacgctcccgcacccgacgaccagccagcgatcatgagcgagagcnggagagcgccatacgcaaacgcttttcccgcgcgtgccgattcattatgcagctnnnnnnnnnnnnnnnnnnnnnnnnnnnnnnnnnnnnnnnnnnnnnnnnnnnnnnnnnnnnnnnnnnnnnnnnnnnnnnnnnnnnnnnnnnnccggctcnnnnnnnnnnnnnnnnnnnnnnnnnnnnnnnnnnnnnnnnnnnnnnnnnnnnnnnnnnnnnnnnnnnnnnnnnnnnnnnnnnnnnnnntgcccctcgagnccaagattcgcacganggnnnnnnnnnnnnnnnnnnnnnnnnnnnnnnnnnntataacgagggataaatttttggtggtgatagtgtcccagtacaaaaaggctgtaagatagtcaaccacagtagtcacctatgtctgtgcctcccttctttattggggacatgtgggctggaacagcagatttcagctacatatatgaacaaatcctttattattattataattatttttttgcgtgaaagtgttacatattctttcacttgtatgtacagagaggtttttctgaatatttattttaagggttaaatcacttttgcttgtgtttattactgcttgaggttgagccttttgagtatttaaaaaatatataccaacagaactactctcccaaggaaaatattgccaccatttgtagaccacgtaaccttcaagtatgtgctacttttttgtccctgtatctaactcaaatcaggaactgtattttttttaatgatttgcttttgaaacttgaagtcttgaaaacagtgtgatgcaattactgctgttctagcccccaaagagttttctgtgcaaaatcttgagaatcaatcaataaagaaagatggaaggaagggagaaattggaatgttttaactgcagccctcagaactttagtaacagcacaacaaattaaaaacaaaaacaactcatgccacagtatgtcgtcttcatgtgtcttgcaatgaactgtttcagtagccaatcctctttcttagtatatgaaaggacagggatttttgttcttgttgttctcgttgttgttttaagtttactggggaaagtgcatttggccaaatgaaatggtagtcaagcctattgcaacaaagttaggaagtttgttgtttgtttattataaacaaaaagcatgtgaaagtgcacttaagatagagtttttattaattacttacttattacctagattttaaatagacaatccaaagtctccccttcgtgttgccatcatcttgttgaatcagccattttatcgaggcacgtgatcagtgttgcaacataatgaaaaagatggctactgtgccttgtgttacttaatcatacagtaagctgacctggaaatgaatgaaactattactcctaagaattacattgtatagccccacagattaaatttaattaattaattcaaaacatgttaaacgttactttcatgtactatggaaaagtacaagtaggtttacattactgatttccagaagtaagtagtttcccctttcctagtcttctgtgtatgtgatgttgttaatttcttttattgcattataaaataaaaggattatgtatttttaactaaggtgagacattgatatatccttttgctacaagctatagctaatgtgctgagcttgtgccttggtgattgattgattgattgactgattgttttaactgattactgtagatcaaccctgatgatttgtttgtttgaaattggcaggaaaaatgcagctttcaaatcattggggggagaaaaaggatgtctttcaggattattttaattaatttttttcataattgagacagaactgtttgttatgtaccataatgctaaataaaactgtggcacttttcaccataatttaatttagtggaaaaagaagacaatgctttccatattgtgataaggtaacatggggtttttctgggccagcctttagaacactgttagggtacatacgctaccttgatgaaagggaccttcgtgcaactgtagtcatcttaaaggcttctcatccactgtgcttcttaatgtgtaattaaagtgaggagaaattaaatactctgagggcgttttatataataaattcgtgaaga

SEQ ID NO: 69361 - DNA, 1494 bp, Homo Sapiens
  misc_feature (88)..(111): n is a, c, g, or t
  misc_feature (116)..(135): n is a, c, g, or t
  misc_feature (252)..(269): n is a, c, g, or t
  misc_feature (628)..(674): n is a, c, g, or t
  misc_feature (850)..(889): n is a, c, g, or t
  misc_feature (1394)..(1394): n is a, c, g, or t
  misc_feature (1426)..(1446): n is a, c, g, or t
cttagtcaaaaaaggcaacagatgttttattcttcaatgcaaattactgtattcaccacaagctaaagaagagaacatgtatcctacnnnnnnnnnnnnnnnnnnnnnnnnttttnnnnnnnnnnnnnnnnnnnngatttatggaagactaaagacacggaaaaaaatccagcaccccaacatgtacagccaggaaggaaatcagttctgtaataggacaggtataatgaactacaaacaagaaggggtggnnnnnnnnnnnnnnnnnntgtgcattgagtttaagacactgtaaaactcagaagacatatttactattcaagtataaactctgtaaggacttggcataaattgaaaggcagctgctgaggtacaccattataaaagaagttctatgaatttacaattctaccttccaatttcctgggagaaaaaaccaaactcttgaaggtcttcaccagagaccctgagagggattaacacttttgatgaagacatagtcaataattcatgattgaactattcaaaaacatgtatttatttagaacaatagaaatacgtgttctcagactgtcctctagagtttttgagactattagttcaagagtttcaaagtatattacttgtnnnnnnnnnnnnnnnnnnnnnnnnnnnnnnnnnnnnnnnnnnnnnnntctgatttgatggtaccttgaaaataccctaaataccaaattttctccaacctaacattacagctaatttaagaattcctccttcattggtaaaacattttttcctcattaaatgtgggtactgaaattggatagaaacactatgaatgtgaaaataccaccaattttctgcagtnnnnnnnnnnnnnnnnnnnnnnnnnnnnnnnnnnnnnnnncctagaatgttctttggaatcactgaaatatcacaaacttgggttttttcttacagtctgtgcaccttctttcaggttctctgttttgcttgtagtactgactgtgtgattctaatttttatagattcaagtcttgcaatgcaatatccatgcttgacacaccggtgtctctgaccagtgagaagttatgcataacccagaaacgctgtcatttacatctccataaagacttctgccccaaataaaaacttcagaatgacacaacacatcctgtgttaaacaatcaaatgaacccaacaagggggattccagtgtgatttcagtacttgggagggcattgtctgctatggtttctcatggaagtaccacaggcctggctgctagcattcagctttccttggccttaaaagggattttctcagggctggcaagttggattagattctaagagaattttgtctttgacaaactaccatttttagcataaaatctggccatggctatnagtttcaatgtgtgtacaactgattagagagnnnnnnnnnnnnnnnnnnnnncaacattggctggaattgagtagaaaaatccacgatgctcttcactcg

SEQ ID NO: 69362 - DNA, 1052 bp, Homo Sapiens
gctggtaccggtccggaattcccgggatatcgtcgacccacgcgtccgggcgatgggactaatgtgcggacgccgggagcttctgcgcttgctacagtccgggcgtcgggtccacagcgtcgcagggccctcgcaatggcttgggaaaccgctgaccacacggctcctattcccagtagccccgtgctgctgtcgcccacactacctcttccttgcggcttccggcccccgcagcctcagtacctctgctatctcttttgcagaagtccaggttcaggcccctcctgttgttgctgcaactccctcacccacagcagtacctgaggtggcttctggagagactgcagatgtagtccaaactgctgcagagcagagcttcgctgaactggggctggggtcatacaccccagtgggactgatccagaatttactggaatttatgcatgttgatctgggcctaccttggtggggggccattgctgcatgtacagtctttgcccgctgcctgatttttcctctcatcgtgacgggccagcgagaggcagccaggatccacaatcacttgccagagatccagaagttttccagtcgaatcagagaggccaagttagcaggagaccatattgagtattacaaggcttcctcggagatggcactttaccagaaaaaacatggtattaaactctataaacctctcattctccctgtgactcaggccccaatcttcatctccttcttcattgctttgagagagatggccaaccttcctgtgcccagcctgcagacaggtggcctctggtggttccaggatctcacggtatccgatcccatctacatattaccactggcagtcactgctacaatgtgggctgttcttgagctaggtgctgagacaggtgtgcaaaggttctgaccttcagtggatgagaaatgtcatcagaatgatgccccctgataaaccttgccccataaaccatgcattttcccccacggcagtgggtttaatgtacctgggctctcccttcccaatttggttttccccctggtcccac

SEQ ID NO: 69363 - DNA, 882 bp, Homo Sapiens
ccgtctaggtagcgaggcctgggtgacgaattccgcacgagggactaatgtgcgtgacgccgggagcttctgcgcttgctacagtccgggcgtcgggtccacagcgtcgcagggccctcgcaatggcttgggaaaccgctgaccacacggctcctattcccagtagccccgtgctgctgtcgcccacactacctcttccttgcggcttccggcccccgcagcctcagtacctctgctatctcttttgcagaagtccaggttcaggcccctcctgttgttgctgcaactccctcacccacagcagtacctgaggtggcttctggagagactgcagatgtagtccaaactgctgcagagcagagcttcgctgaactggggctggggtcatacaccccagtgggactgatccagaatttactggaatttatgcatgttgatctgggcctaccttggtggggggccattgctgcatgtacagtctttgcccgctgcctgatttttcctctcatcgtgacgggccagcgagaggcagccaggatccacaatcacttgccagagatccagaagttttccagtcgaatcagagaggccaagttagcaggagaccatattgagtattacaaggcttcctcggagatggcactttaccagaaaaaacatggtattaaactctataaacctctcattctccctgtgactcaagccccaatcttcatctccttcttcattgctttgagagagatggccaacctttcctgtggccccagctgcaagaaggtgggccctctgggtgggttcccagggaatctcacgggggaatcccggatcccccattctaaccatatttaaaccacctgggccaggtccacttgccctaacaaa

SEQ ID NO: 69364 - DNA, 1507 bp, Homo Sapiens
aacttacggctaggtagcgaggcctgggtgttgtgaatcggcacgaggggcgatgggactaatgtgcggacgccgggagcttctgcgcttgctacagtccgggcgtcgggtccacagcgtcgcagggccctcgcaatggcttgggaaaccgctgaccacacggctcctattcccagtagccccgtgctgctgtcgcccacactacctcttccttgcggcttccggcccccgcagcctcagtacctctgctatctcttttgcagaagtccaggttcaggcccctcctgttgttgctgcaactccctcacccacagcagtacctgaggtggcttctggagagactgcagatgtagtccaaactgctgcagagcagagcttcgctgaactggggctgagcaaaaacaccccagtccttgactcatccagaacccactgaaatttactctcagtgttgcatctggcccaggtaccctaaaaaacagccagtgctgcatattacaaggctttcccggagatggcactttaccagaaaaaacatggtattaaactctataaacctctcattctccctgtgactcaggccccaatcttcatctccttcttcattgctttgagagagatggccaaccttcctgtgcccagcctgcagacaggtggcctctggtggttccaggatctcacggtatccgatcccatctacatattaccactggcagtcactgctacaatgtgggctgttcttgagctaggtgctgagacaggtgtgcaaagttctgaccttcagtggatgagaaatgtcatcagaatgatgcccctgataaccttgcccataaccatgcatttccccacggcagtgtttatgtactggctctcctccaatttgttttccctggtccaagtatcctgtctccggattccagcagtacgcactgtacttaaaatcccccagcgtgttgtacatgacctggacaaattacctccacgggaaggcttcctagagagcttcaaaaaaggctggaaaaatgctgaaatgacgcgtcagctgcgagagcgtgaacaacgcatgcggaatcagttggagctagcagccaggggtcctttacgacagacctttacccacaaccctctcctacaacctggaaaggataaccctcccaatatccctagcagcagcagcaaaccaaagtcaaagtatccctggcacgacacacttggctgacttatgttctgtgcgcattctggcaggaattctgtctcttcagagactcatcctcaaaacaagacttgacactgtgtccttgccccagtcctaggaactgtggcacacagagatgttcattttaaaaacggatttcatgaaacactcttgtacttatgtttataagagagcactgggtagccaagtgatcttcccattcacagagttagtaaacctctgtactacatgctgcttcctgatacttattgaacagggaaatgagtgtgcacttcagaaaactgaagaata

SEQ ID NO: 69365 - DNA, 962 bp, Homo Sapiens
ccatcggcagtagaggcctcgtgttaatcggcacgaggggcaaatggcgattggactaatgtgcggacgccgggagcttctgcgcttgctacagtccgggcgtcgggtccacagcgtcgcagggccctcgcaatggcttgggaaaccgctgaccacacggctcctattcccagtagccccgtgctgctgtcgcccacactacctcttccttgcggcttccggcccccgcagcctcagtacctctgctatctcttttgcagaagtccaggttcaggcccctcctgttgttgctgcaactccctcacccacagcagtacctgaggtggcttctggagagactgcagatgtagtccaaactgctgcagagcagagcttcgctgaactggggctggggtcatacaccccagtgggactgatccagaatttactggaatttatgcatgtagatctgggcctaccttggtggggggccattgctgcatgtacagtctttgcccgctgcctgatttttcctctcatcgtgacgggccagcgagaggcagccaggatccacaatcacttgccagagatccagaagttttccagtcgaatcagagaggccaagttagcaggagaccatattgagtattacaaggcttcctcggagatggcactttaccagaaaaaacatggtattaaactctataaacctctcattctccctgtgactcaggccccaaatcttcatctccttcttcattgctttgagagagaatgggcaaccttcctgtgcccaggctgcagacaggtgggctctgggtggtcccagggatctcacgggtatcccgatcccatctttcatattaccactgggaggccccgctaccaatgtgggccgtcctggagactcagtgcttgcgaacacggtggccagtccttagcctcaggggtgagaaagttttcaaaaggatgcgcggaaaagg

SEQ ID NO: 69366 - DNA, 612 bp, Homo Sapiens
  misc_feature (354)..(375): n is a, c, g, or t
tgaaaataatgtatattattttacctattagattctgatttgatatacaaaggactaagatattttcttcttgaagagacttttcgattagtcctcatatatttatctactaaaatagagtgtttaccatgaacagtgtgttgcttcagactattacaaagacaactggggcaggtactctaatataaaggacaggtggtgtttctaaataattggctgctatggttctgtaaaaaccagttaattctatttttcaaggtttttggcaaagcacatcaatgttagactagttgaagtggaattgtataattcaattcgataattgatctcatgggctttccctggaggaaaggnnnnnnnnnnnnnnnnnnnnnnaagaacttgaaacttgtaaactgagatgtctgtagcttttttgcccatctgtagtgtatgtgaagatttcaaaacctgagagcactttttctttgtttagaattatgagaaaggcactagatgactttaggatttgcatttttccctttattgcctcatttcttgtgacgccttgttggggagggaaatctgtttattttttcctacaaataaaaagctaagattctatatcgcaaa

SEQ ID NO: 69367 - DNA, 1014 bp, Homo Sapiens
  misc_feature (91)..(91): n is a, c, g, or t
  misc_feature (109)..(109): n is a, c, g, or t
  misc_feature (212)..(220): n is a, c, g, or t
  misc_feature (247)..(247): n is a, c, g, or t
  misc_feature (259)..(259): n is a, c, g, or t
cgattaatcgatcctatagaattgcctcgagcccagattcgcacgagtaaaagagcccagaatactgtatcagtgcacagaagcaggtaanaaacaaaagcacagtgtncgctgcagtttccatttgtttaataccacgcaatcttcaacactcgtgcgtggcgcgcacacagagctaccctgacttgctctgcttgagtcatgcagttacnnnnnnnnngacatcctgacacccacacaatatctnaatcaaaacctntcagtttcaatctggatatttaaaaacattggcagaagcctctgtgagtttagttccactaagatgtttcacctgccttatcaagaccattctcagtctacttttttaagctaccgtatcttaaattattgaaaatttattaattgctgaatatataataacctttgcttgtatgtaaccgaaaatggtttaagagccaacatttagagtatgacaatggagctgaacagtttttaatgcgcaagcagttctgttcttgtgtatgacttgtaaccttaatttactgtgtaaagatggttacattatttccttagctttgtttgttggagacaaatagagaatgcttgttaagtatgtcaaaacaatcttatcttgtgaatttttgttaatgtattatacgagctatatttttcatttgcccagaaagacagcttgtataacgcttttggaagtttctgctctgtaatgtctttagagctgacagtctgttaggtttgtttttttcttcatgctaaagtgtcagttggtggttttgtgaactggtcaaaaattcacaggtcttaaatgttttgggggaaatttatattggacactgctctttgtctagcaaataaaagatgttaatatattcctgttactggcatgtgcacgactatgttattagaagccactttatcattttcctgctttaaatagaaatgtctatttatgaattctgcttgtagttttttcacaaataaaatagtaaaatttaa

SEQ ID NO: 69368 - DNA, 777 bp, Homo Sapiens
gcctcgttcacatatgtcatatcacgttcatctttccggctctaaatgactaaaaagcacccacagagcctgcaccgtgctcctggatggtttcctctgaccgtatgtcctccccttctctctctgtgatctgctgcccctactctgcacctagtcctcagaagcaccgggccctgcacagacagctctatgctcccaggacatgcctccctgcagatgaacacatggccgagtctgtcacattcttccgatctttcctcaaatacctcccaccccacaaggtcttccctggccaccgagctagacttgcacctcctacagcactctctgttcccctgagcctggccaccaagctagacttgcacctcccacagcactctctgttcccctgagcctcttcaggtttctttttagcacactgagcacattacatatttgacttatttatcgtgtttattttctgtatcttctccctacaatgtaagctgcgtgaggacagagactctgttttattccttgtgatatacgcaggacctagaacagcaactactcagagcagacactaagtaaatattgattgatgattgattgattaaggaatctgtctacccatctaccatccagtggtcaacactacaccaacaaccctccttcctttctcttatccaccaatcttagccatccaaaacacatcataaattcattgatctacctgttccacccattcagcatatggatctgtcccagccatccagcatccgttactatatccagccg

SEQ ID NO: 69369 - DNA, 1868 bp, Homo Sapiens
cagtcgacggtaccggacatatgcccgggaattcggccattacggccgggatcagtgtgccagtacaagaagatgagctttccaaagtagaggagagttctgaaatttctccagagccaaaaacagaaatgaagaccctgagatgggcaatttcacaatttgcttcagtagaaaggattgtaggagaagataaatatttctgtgaaaactgccatcattatactgaagctgaacgaagtcttttgtttgacaaaatgcctgaagttataactattcatttgaagtgctttgctgctagtggtttggagtttgattgttatggtggtggactttccaagatcaacactcctttattgacacctcttaaattgtcactagaagaatggagcacaaagccaactaacgacagctatggattatttgcggttgtgatgcatagtggcattacaattagtagtgggcattacactgcttctgttaaagtcactgaccttaacagtttagaactagataaaggaaattttgtggttgaccaaatgtgtgaaataggtaagccagaaccattgaatgaggacgaagcaaggggtgtggttgagaattataatgatgaagaagtgtcaattagagttggcggaaatacacagccaagtaaaatttttgaacaaaaaaaatgtagaagctattggacttcttggaggacaaaagagcaaagcagattatgagctatacaacaaagcctctaatcctgataaggttgctagtacagcgtttgctgaaaatagaaattctgagactagtgatactactgggacccatgaatctgatagaaacaaggaatccagtgaccaaacaggcattaatattagtggatttgagaacaaaatttcatacgtagtgcaaagcttaaaggagtatgaggggaagtggttgctttttgatgattctgaagtcaaagttactgaagagaaggactttctgaattctctttccccttctacatctcctacttctactccttacttgctattttataagaaattatagagtgagtgtattttccttgtgtatatattaaacacacccatacaaacattggtaaagttgataacatcaaagaatctttagcttatcttttgaagctactggatattattggtctctctaggtttttatataaatagtgaaatctgaattactgaaaaccatgttaatttttagaactcattttcctcagtagagactagtgatgcattagcttctgggaacaaacttgtatcggttcttaattaaattatccaaaacggaggcatttaaacacttggatttacaccagtcttttgtgtttgctttttaaaataaagtgctcgtatttgtattctccatattttggagtaattatctacatgatgtttatagttcctgtggtttttcacccaagaagcagaatctcattcagtacatttagttttataagagtcatgaagctaaatccttgggctatgtcagaggcacaaagtctagaatgtgtgtattcacaatggtgtatgtacattttgtgccttgattcacttagaagtgtctcagaaaacctggacagttcgcttctacacaagaattttatatgtatttatgaagatgattctgtaccctagtatatctttttgggcatggactaatttgtatctgtttaactcatattctgcacgatctgtatatagtacatcaaacttagaggtgtgaccttaaatttaactttttttaaaaactgggaggtcaataaaatttaaactgcttaactatgtatatgaatatttgaattttttacttgtatatttttataaatacagctgagttttcttaaagcgaaa

SEQ ID NO: 69370 - DNA, 635 bp, Homo Sapiens
  misc_feature (85)..(108): n is a, c, g, or t
caaaatatattagatttggtttttattgtagagcacacatatcagggcgaagtgctgcacacacaactacaaatcatttttgggnnnnnnnnnnnnnnnnnnnnnnnnctgcaactgctttaattatgcagtcccgacttgagaaatccacgctggcaaaggagttctggcccctgagaggggcttcttgatggtggctgccccagatttctgcagcctatgaggtctcagacccggacctctgtacacaaagcccccaaagtggtggtatcctggttgctgggagggcctctgctcttggcaagcccgggtcctggcctggctgacaagaagacattcctaatgaatctagatccacaaaaccttgctgccttccaggatctgagtggatagaagctaccaaagactttacctttttttccttattattttttgaaagccccttcaccaactcccataccctgaagcggaggaggcaccagcccagtctgcaggcctgagctctggccttggatgcatgctgccggcagacaagatggggcaggcgccttcctagaaggatgacatgaggatgaggcccaagctggccagtggagaagggaagggaaaggaaaaagccaggagactaaaggggg

SEQ ID NO: 69371 - DNA, 2713 bp, Homo Sapiens
  misc_feature (350)..(359): n is a, c, g, or t
  misc_feature (361)..(370): n is a, c, g, or t
  misc_feature (373)..(374): n is a, c, g, or t
  misc_feature (466)..(489): n is a, c, g, or t
  misc_feature (984)..(1048): n is a, c, g, or t
  misc_feature (1819)..(1876): n is a, c, g, or t
ccccggggttaatggggattaatcccgcccccatagggaaattttaaagggttctttcttggaaaaatttttttggggggaaaattttccaagatttttaccggggttgaaaaccagtttgaatttaaccccttggggcacccaaattattttcagctttttttaactttcaccagcgttttgggtgggggcaaaacaggaaggcaaaaatgcgccaaaaaaagggataaagggcgacaccgaaaatgtggaatactcatactcctcccttttcaatattaatttaccctcactaaagggacctaactataacggtcctaaggtagcgagcggccgcgataaggccattnnnnnnnnnntnnnnnnnnnnttnntttttttcaaaatatattagatttggtttttattgtagagcacacatatcagggcgaagtgctgcacacacaactacaaatcatttttgggnnnnnnnnnnnnnnnnnnnnnnnnctgcaactgctttaattatgcagtcccgacttgagaaatccacgctggcaaaggagttctggcccctgagaggggcttcttgatggtggctgccccagatttctgcagcctatgaggtctcagacccggacctctgtacacaaagcccccaaagtggtggtatcctggttgctgggagggcctctgctcttggcaagcccgggtcctggcctggctgacaagaagacattcctaatgaatctagatccacaaaaccttgctgccttccaggatctgagtggatagaagctaccaaagactttaccttttgtgccgtaggatgttttttgaaagcccccttcaacaactcccataccctgaagcggaggaggcaccagcccagtcttgcaggcctgagctctggccgtggatgcatgctgccggcagacaagatggggcaggcgccttcctagaaggatgacatgaggatgaggcccaagctggccagtggagaannnnnnnnnnnnnnnnnnnnnnnnnnnnnnnnnnnnnnnnnnnnnnnnnnnnnnnnnnnnnnnnncctaccacgcaccacacaattttccataccccaatgctagacttggaaggacaccagtccctctagctagaaacaatttctaaaactgacccaacgtggcaagtctaactgttccaaataatcacacgcatatgctcaaaaggagcaaccagcaaagaagtgtgctcgttgataagagaggtcaggaccactgcactagcccctcagcagcccaaggaactgtggacatggcaggctagtgggcgtgggtggaggacgcctggggggcttaacaatagctttgggatggcaggggctggcactgtttaagcccctgcccaggcaacctgaacaactctgccgcaggaggaagaaagggtgtttgcatgagcttgcagggcgtggatggcaggtgagaagtggagaacagcagagcctgtgaggctccaggagacctcaaccaagtgcagacatcagtgagggaaaggggcgagcagaagactgaactttgtttagaacactgcgaagatttacactgaaagcaaaataattttcttaaccaaaacattttgttgcttttaaataaacccagcctgatacagccccacttaaaagatggctgctctgctccaccacctctactggccactccagcatcagcctctgtcccctattgatgccaacagcctttccatccaggaggaataccaagaatatgagaacctaggtcctggccaattctattcttcagccttaacaggcaacaaaaccaaggaaaaatatatagaatcnnnnnnnnnnnnnnnnnnnnnnnnnnnnnnnnnnnnnnnnnnnnnnnnnnnnnnnnnnggaggggcaactacgtaaggatgagccagagttcccaggagggcggcgggtagactcagtgccgccgcatcttcacctttcgggcagggctgcctgctgcctcagagcagtcctctgaggactcgtatgacttgcgccagtagttctcagagctgaagctacccctccgccggtgtgtgggcagcagcaccgagcgccggttctcttccttgtccatctccaggatccgtggcctgtgggcagcatcagggtctgccttgcggtgggaccgcttgggtttcagagcagggtccctgttgtttcctgacaggcgatctgaagcatagctgggtggtaacacggagctgctcagggactttgtttccaaccggggtgcatctaatcttgtcttcctgaggatgatgactgctcggcgctccttgatgtcctgaggccgtatgcagtgagtgatttcatcagcagcatatccactgagcacagtcacgcttcccctgcgcaccggcagggaaagcactggttccgacacccgaataggcttgaactggaacttgcagccgaagcacagcgcagagtcgctaaagaaggacacggacacgatggggcgctcgaagatgtggatggggtccacgtgagacacgatgcagccgccgggctggtagtcgttgatgacggcgctgttgacgaagccctcggggatgacgcgatgctccaccagcttttggatcaccagctggtgcacccactcggggatctcgtccacgtcgcccggcgggtagaggcgctcctggcccggacgcgtgggtcgacgatatcccgggaattccggaccggtaccac

SEQ ID NO: 69372 - DNA, 1258 bp, Homo Sapiens
  misc_feature (602)..(672): n is a, c, g, or t
  misc_feature (831)..(851): n is a, c, g, or t
  misc_feature (1157)..(1180): n is a, c, g, or t
ggcttttaagtggggctgtatcaggctgggtttatttaaaagcaacaaaatgttttggttaagaaattattttgctttcagtgtaaatcttcgcagtgtcctaaacaaagttcagtcttctgctcacccctttccctcactgatgtacgcacttggttgagggtctcctggagcctcacaggctctgctgttctccacttctcacctgccatccacgccctgcaagctcatgcaaacaccctttcttcctcctgcggcagagttgttcaggttgcctgggcaggggcttaaacagtgccagcccctgccatcccaaagctattgttaagccccccaggcgtcctccacccacgcccactagcctgccatgtccacagttccttgggctgctgaggggctagtgcagtggtcctgacctctcttatcaagagcacacttctttgctggttgctccttttgagcatatgcgtgtgattatttggaacagttaaacttgccacgttgggtcagttttagaaattgtttcctagctagagggactgggggtcctttccaagtctagcatttggggtatggaaaattgctgtggtgtgtggtagggnnnnnnnnnnnnnnnnnnnnnnnnnnnnnnnnnnnnnnnnnnnnnnnnnnnnnnnnnnnnnnnnnnnnnnnactggccagcttgggcctcatcctcatgtcatccttctaggaaggcgcctgccccatcttgtctgccggcagcatgcatccaaggccagagctcaggcctgcagactgggctggtgcctcctccgcttcagggtatgggagttggtgaaggggctttcnnnnnnnnnnnnnnnnnnnnnggtaaagtctttggtagcttctatccactcagatcctggaaggcagcaaggttttgtggatctagattcattaggaatgtcttcttgtcagccaggccaggacccgggcttgccaagagcagaggccctcccagcaaccaggataccaccactttgggggctttgtgtacagaggtccgggtctgagacctcataggctgcagaaatctggggcagccaccatcaagaagcccctctcaggggccagaactcctttgccagcgtggatttctcaagtcgggactgcataattaaagcagttgcagnnnnnnnnnnnnnnnnnnnnnnnncccaaaaatgatttgtagttgtgtgtgcagcacttcgccctgatatgtgtgctctacaataaaaaccaaatctaatat

SEQ ID NO: 69373 - DNA, 710 bp, Homo Sapiens
  misc_feature (22)..(22): n is a, c, g, or t
  misc_feature (129)..(147): n is a, c, g, or t
acaaacaaacaaaaaccctctnaacaaactaggaatagagggaaacatcttaggaatagagggaaattctttaatgtggtaaaaggttttatcagaaacatacattaatcatcagacccagtggtggtnnnnnnnnnnnnnnnnnnnttcccagaaaaccaggaacaagacaagaatacctactattgctactttaattaacactgtactgcaaatcttagctagcagagaagacaaaaagaaataaagtacagatagctcttgacttacgatggtgcaactttaggatgatgcaaagaaactgtactttgagtacccatacaaccatgccgtttgtcagtttcagtacagtattcaataaattacatgagctggtgaatacctgatgataaaataggctttgtcttggataattttccccaactataagctaatgtaagtcttctgaatatatttaaagtaggctaagctaagctatgatgtttgccaggttagtttattaaatacatttttgactataatattttcagcctacagtataagtattgcaacagaagaaatcaaactgtcatttttcaagtgagcctcaattatttaaccaggttactagatacaaaatcaatatacaaaagtaattatatacccctgtatcagcagcaaacttaaaaagtcatttttaaaaaggatactactggagatagccagccaaa

SEQ ID NO: 69374 - DNA, 864 bp, Homo Sapiens
ggatttttatgtcattgagcaatattttttaatgtgtacctgtcttatggaagaaatatgcaggtatataagaccacgattttctaaagtgcatattagaatttttgtttttgtaaatggttaaatacatttcctgggtaacttaggaaattaagtttttcataaggcaacagatggttaaactgattgtcatgaatacccaaagatcatgtatataatcgaagtgtattagtaccatcccaaggtttttttctcatttaacacatttgtttcataattcagcaagtacagatgcaagcgcattgcacactttttcctttctaaacttaaagacaagtcaaaaagccattcttagaactagaggatttaagagggtaggaattagggtttgtatatatgtatatatgggacattttatcttctggcccaaagtcagaactttataaaaatcttgagtttgttcactaatgtgaaataagctatgtgtccagggtattgctcccctgagtgtatatgagtgctgagtagtattgcagagaatgtgatgagttattcactgtcacaactttttctatagaaaacaggggctgctttttaaactctcactatgggcactttaccaaaatacttccatatcaattatttgaactcggtagttgtttgacctagttagatgtggtgtttattcaagtttgtatgaaatcatgtttgacaatactgtaaattaggttaattttgtaagtcttagcatcatcatattgtgctgttttggataacacgtttgttacaagcatttaaactgtttcatttggtagtacctttacattgaaataaattgtgtttgtgcctccaaacaaaaagttt

SEQ ID NO: 69375 - DNA, 1869 bp, Homo Sapiens
  misc_feature (1510)..(1520): n is a, c, g, or t
ccacgcgtccgtatactcataaacttgctatggagagactctatgcagtttttacagattacgagcatgacaaagtttccagagatgaagctgttaacaaaataagattagatacggaggaacaactaaaagaaaaatttccagaagccgatccatatgaaataatagaatccttcaatgttgttgcaaagtaagtttttagaagtattgttttgaatgaatacaaaaggtgcgatggtcgggatttgacttcacttaggaatgtaagttgtgaggtagatatgtttaaaacccttcatggatcagcattatttcaaagaggacaaacacaggtgctttgtaccgttacatttgattcattagaatctggtattaagtcagatcaagttataacagctataaatgggataaaagataaaaatttcatgctgcactacgagtttcctccttatgcaactaatgaaattggcaaagtcactggtttaaatagaagagaacttgggcatggtgctcttgctgagaaagctttgtatcctgttattccccgagattttcctttcaccataagagttacatctgaagtcctagagtcaaatgggtcatcttctatggcatctgcatgtggcggaagtttagcattaatggattcaggggttccaatttcatctgctgttgcaggcgtagcaataggattggtcaccaaaaccgatcctgagaagggtgaaatagaagattatcgtttgctgacagatattttgggaattgaagattacaatggtgacatggacttcaaaatagctggcactaataaaggaataactgcattacaggctgatattaaattaccgtggaataccaataaaaattgtgatggaggctattcaacaagcttcagtggcaaaaaaggagatattacagatcatgaacaaaactatttcaaaacctcgagcatctagaaaagaaaatggacctgttgtagaaactgttcaggttccattatcaaaacgagcaaaatttgttggacctggtggctataacttaaaaaaacttcaggctgaaacaggtgtaactattagtcaggtggatgaagaaacgttttctgtatttgcaccaacacccagtgctatgcatgaggcaagagacttcattactgaaatctgcaaggatgatcaggagcagcaattagaatttggagcagtatataccgccacaataactgaaatcagagatactggtgtaatggtaaaattatatccaaatatgactgcggtactgcttcataacacacaacttgatcaacgaaagattaaacatcctactgccctaggattagaagttggccaagaaattcaggtgaaatactttggacgtgacccagccgatggaagaatgaggctttctcgaaaagtgcttcagtcgccagctacaaccgtggtcagaactttgaatgacagaagtagtattgtaatgggagaacctatttcacagtcatcatctaattctcagtgannnnnnnnnnnaaagagaattctagaattctattttgtctagggtgatgtgctgtagagcaacattttagtagtatcttccattgtgtagatttctatataatataaatacattttaattatttgtactaaaatgctcatttacatgtgccatttttttaattcgagtaacccatatttgtttaattgtatttacattataaatcaagaaatatttattattaaaagtaagtcatttatacatctttagaaaaaattacataggttttgttttttaccattcctggaaatatattgaaaaaactttaagataggaaatatgggccataatggttaattattaaccaggattccttctttc

SEQ ID NO: 69376 - DNA, 1610 bp, Homo Sapiens
  misc_feature (1024)..(1135): n is a, c, g, or t
  misc_feature (1137)..(1138): n is a, c, g, or t
  misc_feature (1140)..(1142): n is a, c, g, or t
  misc_feature (1147)..(1158): n is a, c, g, or t
  misc_feature (1163)..(1166): n is a, c, g, or t
  misc_feature (1168)..(1186): n is a, c, g, or t
  misc_feature (1190)..(1191): n is a, c, g, or t
  misc_feature (1194)..(1195): n is a, c, g, or t
  misc_feature (1197)..(1201): n is a, c, g, or t
  misc_feature (1206)..(1208): n is a, c, g, or t
  misc_feature (1215)..(1215): n is a, c, g, or t
  misc_feature (1219)..(1219): n is a, c, g, or t
  misc_feature (1221)..(1221): n is a, c, g, or t
  misc_feature (1226)..(1226): n is a, c, g, or t
  misc_feature (1229)..(1311): n is a, c, g, or t
  misc_feature (1342)..(1342): n is a, c, g, or t
  misc_feature (1363)..(1363): n is a, c, g, or t
  misc_feature (1512)..(1512): n is a, c, g, or t
  misc_feature (1551)..(1551): n is a, c, g, or t
agaagcagctggcagctccagggtgccatattcccggcacttcgtgggcacccagagcccgctccccacccctgagcagcacctacccaccactgctgcggccactatgcctgtggtgccctctgtggccagcctggcccctccaggggaggcctcgctctgcctggaagaggtggcccccccctgccagtgggacccgcaaagctcgggtgctctatgactacgaggcagccgacagcagtgagctggccctgctggctgatgagctcatcactgtctacagcctgcctggcatggaccctgactggctcattggcgagagaggcaacaagaagggcaaggtccctgtcacctacttggaactgctcagctaggcaggtgcccccatcccccccgcattctggcctaggcaggagaggatgggcgcagccctgccacttaacttgtttgttggtgacacagttgttcagagtggggagaattcaccccattctgtccctgcccctagtcacctagctgtgagggtgcctgaggctgaatggctccacccctcccccagccctgcttctgacctgtggctctggagcccctgcccctgcctgcatccccgagcaccccaccctccaggctccactaaggagggaggggctgtctgcagcagctgcactcagcacctaggccagggtggggccgccgcagatgggctcaggaagccccaggtgcactcagcgagagccctgcctttcagttgccaaaagctgcatcaggggaatgcggcaaggcacacagggctctggcagcccctggggactgggcgctgcccctgggaggggagagcctggccagggctggtgttgggcccggagcagcatcttccggtgctatcctcccctcccacccctcacagctcaagccaagtccagcggccgcagtcttcacctctccacactcactttttatctggtgtttttacttctgcctgcgtttgctctctagccaataaaccgtccttgtgtgcgagtcnnnnnnnnnnnnnnnnnnnnnnnnnnnnnnnnnnnnnnnnnnnnnnnnnnnnnnnnnnnnnnnnnnnnnnnnnnnnnnnnnnnnnnnnnnnnnnnnnnnnnnnnnnnnnnnnannannnaaaannnnnnnnnnnnaaaannnnannnnnnnnnnnnnnnnnnncccnnaannannnnnaaaannnaccacancccnanaaaanaannnnnnnnnnnnnnnnnnnnnnnnnnnnnnnnnnnnnnnnnnnnnnnnnnnnnnnnnnnnnnnnnnnnnnnnnnnnnnnnnnnacaccagcaagacaaccaaacacaaccgccncccccccgacggccggcgccncacgcagaaagaccgacgcagcacacggcgcgcgaacgccgccgcgagacgaaggccgccagagacgcagcccgcgcaccgcagagcgcgccacgcacgcacccaccgcacgaaacgcgcgcgcggcgggcgccaaaagcgccggacgnacggacgaaccccgcgcggggaacaggcggcggggccgngacaggcggccgcccgccgccacccgcaacggcccgggagaggcagcccggcgcgcgag

SEQ ID NO: 69377 - DNA, 791 bp, Homo Sapiens
attacttggtgctggcccaaacacacattcttaagaagaactttgccaaggcagaggaataccttcaacaagcagcccagatggactacctgaaccccaatgtctggggcctgaagggcaatctctattttctgagtggaaatcattctgaggccaaggcatgctatgaacgaaccattagctttgtagtggatgcttctgagatgcacttcatcttcctgagactggggctcatctatctggaagagaaagagtatgaaaaggcaaagaaaacctatatgcaagcctgtaagagatcaccttcatgccttacctggctaggactgggaatcgcctgctatcggctggaggagctcacagaggctgaggatgctctttctgaagccaatgcattgaacaactacaatgctgaagtatgggcatatctggctctggtctgcctgaaagttggacggcaattagaagctgagcaggcctacaagtacatgatcaagctgaaattgaaagatgaggctctgcttgcagagatccacacactacaggaaacagttggctttggaaatccatctttctgatacccctccagctgaacaattttctgcatgggactctgagttcctttccttcccagagagttttaccgtatgaagcctggagctggagaacgaaagaatcttcactataaacagagacccattcatttatttccattggctgtgttactggatgttttactggttgacgagaaactgggtcacaataaaaaaatggagatatgaaactcaaaattc

SEQ ID NO: 69378 - DNA, 1149 bp, Homo Sapiens
  misc_feature (362)..(370): n is a, c, g, or t
  misc_feature (1061)..(1078): n is a, c, g, or t
ggcacgaggtttaactttttattaaaatgcttaggatacagattgactttctttcgtaaatgactgttttacttttcctgaagtaggacatatatgcactctgataaaacagaatgagaagtcataattcatgggaattcctatacaaggtgctgatcctgtgtttggagctgagctcctcacagcagcttctttcagctatcttataggaatagtgttccgtggggcaagaaatacattggttctaactgattttcaatcccctttctccagtggaataaaccactttcacaaagagctgccctatgtataacccacagatttctagcttgcaacaaagtgacaagggacaaatagggggnnnnnnnnnttaacaaaactaacactgaagtaatcatacttctcatgtctccgaacagagaagtatgggggacctttaaccaaaggaaattaaaaatatgcaagttatattacctagttcattcactgttagctagatttgttcacttaaggctttaacccctttccaaaccaacaactttgtcttaatccagctatgtttgctaataaacgaaatgcatgcacttcccacatatatacttcactgagcctctgcattcagtacctggcagtgaaaaagtatgctttccccacaagtcagtactggagaataaaaatgagaactccaactaaagaacaatgcctccctcaccccagtaatgttatccacattttccctaccctcacattagaataaagacatcctcccaacttttcatctcctatctccaatctgttcataggagatatatcttttgatcttttattataagggtagaatatagattaagatcatcaaaatccaatttcacatgtggcactaggaaaatggaatgctataaaattaatccccatcacccaagtagggatgctggtgcttttatactgagtctttactgccaataagtgatgctgcctccaaaggaacagctctacagaaagtttttgggttagtgtttccctagcttatttctgcaatggagaaagacaatttcatatcnnnnnnnnnnnnnnnnnncctggaaaagctacagatgttaacctttactttaaacaccaataaaataggtgtcaaaggagaaaaaatgt

SEQ ID NO: 69379 - DNA, 1446 bp, Homo Sapiens
  misc_feature (77)..(111): n is a, c, g, or t
aaaattataactatataggcgccaccggttaagcgaacgaccgagcgcagcgaagtattgagcgaggaagcggacgnnnnnnnnnnnnnnnnnnnnnnnnnnnnnnnnnnncagtcgacggtaccggacatatgcccgggaattcggccattacggccgggtatataagcctggttaaattggtcatctaaagctgtcaaataagacattctgtgaaaggtaaacatcgaaactggttataagtaaaaccatcaagccaacaacagggtcttgagataacctttgaagcttattgtactggcctgcaccagaagatgtctgcattactcattgctaaaaatgtgtagcacagaactgcactaggattaatttgtttacaagaagaaatttaaactctacgtttggttttcacatacagcagctctattgaataacatgcatctgaattttaagttgcaaaggtatctgaataatttttcatgtgcatcttttgtcgaatgttttggttcaagaaagaatgtttaaagctttttaaaagacttcagttcttaatgtaactgtacccttctgcatggaaaatcataaccaacatggctgcagtagacttcttagtggtatccagcaccacttgcagagggctgctttatcatattgtacttgggtgtaggactctagtgttcttgggtgtattgcatgggctgcattatctacagcattgtacaataacaactagaaaaggcagtatacttcactgatgcttgtctggtaataatcacttctgtgttataatggaaggttttttgtgatgtatgaaacttgtgttttttatatataaatgagtatagttagtgttgtggtaatgcctgttttcatctgtaaatagttaagtatgtacacgaggcactacttctgatttattgcaatgttcagtcctagtttttacttttattcttaaagcattcagttttgctttcaattttatgtaccttagttctgagttagacctgcagatgtgtacagatagttcatatttatgtattgcacataatcatgctattcagcattgatgctatattgtattatgtaaataataaaagccatgtacagagggaaacttcacttgttcattgggtttttaagccatagttggagtcctaaagggggaaaattagaaaatgttactttacatggctatataattttttttcctttgccatcgctgaacttgttcaagtgataatcaagagatattagaagcatttgcaggtatgatacctgataggcagtttatttttgaagaattcaataggcacctttgggattaaaacaattttaaaatttgagaaagatgaaatttgaacaattatggcctacctcgcttctccatgttgtaaaagatgatgttttatgataattctgaagaagaaagtaggtatgacttagttt

SEQ ID NO: 69380 - DNA, 1950 bp, Homo Sapiens
  misc_feature (467)..(477): n is a, c, g, or t
  misc_feature (1722)..(1722): n is a, c, g, or t
tggaccggtccggaattcccgggatatcgtcgacccacgcgtccggacggacttctggtcttcttcttcctaattgttccccttattgtctgtgctatttttatcttcatcaagagggatcaactgtggagaagctacttcagaaagaagagatcacaaacatatgagtcagatggcaaaaatcaagcaaacccttctagacagccggggagtgttcctcgacatgtttctccagtgacacctcccagagaagttcctatatatgcaaacagatttgcagtaccaacctatgcagccaagcaacctcagcagttcccatcaaggccacctccaccacaaccgaaagtatcatctcagggaaacttaattcctgcccgtcctgctcctgcacctcctttatatagttccctcacttgatttttttaaccttctttttgcaaatgtcttcagggaactgagctaatacnnnnnnnnnnnccttgatgttttcttgaaaagcctttctgttgcaactatgaatgaaaacaaaacaccacaaaacagacttcactaacacagaaaaacagaaactgagtgtgagagttgtgaaatacaaggaaatgcagtaaagccagggaatttacaataacatttccgtttccatcattgaataagtcttattcagtcatcggtgaggttaatgcactaatcatggattttttgaacatgttattgcagtgattctcaaattaactgtattggtgtaagattttggtcattaagtgtttaagtgttattctgaattttctaccttagttatcattaatgtagttcctcattgaacatgtgataatctaatacctgtgaaaactgactaatcagctgccaataatatctaatatttttcatcatgcacgaattaataatcatcatactctagaatcttgtctgtcactcactacatgaataagcaaatattgtcttcaaaagaatgcacaagaaccacaattaagatgtcatattattttgaaagtacaaaatatactaaaagagtgtgtgtgtattcacgcagttactcgcttccatttttatgacctttcaactataggtaataactcttagagaaattaatttaatattagaatttctattatgaatcatgtgaaagcatgacattcgttcacaatagcactattttaaataaattataagctttaaggtacgaagtatttaatagatctaatcaaatatgttgattcatggctataataaagcaggagcaattataaaatcttcaatcaattgaacttttacaaaaccacttgagaatttcatgagcactttaaaatctgaactttcaaagcttgctattaaatcatttagaatgtttacatttactaaggtgtgctgggtcatgtaaaatattagacactaatattttcatagaaattaggctggagaaagaaggaagaaatggttttcttaaatacctacaaaaaagttactgtggtatctatgagttatcatcttagctgtgttaaaaatgaatttttactatggcagatatggtatggatcgtaaaattttaagcactaaaaattttttcataacctttcataataaagtttaataataggtttattaactgaatttcattagttttttaaaagtgtttttggtttgtgtatatatacatatacaaatacaacatttacaataaataaaatacttgaaattctcttntgtgtctcctagtagcttcctactcaactatttataatctcattaattaaaaagttataattttagataaaaattctagtcaaatttttacagatattatctcactaattttcagactttgccaaggtgtgcacaaagggtttttgtgataaagaacagattagttttgaagaacgcaaaatttcaggttcctgaagacagctgttattttaccaatcgagtatacta

SEQ ID NO: 69381 - DNA, 545 bp, Homo Sapiens
  misc_feature (279)..(279): n is a, c, g, or t
tttgggggagggaaagagaaggataatccggcttcccatctacacttttcaataaagcatccacatacactgtcctgggaatactacactatgtttcagtgtaaagcccaccttgtgatgagattgattgaaaataggatcagtatggaatttatgctacaagttttcaataaactgctaagtctggctagtactgcttcatctcagaagttccagtcacatatgtggagtcagatgttggtttccacatctgggtttttgaaatccatttcaaatgtnctctggcaaagatattcagccgttaataaagcagtgggtagatcagagtggagtggtaaaattttatggaagttttgcatttaatagaaaacgaaatgtcttggaactggaaataaaacaggactatacatctcctggaactcagaaatacgtgggaccacttaaagtgacagtgcaggagttagatggatccttcaatcatacactgcaaattgaagaaaacagccttaaacatgatataccctgccattccaaaagtagaagga

SEQ ID NO: 69382 - DNA, 713 bp, Homo Sapiens
gaaactcccaggagacagcagcctagttttcgagtgtgagcttgtgcttgtgaaagctaaccatgctaaccaccaaggcaaagcagcacagtgtgaatagaacagagcgggatcaagaatttcacagaagacaggtcagctgaggggcctgcacacacagggtgttgaggaaccacagatgggcgccgagaggcctgccttttgcctggcccaggctcacccccaccttgggcctcacctcctccaggaagccttcccagctacccgaagctcaggtggccttcttgcaggtccccgtagcaccctgagcctgtaccttgggtggcacttgttatgctatcctgtgctagccgtttgtgcctcgtctcgctgttagattgtgagttcccatgggcagagacccactgtcgttccccgtgtgtccccagcccggtccctgtcacatttgttaaatgaaagaacaatgaagcccagtgtaacgtcagtccacagaaatagccacagcttccagtggtggccgtagacttggctcggaacttagtggcaccagagtaactctagtcagttacagtaaaatccactgtgtgtggaaggcagaagctagcggttgtatcccaagcatcttttgtatttgtctttatactttgctgaattctctgaaatacctattactgtatgttgcttttctaaataaatgtattgtgaaacctaag

SEQ ID NO: 69383 - DNA, 769 bp, Homo Sapiens
  misc_feature (92)..(92): n is a, c, g, or t
  misc_feature (307)..(307): n is a, c, g, or t
cggcacgagggatgatgtgccatagaaagatgaagtattggaacagttatcaaaggacacaaaaccagagttagaaattgatgtgaaagtcnaaaaacaggaggaagatgtcaatgttagaaaaagcccaaggatggatatagaaacaaatgacactttcagtgatgaagcagtaccaggaaagtagcaaaatatctcaagaaaattgaaattgggaagaaacgtgaactcaaggaagactcactatggtcagctaaagaaatatctaacaatgacaaacttcaggatgatagtgagatgcttccanaaaaagctgttattgactgaatttagatcactggtgattaaaaactctacttccagaaatccatctggcataaatgatgattatggtcaactaaaaaatttcaagaaattcaaaaaggtcacatatcctggagcaggaaaacttccacacatcattggaggatcagatctaatagctcatcatgctcgaaagaatacagaactagaagagtggctaaggcaggaaatggaggtacaaaatcaacatgcaaaagaagagtctcttgctgatgatctttttagatacaatccttatttaaaaaggagaagataactgaggattttaaaaagaagccatggaaaaacttcctagtaagcatctacttcaggccaacaaggttatatgaatatatagtgtatagaagcgatttaagttacaatgttttatggcctaaatttattaaataaaatgcacaaaactttg

SEQ ID NO: 69384 - DNA, 2578 bp, Homo Sapiens
  misc_feature (1539)..(1673): n is a, c, g, or t
  misc_feature (1687)..(1695): n is a, c, g, or t
  misc_feature (1818)..(1827): n is a, c, g, or t
  misc_feature (1941)..(1960): n is a, c, g, or t
  misc_feature (2141)..(2149): n is a, c, g, or t
  misc_feature (2309)..(2317): n is a, c, g, or t
cagtcgacggtaccggacatatgcccgggaattcggccattacggccggggacctgattctattaccaaatccattagttcaccatctgtttcctctgaaactatggacaaacctgtagattgtcaactagaaaggaaatgatacagattctacaagccaaggggaaagcaagatagtttcattggattggaagtagcacagggctctcatttgcagacttggcttccagtaattctggagatttgctttggttctaaagataaaaatttccaatgggcaaatactggagcagctgtgtttggaacacagtcagtcggaacccagtcagccggtaaagttggtgaagatgaagatggtagtgatgaagaagtagttcataatgaagatatccattttgaaccaatagtgtcactaccagaggtagaagtaaaatctggagaagaagatgaagaaatttgtttaaagagagagccaaactttatagatgggatcgggatgtcagtcagtggaaggagcgcggtgttggagatataaagattctttggcatacaatgaagaattattaccggatcctaatgagaagagaccaggtttttaaagtgtgtgcaaaccacgttattactaaaacaatggaattaaagcccttaaatgtttcaaataatgctttagtttggactgcctcagattatgctgatggagaagcaaaagtagaacagcttgcagtgagatttaaaactaaagaagtagctgattgtttcaagaaaacatttgaagaatgtcagcagaatttaatgaaactccagaaaggacatgtatcactggcagcagaattatcaaaggagaccaatcctgtggtgttttttgatgtttgtgcggacggtgaacctctagggcggataactatggaattattttcaaacattgttcctcggactgctgagaacttcagagcactatgcactggagagaaaggctttggtttcaagaattccatttttcacagagtaattccagattttgtttgccaaggaggagatatcaccaaacatgatggaacaggcggacagtccatttatggagacaaatttgaagatgaaaattttgatgtgaaacatactggtcctggtttactatccatggccaatcaaggccagaataccaataattctcaatttgttataacactgaagaaagcagaacatttggactttaagcatgtagtatttgggtttgttaaggatggcatggatactgtgaaaaagattgaatcatttggttctcccaaagggtctgtttgtcgaagaataactatcacagaatgtggacagatataaaatcattgttgttcatagaaaatttcatctgtataagcagttggattgaagcttagctattacaatttgatagttatgttcagcttttgaaaatggacgtttccgatttacaaatgtaaaattgcagcttatagctgttgtcactttttaatgtgttataattgaccttgcatggtgtgaaataaaagtttaaacactggtgtnnnnnnnnnnnnnnnnnnnnnnnnnnnnnnnnnnnnnnnnnnnnnnnnnnnnnnnnnnnnnnnnnnnnnnnnnnnnnnnnnnnnnnnnnnnnnnnnnnnnnnnnnnnnnnnnnnnnnnnnnnnnnnnnnnnnnnnccaacctggggcgnnnnnnnnnggccctccaaaaatttttaaaacatcttcgtgggggcgcgggccccaccgggcaacgacccctgccctaccctttttccaaacgaaccccgggcccaggcaccccgggtgggtgtcccccccnnnnnnnnnnccccggggggccaccaacgcttttcaaaaaatccacaaagggaatttttggagatattttttgggcttttctcacgagggtagcccatggcgcgccctcataattataattggnnnnnnnnnnnnnnnnnnnnactttctcgcgacgaaaaccggcgtgctaaaactatctctaaaggccttcctgggccccaactatcggcgacgaaccgcgccctcccaaccactcgcagggtggggggctaaaccaccccggaaaaaaccccaccccccgagaggggataattttcaggagaacacctttttgttgtccgnnnnnnnnngggcgcgaacacgaagaaaaaaaactcgtgacgcccacccggggggcgggcggatacacagccccggcgcggggcccccaccacacacaacagctcggagcaccccctctcatcgtccgggcccacctccggcccttgataaatcatttaagataacctnnnnnnnnncgaaaaactctcttcccccccgcggggagtgtgatttgttatcttgtggggggcgcagcgaaaaagagagacttactttgtcctctcctcactataaaaaccaccccttttgtgatggctgcaaaaaagatgggggccccagtagatgtttttactcactcccgtatagaatacactccgccattttcttttttgtgccgcaataaacagctatgtggcttcgtaaaccaagtgggtcgctcagacaaaaacatcctttcg

SEQ ID NO: 69385 - DNA, 1332 bp, Homo Sapiens
  misc_feature (1007)..(1068): n is a, c, g, or t
gtagttttggcacttttacttggattttttaaagaaagtgaatacaaatatctttgtacacaaattctcattctggagaaacaggatgtagaattcaaaggtgccaacatctcccttcttaaaaataacattgaaacgggtaactgtacctgttaaatatcctggttggcaacttttaaaatctggcttccacctaactccacaaatttgacaaagttatttttgtttgtgtaagtgatactggttatccacttccagtacatgtaccatttggccagaggtccataaataatattaacacttttagttaagaaacctgaagatcgagccactgctgaagaatgtctaaagcacccctggttgacacagagcagtattcaagagccttctttcaggatggaaaaggcactagaagaagcaaatgccctccaagaaggtcattctgtgcctgaaattaattcggataccgacaaatcagaaaccgaggaatccattgtaaccgaagagttaattgtagttacttcatatactctaggacaatgcagacagtctgaaaaagagaaaatggagcaaaaggccatttccaaacgatttaaatttgaggaacctttgctacaagaaattccaggagaatttatctactgagcaatatttccctttagaacttcaagatttctacattgaaaatgttaatattatttatggacctctggccaaatggtacatgtactggaagtggataaccagtatcacttacacaaacaaaaataactttgtcaaatttgtggagttaggtggaagccagattttaaaagttgccaaccaggagatttaacaggtacagttacccgtttcaatgttatttttaagaagggagatgttggcacctttgaattctacatcctgtttctccagaatgagaatttgtgtacaaagatatttgtattcactttctttaaaaaatccaagtaaaagtgccaaaactatccccccctatactattccannnnnnnnnnnnnnnnnnnnnnnnnnnnnnnnnnnnnnnnnnnnnnnnnnnnnnnnnnnnnntggccacacaacctgcgccgccgaccggcgcacatgtgataagaagatactgtggggtggcccccccttgcggccccccagaaagaaatctttttaaaaccccctttttcttttttgggcggccgcgggggcgcccccccgataggggacaaggccgggatacggggggctcgaaaccgttgtggccccttccacagaggaaagatacccggtggccacccggataaataaccgcggcctgtgtgtttttcttcccccccacat

SEQ ID NO: 69386 - DNA, 1095 bp, Homo Sapiens
tggggagagcgggtgtttgaaggctccgcggaccggcactaggagccgggggcgggtccgtgaccctccggctgctcggagcgaacaagcggccaggaaagaagcgggcctgaacaccatgatccctttggagaagccaggcagcggcggctcctccccaggcgccacctcaggctcgggccgggcaggccggggtctgagcgggccgtgccggccgccgccgccgccccaagcccgcaggctgctgacaaagatacaccccgtggtgcgcaccgagcccttccagaacggctacagcctgtgcccgggccgggagctgggcagggggaaatttgcagtggtgagaaaatgtataaagaaagattctgggaaagaatttgctgcaaagttcatgagaaaaagaagaaaaggccaagattgtcggatggaaataattcatgagattgctgtacttgaactagcacaagacaatccttgggtcattaatttacatgaagtttatgagactgcatcagaaatgatcttagttctggaatatgctgctgggggtgaaatctttgaccagtgtgttgcagacagagaagaagcctttaaagaaaaagatgttcaaagacttatgcgacagattttagaaggtgttcactttttacacactcgtgatgtagttcatcttgatttgaagcctcagaatattctgttgacaagtgaatctccattgggtgacattaagattgttgattttggcctttcaagaatattgaagaacagtgaagagctccgagaaattatgggtacccctgaatatgtggctcctgaaattcttagttatgatcctataagcatggcaacagatatgtggagcattggagtgttaacatatgtcatgcttacaggaatatcacctttcttaggcaatgataaacaagaaacattcttaaacatctcacagatgaatttaagttattctgaggaagaatttgatgttttgtctgagtcggctgttgatttcatcaggacacttttagttaagaaacctgaagatcgagccactgctgaagaatgtctaaagcacccctggttgacacagagcagtat

SEQ ID NO: 69387 - DNA, 1168 bp, Homo Sapiens
  misc_feature (52)..(52): n is a, c, g, or t
gcttgagtaaattgctgcattagcttcagacttttcagaggatatgctacanggaaaaaattgaagaaatggctgagcaggagcgctttctactgcatcaggagaccctacctgaacagctgctggcggagaaacagctaaatctcagtgcgatgccagtattgactgcaccacaactcattggtctatatatctgtgaagaaaatagaagagctaatgaatatgatttcaagaaagctttggacttgttggaatatattgatgaggaagaagatataaatataaatgatctaaaactggaaatcctttgcaaagctcttcagagagataactggtccagttctgatggcaaagatgatccaattgaagtatctaaagacagtatatttgtgaagatcttacagaaacttttaaaagatggcattcagctcagtgagtacttaccggaggtgaaagacctgctacaagcggatcagcttggaagcttaaagtccaatccttacttcgagtttgttttgaaagcaaattatgaatattatgttcagggacaaatataactttttctaaaaatggccattgtttatgaaatctgtataagtgtgtccttatacaaattttaggccataaacaagtgtaagtttgtacaatttcataacatgtatagctgagtttttatactttatatgtaggaagctaatataaaatagttatgtaactgtgattttggttttcagttatgtgacttgttttttccacctgaaatgtgtcagttgttgttcctgtactcggtgccctttctttttactctcacgtggtcccaggttctggagttcttgtcctggttctagctgctcacatgtacaaatcacttctaggcctcagtttctgcgactatgaaaattactagattgcactagcttgtctctaaaattgctgtgactccagatactttgcactgaagagaatctagggtgtttgatatctgtttcagttagggctaatgggaaatgtctagtaagataaatgtcaacttttgctgacttattatgagatgaaaaaccaaaggagagtgggcctaactcatgtgagcttgataactgatgaactcattgggagcattttaaacttttctacataaataataaatgagcactaatgaaagtaaaaa

SEQ ID NO: 69388 - DNA, 820 bp, Homo Sapiens
  misc_feature (546)..(555): n is a, c, g, or t
gcggccgctcactagtgtgaggcagtggaaaactaatgatgatacaattgattttgattatactgttctacttcatgaattatcaacacaggaaataattccctgtcgcattcacttggtctggtaccctggcaaacctcttaaagtgaagtaccactgtcaagagctacagacaccagaagaagcctccggaactgaagaaggatcagctgtagtaccaacagagcttagtaatttctaaaaagaaaaaatgatctttttccgacttctaaacaagtgactatactagcataaatcattcttctagtaaaacagctaaggtatagacattctaataatttgggaaaacctatgattacaagtaaaaactcagaaatgcaaagatgttggtttttttgtttctcagtctgctttagcttttaactctggaagcgcatgcacactgaactctgctcagtgctaaacagtcaccagcaggttcctcagggtttcagccctaaaatgtaaaacctggataatcagtgtatgttgcaccagaatcagcannnnnnnnnnaactgcaaaaaatgatggtctcatctctgaatttatatttctcattcttttgaacatactatagctaatatattttatgttgctaaattgcttctatctagcatgttaaacaaagataatatactttcgatgaaagtaaattataggaaaaaaattaactgttttaaaaagaacttgattatgttttatgatttcaggcaagtattcatttttaacttgctacctacttttaaataaatgtttacatttctaaataaaaagaaga

SEQ ID NO: 69389 - DNA, 1493 bp, Homo Sapiens
  misc_feature (174)..(174): n is a, c, g, or t
  misc_feature (535)..(545): n is a, c, g, or t
  misc_feature (807)..(922): n is a, c, g, or t
  misc_feature (1365)..(1430): n is a, c, g, or t
gagggcgcaatgtgcgcactcttgttatccgcgataaagaggaggcgggctataatcggggagacaataagggtctatggttggtaatatcgtacgcgacgcgcacctaatttggcgaggggggatcgtcgcgcccgctaggtcgtgatagattctaaatagcggcggatgcanccaatacgaagggaaacggcactcgttgttgtttggggctcgcgcggttgttgttggtctcacgcgggcggcaagaagatgtatatctctctcgtcaagcagaggggcgggaaggtccgctctcctgacagtcgcgtgcgccggggcggacaaagtcgggggggtggcttcttgcatggatgccctcccggcggggaccatggggtggtgtgcaccagttacccccgcgacaatcagctattttttaccgcgatttgcttcgcaccccccccgcgttttttgcaacaagggagttacaaacgggggggcggtggggagaaatttttgcatttgcgatcgccgccgccctgaggcatcgccnnnnnnnnnnnaacagagccccgcagtgagggataaccgtggggacgctccgatttgaggtagttggatggaaaggggaagtcgggggggcccgccgaggcgggttttgtttttgtggaaggagagaacccgacgtgagatgtgtgtgccgggggcggccggttaggaggggaaggtaaggagaagttctctcgtcggttttgggggcgccgcgccccgaaagggagaggttttgggactttttttggggggcgatggtggccgcccggttannnnnnnnnnnnnnnnnnnnnnnnnnnnnnnnnnnnnnnnnnnnnnnnnnnnnnnnnnnnnnnnnnnnnnnnnnnnnnnnnnnnnnnnnnnnnnnnnnnnnnnnnnnnnnnnnnnnaagccatagaagaatatttattgacatggaaaatgttaacaatatacttctatatgaaatatgtaggctacaaaacagtatatacagtttaataccatttttatggaaagaaaaataaccatatatacaaaatcatgcataagaaaaaaataatataaggatgtacataccaaatattaataataatggctatctctggatagtggaatcagagggattatgtaattttcctgaaaaattttcctgtcctccaaacagcatccgcttcatactattatttcttggttgtaattagtttgatataattctcttcagaaaggctctgtttcactatatatacctcaaagcatacttttgatgcagcttctgcaattcccatctaaaaagtagataacacttgctcttatattctggcatatgaagactatgtgtaattaacacannnnnnnnnnnnnnnnnnnnnnnnnnnnnnnnnnnnnnnnnnnnnnnnnnnnnnnnnnnnnnnnnnaagatcgattgaggccaggagctcaagacgagcctgggcaacatagaaagaccctatctttac

SEQ ID NO: 69390 - DNA, 785 bp, Homo Sapiens
  misc_feature (534)..(550): n is a, c, g, or t
  misc_feature (597)..(667): n is a, c, g, or t
  misc_feature (681)..(689): n is a, c, g, or t
ccggtctatgtgtgtgaattggccgatacaatcccccagaacagtttgactgatacgattaatcgactccctatggaaattggcctcgagccaagatttcgcacgagtgctaagaaaaaagtatgtaaggtgtacgtccaaatattataataatgctatctctggatagtgaatcagaggataatgtaatttcctgtaaattttcctgtccgccaaacagcatccgcttcatactattatttcttgggtgtaattagtgtgatataattctcttcagaaaggctctgtttcactatatatacctcaaagcatacttgtgatgcagcttctgcaattcccatctaaaaagtagataacacttgctcttatattctggcatatgaagactatttgtaattaacacactataaaatatgtcaaagcaggccaggcatggtggctcacacctgtaattccaaaaccttggcaggaagatcgattgaggccaggagctcaagacgagcctgggcaacatagaaagaccctatctttacnnnnnnnnnnnnnnnnnttagccaggtgtaatagcacatgcctgtctgtaatcccagctacttnnnnnnnnnnnnnnnnnnnnnnnnnnnnnnnnnnnnnnnnnnnnnnnnnnnnnnnnnnnnnnnnnnnnnnnagaactcatctctnnnnnnnnntttttaaataaagcaaaatatgccacagcatagatctgattgtagaaaattattatatggagaactgaaaaatctcctaatcaagacaaaaatttt

SEQ ID NO: 69391 - DNA, 1079 bp, Homo Sapiens
tgagtgtttccggaacacgttcttaacaatggtggtagacttcttaggatgtactggcatccgggaggaatgcttccggggagaagaccaactctactggaagagagcctcctagtagtccagaaccagataacatccaagccgctttagtgtaattgcccaaggggacaaggttttgaatataacatatttggataatagatgaactgagcgccaatgggacaataatcaatgctcttgctgaactgtccaccagcccccatcacagtctgtcatggctccggtatctcctgtggcaatgcacaaagtgatgcagctcacaatgctttgcagtatttaaagataatagcagaaagaaagtaaatctggagcaacttaaaaaatctttcagtagcacataaaaagttcccctctggccccttcccaagtaaaacttttaccgtagtgtttatgtcttgtttctaaatctcttcatagattccatcaacactccagatttaattatctcctcatagttgttattaagctctttttaatggcttcaactttgtatcagtatactgtatttataaactttgtaccacaagagagagtgtagcacccattttacagtgccatgcacatcagagaaagaaactgcatgtttgttgttgatgatgaaataaaaatgctagcgacagtctttcttactggtgcttaagctcttctttgcacaaagctttataaagggaattcaaaggaagccctttagaattagagtcttgagggacagcactaacaggcctttattaagtatgattgattgttaaatttcagggaacatgattggtctgctgtgtatttgaattcatgtaacaaagaactgttacgatgggattctgctcattttattaaaaagctactgacttgactgtcatcctgttcttgttagccattgtgaataagattttaatgttgataattctgttatttacatatctctaatttactttgaaattcaaaggtgaaaataaaaaatgatggcctaagtaaaatttacaaacatacatgtaatgggttacttccttactttctctaaa

SEQ ID NO: 69392 - DNA, 2602 bp, Homo Sapiens
  misc_feature (462)..(477): n is a, c, g, or t
  misc_feature (1152)..(1179): n is a, c, g, or t
  misc_feature (1964)..(1994): n is a, c, g, or t
caagaattcggcacgaggtttttttaagcagtctggattcgtgtttattgaagccagtaattagagacatctttttttcccaggactagaaagcaaggttccacatgactgcatactgcacccggacagagccacacccctggactaaggctggtgggggataatctgcagtcttacttttaagttagaaacaccaataaatttagtatacagacgacagtgaactttcacttacagcattaacattgttaaggtcatgatgtacagagcagtcactttcaactttgttaaattaataaaacatgacaatgtcttcagtttaaataccgattttaaaatgccaatcaaaaaaaagtgcaaacaaaataacaatctagcagcattatctgttgcatttttaggaaagaccaattcttggctgttatcttcagccacgtattcaaaggtgggcttttctctgannnnnnnnnnnnnnnnaaagacaaaaagcagatgtaaccattataatgtgcataaatagtcataaaattgtctttaacagtctaccatacaagtgtactctgcaaataaaatgaattttactttaaaaactaaaggctgtttattatttggcctttggttccaatgcttgaaaaccccaaaataacaaaactcatctcccttcctcccacctcccaaaaagaaccctgcagctccccaaagttggtagactttggcaaccactgagcacatgacactatgtatcagcttcttctgatactaggagcttccacttctcatgagtaaataaaagtggtctccaagaaaccttccttcacaagacatgtcttagcatttcatcagttttagtatattttatattgacacaaaaagtgcttatcagttcaaatgataaaaaataaagacaaattaaaatttggcattaaaatttaaaattataccatattcctcttcggcatgtgcctttccaggaattcttgtttctgaggtcactcattttactcccggggactaagcgaccccacctttagtgaggccacaagctgtttggcatctattggtcactataccacaattatcattctacagtcagtttactgtcattacctagacaacctggtaactggaagccacaatacatttgtttttttnnnnnnnnnnnnnnnnnnnnnnnnnnnntagtatatctcaacaataaaactggcacaagaaacatttctatcagaaaggcaagttgatactcagctttctccttaacagtgttcagacctttacgaaagcaattcaagaaagtcttcaaagagtcttgacacaacataggatattaagttatccccagtactacattagtggtcagtcaaatctggtatgtaaaagtaatgacattagggaagttatgcttagacacagtacaacaaacattcatataaaaaaagtaaactccacatggtgaactgtggttttttcccttggtttgacaacattttatacattaaattcatggtagtgtttgcatttaaatgctgtcatatataaaattaaaagtgcaatttcaaatccacagaaatcatttccagaatggtggtataacatgacaatgtgcatgaatttgccctaggtggggagacacctgaaactcttatttccataagaaaaaaaatgctacattttatgaaaacacctaacaagagaaatgtatcatttccattttctgtataaaacattcacacttatctgtccatctcatagcactgatcagaccaggaagctaggaaaagacccttttgcatcagtggaactccttgaagctttccacaagtcataaggcagggcttggtacgagccaattaaccagagtgcaattacattaaaaacctcccccaaactttccgtggcacattgcattatggtaaaaccagaggttcatcacctattttgtattagttaggccagcctgtgatagnnnnnnnnnnnnnnnnnnnnnnnnnnnnnnngcaggagctatttagacaacaaaattcaaagtaaactaattctgtaactgctgactttgaagacatcccacagtgactgtctgccccacaacacatatccgtggaccccagtacctctcacgaggacatagcctgggccaagcacatgggtcctgggcagctgccatcgttcccacccctgggtcagctccgcctgactcaggcacccccacaattagtacatctttcgtaagttaaagatgcattcaaaataagcctaattcccatttggcttagtgtttcgtttggaaatgcttctaacaatgattcttcaacttctactgaactgcacagtatttactgacactgctcatctcctccttcctccacctccctcaacattcagcttccccaccatcacttgtctcattactccttctggtctttctttcctggactttctgctacttaatctgcttcccaagaacaagtgaatttactaacatgaaactggtcagactaaccatcatcttaccaatgatttcttggtctcatttgctccaccctgttagaaagtgggccctctttctttcactctaccttcccctccacaagaaggtccaggtatg

SEQ ID NO: 69393 - DNA, 1978 bp, Homo Sapiens
  misc_feature (1662)..(1929): n is a, c, g, or t
gggagcgcaccgcgggaagatggcgttggaggtcggcgatatggaagatgggcagctttccgactcggattccgacatgacggtcgcacccagcgacaggccgctgcaattgccaaaagtgctaggtggcgacagtgctatgagggccttccagaacacggcaactgcatgtgcaccagtatcacattatcgagctgttgaaagtgtggattcaagtgaagaaagtttttctgattcagatgatgatagctgtctttggaaacgcaaacgacagaaatgttttaaccctcctcccaaaccagagccttttcagtttggccagagcagtcagaaaccacctgttgctggaggaaagaagattaacaacatatggggtgctgtgctgcaggaacagaatcaagatgcagtggccactgaacttggtatcttgggaatggagggcactattgacagaagcagacaatccgagacctacaattatttgcttgccaagaaacttaggaaggaatctcaagagcatacaaaagatctagacaaggaactagatgaatatatgcatggtggcaaaaaaatgggatcaaaggaagaggaaaatgggcaaggtcatctcaaaaggaaacgacctgtcaaagacaggctagggaacagaccagaaatgaactataaaggtcgatacgagatcacagcggaagattctcaagagaaagtggctgatgaaatttcattcaggttacaggaaccaaagaaagacctgatagcccgagtagtgaggattattggtaacaaaaaggcaattgaacttctgatggaaaccgctgaagttgaacaaaatggtggtctctttataatgaatggtagtcgaagaagaacaccaggtggagtttttctgaatctcttgaaaaacactcctagtatcagcgaggaacaaattaaggacattttctacattgaaaaccaaaaggaatatgaaaataaaaaagctgctaggaagaggagaacacaagtgttggggaaaaagatgaaacaagctattaaaagtctaaattttcaagaagatgatgatacatcacgagaaacttttgcaagtgacacgaatgaggccttggcctctcttgatgagtcacaggaaggacatgcagaagccaagttggaggcagaggaagccattgaagttgatcattctcatgatttggacatcttttaagtacattttcaacagtttgaggactaagcctttctaaaataacattgtaataaaccatttttactgagattgcaacgttttgcactgataaacatgagaatctggaggaaagacaattgttttcttgtttaaaatatgtgtggaaaggaatgcaattgatagaacatttaaagatatatctgacaaaatacttaagagtatatagcacaggatttaatttctcaatctgttgcatgtgctaattatgagtattactagttgataatcagttttgtctaggtcataacataccatttgtaagtttgtttgctttttcaggtttatctttgcagtgaattatgctttgctttaaaacattccgctaaaatcataatgggacatataaattattaagctgttagaaatgcattcaaatttgttttttctgtgttctaagaactcaggcaattttaaggatnnnnnnnnnnnnnnnnnnnnnnnnnnnnnnnnnnnnnnnnnnnnnnnnnnnnnnnnnnnnnnnnnnnnnnnnnnnnnnnnnnnnnnnnnnnnnnnnnnnnnnnnnnnnnnnnnnnnnnnnnnnnnnnnnnnnnnnnnnnnnnnnnnnnnnnnnnnnnnnnnnnnnnnnnnnnnnnnnnnnnnnnnnnnnnnnnnnnnnnnnnnnnnnnnnnnnnnnnnnnnnnnnnnnnnnnnnnnnnnnnnnnnnnnnnnnnnnnnnnnnnnnnnnngttcaagcgatcatgtgcctgagcctcctgagtagctgggatcacaggt

SEQ ID NO: 69394 - DNA, 1203 bp, Homo Sapiens
aaaatgaatagaaaattttaaaacccgagaaatgggggaaaaaaaatcagtgcacaagaattgggctggttaggcccagcaccacactgaagtgggctcagtggtttttggagtgaagaagccttactccctgcacattccctcatgctcccacacaagtccagcaatggaaatgcttgggttcctcttgctttgtcaggggactcaggagtcgaccaagggaaaccatttggccccgtgaggaatgggcattgtcagtatccgtcctgaacggggcctagtcaggaagcggtctagaagtgtacggtcacggtcgcctcatgaaagtgtgtagcaggtggctctcaggaaaaataccaagtctggatcatccatgtggcagctttgcatagggagaggatagctccgaactggaactgaactgccttctctgcacgcttgaccaaagcagtgatgagggcggccagtacctgcggtgtgcgtggtaggtttaaagaaaagggaatgttttctgctgagtgtttcctttgtccttgggctgctcgagctggacagtaggtaaccactgttttcaaggaccagcccaatttctctggcttggttcggagttcgtttcatccctagctgtgagtgccttttggtctggaaagttggcttgtctcataatacccacagctaggacattctctctgtaattatgaattgtccttgttttacattaaaagagaatgtctttgatcactagagtctgtcggtgttggattatttccactgtgagattcttaaaacttttttgcttcataataataaaacaactcatgttagagaccctttcaacatgaaaggtttgtagttgagacattacatatattttattgtttataataaaaatcatctatacaaaagaagtcctgggtgttaatattttgcacaagatctgttttccatgatgtgttgacatctacaatttcactaactgttgacgttattttctattgagattctggagcctagggagctatgtgttctttttgttcatttcgttcttacttccctgaagcaagagactatatggccttcagtgcaaagacttcagaccaattctttgtattacacttggttgcctcttggctatataacttctgagtgcaaatcattgaacactttaacgaagtattgtagagaataaatcataatggataa

SEQ ID NO: 69395 - DNA, 1134 bp, Homo Sapiens
  misc_feature (36)..(36): n is a, c, g, or t
  misc_feature (55)..(55): n is a, c, g, or t
  misc_feature (80)..(114): n is a, c, g, or t
aagtgtatagactcactatagggcgctactgtccgnacgaacgacgagcgcagcngagtagtgagcgaggaagcggccgnnnnnnnnnnnnnnnnnnnnnnnnnnnnnnnnnnncagtcgacggtaccggacatatgcccgggaattcggccattacggccggggaggtccctgaggccgctgaggtcgttcgtgtctgttgaacggctgtgggcgtcttgctgccttgggtagggggttaaaatcgttcttgagaggaacgtctctgtgcgaagagataatgagtttagctctgagaagtgagcttgtagtggacaaaacaaagaggaaaaaaagaagagaactgtctgaggaacagaaacaagaaattaaagatgcttttgaactatttgatacagacaaagatgaagcaatagattatcatgaattaaaggtggcaatgagagccttggggtttgatgtaaaaaaagctgatgtactgaagattcttaaagattatgacagagaagccacagggaaaatcacctttgaagattttaatgaagttgtgacagactggatattggaaagagatccccatgaagaaatactcaaggcatttaaactatttgatgatgatgattcaggtaaaataagcttgaggaatttgcgacgtgttgctagagaattgggtgaaaacatgagtgatgaagaacttcgagctatgatagaagaatttgacaaagatggtgatggagaaataaaccaagaggagttcattgctattatgactggtgacatttaaagaattacaaggataaacactaagaatgttgcagttaccatcttatattctatttttgtgcctggagccatgtgaaaaaaaccaacttagttcttttatcctaaaggaccaaaaataagcatcttatatatctgtattttactactgttaagtttctttgtatgaactgtgttgttagtactcagatagtttagctttgtatttataatagagcttttatataaagttttaaaaattgaatgtgtgatatgtgttctttgaaggttttttaatttaacatttatagtcactttttagtgcacacattttccagactttcgttaataaaatatttattttattagaatttt

SEQ ID NO: 69396 - DNA, 850 bp, Homo Sapiens
  misc_feature (553)..(553): n is a, c, g, or t
  misc_feature (578)..(578): n is a, c, g, or t
gggatcctttacggcaggcgtccgcgtcgctagctagtcgttctgaagcggcggccagagaagagtcaagggcacgagcatcggccatgcctttcttggacatccagaaaaggttcggccttaacatagatcgatggttgacaatccagagtggtgaacagccctacaagatggctggtcgatgccatgcttttgaaaaagaatggatagaatgtgcacatggaatcggttatactcgggcagagaaagagtgcaagatagaatatgatgatttcgtagagtgtttgcttcggcagaaaacgatgagacgtgcaggtaccatcaggaagcagcgggataagctgataaaggaaggaaagtacacccctccacctcaccacattggcaagggggagcctcggccctgaacagagcagctgctgatgtctggaggctgattttcctgttctctgttctccactggaaaggttgtttacgacaaacctccttgtcaaagtgtgtaaaaataaaggattgctccatccctaaaaaacaccccaaaaccacccacacncaaaacatgtcgggccgccttcggnccctcgagaaggcttttctaagacctttcgttttggcgccgcgggccccagtaagggaaatggaacatgggccataagctgttttcctagggagaaccctgggccaggacctaaaggctttgggaattcctcaccaaataaaaaaaccggcccgggcggggaaacccggaggcggttcttggaaccaaattccaggaggggggggtttcttggagggcccatttaacgcggggattcttactccaccggggggagtccccaaagccggagct

SEQ ID NO: 69397 - DNA, 1211 bp, Homo Sapiens
  misc_feature (89)..(113): n is a, c, g, or t
  misc_feature (657)..(676): n is a, c, g, or t
  misc_feature (1061)..(1125): n is a, c, g, or t
tggcccctccagatggagaggacatctcctgggctgggcccaggtaccccagcccacccctcatgacacagaatacttgagccactgannnnnnnnnnnnnnnnnnnnnnnnncctcggcccctcctcagccacctgagttgctctatctgcaagcctgactctgccagcctcccctggtagagaggaggtttacccactccctgcacgcctgccgtccctgccccgctgggcagcccttcagtgtggctggcgttggggccagtgagttgcctctttccctccttgtctggccccagtggtctggggagcccccaggcacacctaagcgtcgtggagcattgttctgccacagccctgcatactgaccccgggaggctgggcaggtggacagccccagccaccaccttcagcctagcctgtcccccaaggatggtgaagctcagcaggggtctgagggtagccggccagaagaggctggaacctcctgctcaagtctagacccctacttctctgctgcccccaccctgccagagctgatgtttccaataccaagatgtcttcacagggcacagcccctgcagagcatcttggtcatttggaagaggacacggtatcccctctggccagagtatgtcagagaaggaagagtagggcnnnnnnnnnnnnnnnnnnnntaaaggtgcttgcttgtttaatgtaaataatagaaagccttaatatcttttctgtaacacggagtaatattttaatgtcatgttttggatgtacataatatatttataacaaagcagcaagagtctacttaaccttggctgcctcgtggtgtttcctggctgggtggggtggggggttatcaaggagcctgggacgtgaggccccactcctcgccccattcccagctccccccaaccctggcctcaggatgagagctgtcacctgagacagtgaattaatgttgacatctgctccaaagccttttggaggggattgggtgaggacagtggtctttcctgttgatcatgatgataaagtaatgatggctgatccctatttgtgacnnnnnnnnnnnnnnnnnnnnnnnnnnnnnnnnnnnnnnnnnnnnnnnnnnnnnnnnnnnnnnnnnggtgaaagaaccaacaaagacctatcctggtggagctgacctcctgggaaaagagtcaataaacaaataaatgcacatggaaattc

SEQ ID NO: 69398 - DNA, 1621 bp, Homo Sapiens
  misc_feature (1079)..(1092): n is a, c, g, or t
ggcgtgatctcgccgcggttccgcggccctgccgccgccgccgccagcagagcgcaccggggcgatcgggcgagtggccatggcgggcgccgaggactggccgggccagcagctggagctggacgaggacgaggcgtcttgttgccgctggggcgcgcagcacgccggggcccgcgagctggctgcgctctactcgccaggcaagcgcctccaggagtggtgctctgtgatcctgtgcttcagcctcatcgcccacaacctggtccatctcctgctgctggcccgctgggaggacacacccctcgtcatactcggtgttgttgcaggggctctcattgctgacttcttgtctggcctggtacactggggtgctgacacatggggctctgtggagctgcccattgtggggaaggctttcatccgacccttccgggagcaccacattgacccgacagctatcacacggcacgacttcatcgagaccaacggggacaactgcctggtgacactgctgccgctgctaaacatggcctacaagttccgcacccacagccctgaagccctggagcagctatacccctgggagtgcttcgtcttctgcctgatcatcttcggcaccttcaccaaccagatccacaagtggtcgcacacgtactttgggctgccacgctgggtcaccctcctgcaggactggcatgtcatcctgccacgtaaacaccatcgcatccaccacgtctcaccccacgaagactacttctgcatcaccacaggctggctcaactaccctctggagaagataaggcttctggcgaacgcctggaggacctcatccaaggcctgacgggcgagaagcctcgggcagatgacatgaaatgggcccagaagatcaaataacttctccgagcctgctacctggttgccaaccttccctagcccccaaaccgaagccatctgccaaattccagcctctttgagctggcccctccagatggagaggacatctcctgggctgggcccaggtaccccagcccacccctcatgacacagaatacttgagccactgatttttcatttcttcnnnnnnnnnnnnnncctcggcccctcctcagccaccttgagtggctctatctgcaagccttgactcttgccagcctcccctgtggtagagaggaggtttacccacttccctgcacgcctgccgtccctgccccgcttgggcagccctttcagtgtggctggcgttggggccagtgagttgcctctttccctccttgtctggccccaggtggtctggggagcccccaggcacacctaagcgtcgtggagcattgttctgccacagccctgcatactgacccccggaaaggctgggcaggtggaacagccccagccaccaccttcagcctagcctgtcccccaaggaatgggtgaagctcagcaggggtcttgagggtagccggccagaagaggctggaacctcctgctcaagtctagacccctatttctctgttgcccccaccctgccagagctgatgtttccaataccaagatgtcttcacagggcacagccccttgagagcatctgggccatttggaagaggaccgggtatcccctctggcc

SEQ ID NO: 69399 - DNA, 1514 bp, Homo Sapiens
cagtcgacggtaccggacatatgcccgggaattcggccattacggccgggactttaattgcacccatgaatgtggctaggcgaggagctggagtggctgttcttaatggaaaactgtttgtatgtggtggctttgatggttctcatgccatcagttgtgtggaaatgtatgatccaactagaaatgaatggaagatgatgggaaatatgacttcaccaaggagcaatgctgggattgcaactgtagggaacaccatttatgcagtgggaggattcgatggcaatgaatttctgaatacggtggaagtctataaccttgagtcaaatgaatggagcccctatacaaagattttccagttttaacaaatttaagaccctctcaaactaacaggcttagtgatgtaattatggttagcagaggtacacttgtgaataaagagggtgggtgggtatagatgttgctaacagcaacacaaagcttttgcatattgcatactattaaacatgctgtacatactttttgggtttatttggaaaggaatgcaaagatgaaggtctgttttgtgtacttttaagactttggttattttactttttggaaaagaataaaccaagaattgattgggcacatcatttcaagaagtcccctctcctccacatttgttttgccaatttgcacattaaatgactcttccctcaaatgtgtactatggggtaaaaggggtagggtttaaagatgtagacagttgggttttttaagggccctttttcaataactggaacactctataacaaaggatacttatttaaatagatgacattgactatttttgtttttattaaaaggaagcttacatgcctaccaatatttaatcttttatgattgcctttttataactttttatattctcagcagagtgctttaccaattgaagtaaaatgtggcaggctggagttattgaagcagagtggcagtcttcagtttgcagagtaggggtctgtcttttaaactctgagtgcaaacttcagagttcttgccttggctgcagtttttttccttcaagaatgcagtactaacatttatttgagtggagttactgaacagtaacatagctgtgatttttggtatttgaaacactggttttaaatattttgacttgttgagggtatgttttatatagcaagacattatatagcagtaaaaaatggtgttttatcttctatataattcctgtttttattattaacaaaacagtcctaaatagcagccctcaattgtgaaaaaatttactttaaactacattaggttgtgaatgcaggttttatcagaactatgtttttgttcagtttatctgttcatatggataaatattggttgggatgacttggtgtctaatgtgtagtgctacacacctaacttatggggccaaaatagcatgtcctaatgcttgctgctgatttaaacacattaaaggtactttgcaggaaatccttgcaccatgggattaatatcca

SEQ ID NO: 69400 - DNA, 1008 bp, Homo Sapiens
  misc_feature (43)..(77): n is a, c, g, or t
  misc_feature (859)..(859): n is a, c, g, or t
  misc_feature (870)..(870): n is a, c, g, or t
  misc_feature (880)..(880): n is a, c, g, or t
ccgaacgacgagcgcagcgagtcattgagcgaggaagcggcgnnnnnnnnnnnnnnnnnnnnnnnnnnnnnnnnnnncagtcgacggtaccggacatatgcccgggaattcggccattacggccggggaccgccggagccgccgagagccttagccgacggaaactggacactggaccggcagcgccatgagactcctcccccgcttgctgctgcttctcttactcgtgttccctgccactgtcttgttccgaggcggccccagaggcttgttagcagtggcacaagatcttacagaggatgaagaaacagtagaagattccataattgaggatgaagatgatgaagccgaggtagaagaagatgaacccacagatttggtagaagataaagaggaagaagatgtgtctggtgaacctgaagcttcaccgagtgcagatacaactatactgtttgtaaaaggagaagattttccagcaaataacattgtgaagttcctggtaggctttaccaacaagggtacagaagattttattgttgaatccttagatgcctcattccgttatcctcaggactaccagttttatatccagaatttcacagctcttcctctgaacactgtagtgccaccccagagacaggcaacttttgagtactctttcattcctgcagagcccatgggcggacgaccatttggtttggtcatcaatctgaactacaaagaatttgaaccggcaatgtattccaagatgcagtcttcaatcaaacagttacagttatttgaaagaaaggatggggttaaatgggagaaacaatcctttatggataagttcccctgctgggtcttggggccttctgtntaattgttggncctttcatcnacctccctaaaaatctaaaaaaggcgttaagaagcacccccttccggaaaagtttagaaaatgggggtaccttcaaaggtccaagaaattgaatgtttgaacccttgaaattttggaatttccccccc

SEQ ID NO: 69401 - DNA, 1739 bp, Homo Sapiens
  misc_feature (517)..(517): n is a, c, g, or t
  misc_feature (1219)..(1227): n is a, c, g, or t
cagtcgacggtaccggacatatgcccgggaattcggccattacggcgggggatgaagagtaacgccattaccgcggagccgccgagagccttagccgacggaaactggacactggaccggcagcgccatgagactcctcccccgcattgcgtgcatgcttctcttactcgtgttccctgccactgtcttgttccgaggcggccccagaggctcgttagcagtggctacaagatcttacagaggatgaagaaacagtagaagattccataattgaggatgacgatgatgaagccgaggtagaagaagatgaacccacagatttgggtacaagataaaagaggaagcaagatgtgtctcggtgaaccgtgaagcttcaccgagctgcgagtatacacactcatacgtgttttgtcaaaggcagaaagtattttccaggcaaataacgattgtgacagttgcctggtaggtctttaccaacgaaggcgtaccagcaagattctatcatgtgtctgaatcncttagatgcctcattccgttatcctcaggactaccagttttattatccagaatttcacagctcttcctctggaacactgtagtgccaccccagagacaggcaacttttgagtactctttcattcctgcagagcccatgggcggacgaccatttggtttggtcatcaatctgaactacaaagatttgaacggcaatgtattccaagatgcagtcttcaatcaaacagttacagttattgaaagagaggatgggttagatggagaaacaatctttatgtatatgttccttgctggtcttgggcttctggttattgttggccttcatcaactcctagaatctagaaagcgtaagagacccatacagaaagtagaaatgggtacatcaagtcagaatgatgttgacatgagttggattcctcaggaaacattgaatcaaatcaataaagcttcaccaagaaggttgcccaggaaacgggcacagaagagatcagtgggatctgatgagtaaatgttcctttgtgcaacaattcggtctttacttaacctgccctaatatttttcggcctgatgggaattagtgcagagaagccatgtcaccatagaaggcaactcctacttgtgtgtggactgagcaatcagagtctgtggcgataatattgctgaaaatgcactgcattcatttttctaaagtaacaaatttggnnnnnnnnnaaaccattaaaatctatgtgtgtgcgtgtgtatgtatgtgagcagttggtcttaccagaatcattgttgaactacctgaaacaagtctttagaatactaaatataatgctgttgtctcttcctttttgacattttctgatttttttcccccaaaactcagttaatatttacccactatgattattgatgtcctgccttgaacagttttaaagaaaacaatttttggaatagctcaaatttcaattgatggcacaaatcagcattttgttgttgttactgtattacaattagtattctaaaggcagaagcagaagtagctgctttttagcaatagaattgtttcagtattttgctgctgtttaatgcgcatcttcagaaaacttcccagtggcttcaaggaatttggggatctctctggcaacaaattgtgaaacatgaaatttctgctgactttaatatatgaaacctaatcctacccccttttttaacaaaaagaaactagtacatttgtg

SEQ ID NO: 69402 - DNA, 661 bp, Homo Sapiens
  misc_feature (94)..(94): n is a, c, g, or t
  misc_feature (101)..(101): n is a, c, g, or t
  misc_feature (136)..(136): n is a, c, g, or t
  misc_feature (146)..(146): n is a, c, g, or t
ttttgtttttcctaagtaccttggtgacaagtcatttcttgtttttatacaaattatgtagtgcctgttgaacttaaaatatatctaaatttantaaaatntgagactgagctcttagtgaagtatattctggttntaagtgcttntcgtatgacttggaacatctgcttattttctaatccgctgttttagggtagacactgacaacgttatgtgtggtctttaacctgttgtcatgttttttccctagatgtacaacactgactcatcataaatgtggtgctgctattcgacaaaccagttttagcagggatagcagcattcttatagctgtttgtgatgatgccagtatttggcgctgggatcgacttcgataaaatacttttgcctaatcaaaattagagtgtgtttgttgtctgtgtaaaatagaattaatgtatcttgctagtaagggcacgtagagcatttagagttgtctttcagcattcaatcaggctgagctgaatgtagtgatgtttacattgtttacattctttggactgtcttccggctcagactctactgcttttaataaaaatttatttttgtaaagctgtgtgtttagttactttcattgtggtgaaaaaaagttaaaagtaataaaattatgccttatcttttt

SEQ ID NO: 69403 - DNA, 1450 bp, Homo Sapiens
  misc_feature (860)..(870): n is a, c, g, or t
  misc_feature (1295)..(1295): n is a, c, g, or t
  misc_feature (1409)..(1409): n is a, c, g, or t
aaatgccattgtgtgctggaaacctggcaagatggaagatgatatagataaaattaaacccagtgaatctaatgtgactattcttgggcgatttgattacagccagtgtgacatttggtacatgaggttttctatggatttctggcaaaagatgcttgcattgggcaatcaagttggcaaactttatgtttgggatttagaagtagaagatcctcataaagccaaatgtacaacactgactcatcataaatgtggtgctgctattcgacaaaccagttttagcagggatagcagcattcttatagctgtttgtgatgatgccagtatttggcgctgggatcgacttcgataaaatacttttgcctaatcaaaattagagtgtgtttgttgtctgtgtaaaatagaattaatgtatcttgctagtaagggcacgtagagcatttagagttgtctttcagcattcaatcaggctgagctgaatgtagtgatgtttacattgtttacattctttgtactgtcttcctgctcagactctactgcttttaataaaaatttatttttgctgcccccgccccgacgcccgccgaaaaagctgcgcgcctggaacaagacgcaatggcccgcgcgcacaaatgcataaaccctgtggggtcggcctctcggcccctcaaaaaaaacttttctaaagaacatttcggttttgggcgcgcggcgggggccctccgatagggcaacaggggaacccctgggtccccataagccttggtttctccctaaagggaaaacccccgtgggtgccgatggactataagcgggcccttgcggatattcttctcacccccgagataataaaaacaaannnnnnnnnnngggggcgagcgaccacacactgccgaagcggcgtgttctctctgtgagatacacacaatatactctcccccgccagagtcggtgaggacgtcttctctctgagagagggggcaccccattatgtagcgctgtggggaattatcgctttgtcccgacaaccgcggggatgagtcgtacgcatagagagcgcgagagagctgcccccggatcatatttctcgacaattgtgttacggggctaccccgcgcgctgcaccgtggggcgggcaacatgctcactttcgcggcactaacaaaacaactgcgtgggaggtggggaaaaatctgtccattctctagatcacacgcatttttactctgtcgcgccgccgacaacatgttgtgggaagaagagccccgtctcccctcagcaagaacgcgggtggnataataggaatatgagacacaaccgctgggaaaatactcgcggcacgcacggcgggcggtattattttcttcacgagcactccccttgcgtggtgtcggacggcatgtggttgncggacgtataacaaaatcatccttttcgcgctgcccgcagg

SEQ ID NO: 69404 - DNA, 1210 bp, Homo Sapiens
  misc_feature (113)..(134): n is a, c, g, or t
  misc_feature (205)..(213): n is a, c, g, or t
  misc_feature (402)..(436): n is a, c, g, or t
cagtcgacggtaccggacatatgcccgggaattcggccattacggccggggtctgaaccgttgcttgtggatttatagtagttcagtcataaaaaaaattataataggctgannnnnnnnnnnnnnnnnnnnnnaactcgaacttttcataactcaggggattccctgaaaaattacctgcaggtggaatatttcatggacaaannnnnnnnnctcccctcccaaatttagttcctcatcacaaaagaacaaagataaaccagcctcaatcccggctgctgcatttaggtggagacttcttcccattcccaccattgttcctccaccgtcccacactttagggggttggtatctcgtgctcttctccagagattacaaaaatgtagcttctcaggggaggcnnnnnnnnnnnnnnnnnnnnnnnnnnnnnnnnnnnacccaatctataggagcagtggactgcttgctggtcgcttacatcactttactccataagcgcttcagtggggttatcctagtggctcttgtggaagtgtgtcttagttacatcgagatgttgaaaatctacccaaaatgcagacagatactaaaaacttctgttcagtaagaatcatgtcttactgatctaaccctaaatccaactcatttatacttttatttttagttcagtttaaaatgttgataccttccctcccaggctccttaccttggtcttttccctgttcatctcccaacatgctgtgctccatagctggtaggagagggaaggcaaaatctttcttagttttctttgtcttggccattttgaattcatttagttactgggcataacttactgctttttacaaaagaaacaaacattgtctgtacaggtttcatgctagagctaatgggagatgtggccacactgacttccattttaagctttctaccttcttttcctccgaccgtccccttccctcacatgccatccagtgagaagacctgctcctcagtcttgtaaatgtatcttgagaggtaggagcagagccactatctccattgaagctgaaatggtagacctgtaattgtgggaaaactataaactctcttgttacagccccgccaccccttgctgtgtgtatatatataatactttgtccttcatatgtgaaagatccagtgttggaattctttggtgtaaataaacgtttggttttatttatcaaaa

SEQ ID NO: 69405 - DNA, 445 bp, Homo Sapiens
gcattttgggtagattttcaacatcttaatgtaactaagacacacttccacaagagaccagtagaataaccccatgaaagcgattatggagtaaagtgatgtaagcgaccagcaagcagtccactgctcctatagattgggtcctcccttccttctttccttcctccctttcttcctgcatcccatgagaagctacatttttgtaatctctggagaagagcacgagataccaaccccctaaagtgtgggacggtggaggaacaatggtgggaatgggaagaagtctccacctaaatgcagcagccgggattgaggctggtttatctttgttcttttgtgatgaggaactaaatttgggaggggagaaccaaaaatttgtccatgaaatattccacctgcaggtaatttttcagggaatcccctgagttatgaaaagttcgagtta

SEQ ID NO: 69406 - DNA, 549 bp, Homo Sapiens
aaagggaggttggttcctgcatttccactctttgaccataggaacgcctggctacaaaaggggctgtaattggctgctgcctataggggccccaggtccttcctccaattgcaaggcagcaactccgaagttctaagtcccatggaaagtggcagtggttgggctggactgtggctggaggatcaccgggcctcggttctcaagcaccatctgtctggctgcagctgggcccttcagctgggggccagtgttgctttccagctgcccccaccgggtcagatcatctctggcaaggaagagctgctggcatctcttactgtccttctcgcaggccttcctccaccttgggtgcctcctgacgcctgccccggaagtcttcatctgaaaaggagagggaagctgcctcatcctctaccctgcagggcctcgctcaggcacggcccctagactgggcaagagagctgacccgactctctctgcccccttcatttgggacccatgcagatccccccaggtagacgatgcatgggtccagggagagaggcagca

SEQ ID NO: 69407 - DNA, 1356 bp, Homo Sapiens
  misc_feature (793)..(793): n is a, c, g, or t
  misc_feature (835)..(835): n is a, c, g, or t
  misc_feature (1279)..(1296): n is a, c, g, or t
cgtgctgcgcgccaacagcggcgctgtggacgccaccatcgaccagctgctgcagatgaacctggagggcggtggcagcagcggcggcgtctatgaggacagctccgactcggaggacagcatccccccggagatcttggaaaggactttggaacctgatagctcggatgaagagcccccacctgtgtactccccgccagcctaccacatgcacgtgttcgaccggccctaccctctggctcccccgactccgcctccccgtatcgacgcgctgggctctggagcccctacaagccagagacactatcggaactggaacccaccactgctgggcaaccttccggatgactttctccgcatcctgccccagcagctggacagcatacagggtaacgctgggggccccaagcctgggagtggagagggatgtccacctgccatggctgggccagggcccggagaccaggagagccgctggaagcagtacctggaggacgagaggatcgcgcttttcctgcagaacgaggagttcatgaaggaactgcaacggaaccgcgacttcctcctcgctctggagagagatcgactgaaatacgaatcccagaaatctaaaatccagcagcgtggctgtcagaaacgactttggcttttcctctcctgtcccaggaactggcgacgccaaccccgctgtgtctgaagatgccttattcagggacaagctgaaacacatgggaaagtccaccccggaggaaactggttgaacttgcccgagcctttctcagagaagaccaanaatgagggaagtcaaagaggaaacacttgttgaagcatcagntcgctggggggctgccgccgtcaacagccaacctcatggatgatgtggagggccacgcgtgtgatgaagacttccggggcaggcgtcaggaggcacccaaggtggaggaaggcctgcgagaaggacagtaagagatgccagcagctcttccttgccagagatgatctgacccggtgggggcagctggaaagcaacactggcccccagctgaagggcccagctgcagccagacagatggtgcttgagaaccgaggcccggtgatcctccagccacagtccagcccaaccactgccactttccatgggacttagaacttcggagttgctgccttgcaattggaggaaggacctggggccccataggcagcagccaattacagccccttttgtagccaggcgttcctatggtcaaagagtggaaatgcaggaaccaacctccctgtnnnnnnnnnnnnnnnnnngaccgcgtatgcggccgcaagcttattccctttagttgagggttaattttagcttggcac

SEQ ID NO: 69408 - DNA, 2172 bp, Homo Sapiens
gcggccgccattggctgggttcggcgcagctaacagacggcggcagtgcgagaaagccgaagatggcggtccccgcggcgctgatcctacgggagagccccagcatgaagaaagcagtgtcactgataaatgcaatagatacaggaagatttccacggttgctcactcggattcttcaaaaacttcacctgaaggctgagagcagtttcagtgaagaagaggaagaaaaacttcaagcggcattttctctagagaaacaagatcttcacctagttcttgaaacaatatcatttattttagaacaggcagtgtatcacaatgtgaagccagcagctttgcagcagcaattagagaacattcatcttagacaagacaaagctgaagcatttgtcaatacttggtcttctatgggtcaagaaacagttgaaaagttccggcagagaattctggctccctgtaagctagagactgttggatggcagcttaaccttcagatggctcactctgctcaagcaaaactaaaatctcctcaagctgtgttacaactcggagtgaacaatgaagattcaaagagcctggagaaagttcttgtggaattcagtcacaaggagttgtttgatttctataacaagctagagactatacaagcacagctggattcccttacatgatgttttcgaagactgtttttttcatcacgctcctgccacctcattattttgcattgaagatacattgccaggttgtgttttctgaaggattcagtgacttgctttctgtaaattatatggcttatcacttcttagacaaataacaaccaatagagatcattgttaagaatactgaggttctaatatactttctttagttctgtgagccaacagtaattattaagaacactttccctttaaaggaaacaaaagtgaataccatattgtttttactgtcatagtgttgctttcttgcctgtcctgcttagtttttacttgctggatgataccataatgtatcaaggagcgtccatggatacaagataagatgtgtaccttagtagaatacagagctttggtaattacatgaataaaattaagaaaatagccatatacaatcaaatacactatggcatttttatttgaatatgatgagtatattttgcttcggaaataatataggaaggaaatgtaaaatagtgagtagtatggtatcagttaattccagtctgagcttctctgtcaacttcagtttctctctcagtttaatgatttaataatagtccaggtttttgtgtgtttttctttatactgcaaattaataatgattcactttatagtttgggagacagaatcaggtcttgaataaaataattgtaatgagtgctaaatgggcaccattattcgaatcagataccttttatattctctttccataaatacgttgatttctgtcaataaaatttttgtgtcttaggattggttgaagtgtacattttttaattatatacattatagtatattttatgccatgaatgtatgtaaatgaatacatttacgtacatttgttaaaatgtatgtaatgaatacatttacatacatttgtttaaaaaaaacttgaattttttatgaatgaaatttctgtattgtttccaaaaagagagagattcaaacatgacttgcttcacatgaagaaatttgatttcagaaatgtcctatatttaaataagcaaagccattgaaattgaagcacatttcttatttgaagcatctgggaaatacaactgttaagtatctctcaaatattcagtatatggaatttatacccacatttgtttgtatatctatttgtaagctgtggttagaagaatgaagttcggattattgcgaatacactatccggtttcctactgatgaaggttttaactccaacttctgggcaatattgcaggcggttgcgacataggggcgggggagaacccccaattttaagcacaggttgcggtccagaatacgaaggcaaggggtctgacattgcgacaaaccgggccattccgtaactgggtaactacaccgaatgatgagcctccgctctaaatatcgggcgagccatctcttgcaatctgtaagaaccgccccacacatattactacgccccccggaaacataaaattatatttag

SEQ ID NO: 69409 - DNA, 701 bp, Homo Sapiens
ataatggatatatctttttcctgccattatccctcagacattctcctcatggcacattttcttcaaatgctaacatttactgagtgtacattgaagttctgtgcatacaggaagaagttattttctgagcttagataatactatgtgtatatgtgattaaaatgaagattattttctaaagccttcaaattagaagtggatttctgtttcattacttccgttttaaaagtttttgccagagagttttgctaaatactctcttatttgctctagtgtactagtccagtagtgtttgcatgtggatgtctgtggatgacagttattgtagcactttggcagtgcactaaaattttgccactatgaaatgtttctttattgtgtgtgcgtgtgtgttttgaaatacgcacacagccacacccacatatatattaaaagtggttgtattcatttagtgaaaaacaaaaagtagatgtacttctgtaaatcagataaatgcttggaatttgattgtctacccaatcaacagttttccctctttgctctggaaatatttgtactcatatagcatatttcaaaaatgttgtcattcattaaggcctcttaaatagaccactattttttgtgtctggcagatgagtatgtcaaggattgagatgaacacataagtcttggaaattaaataaatttataaacataaagat

SEQ ID NO: 69410 - DNA, 1384 bp, Homo Sapiens
  misc_feature (1304)..(1315): n is a, c, g, or t
agggtaggtagcggggccgggtggttgaatcggcacgaggaggaggaggaggatgagctggtggggctagcggactacggagacgggcccgactcctccgacgccgatccggacagcggcacagaggagggagttctggacttcagtgaccccttcagcactgaagtgaagccgagaatcctgctcatgggcctgaggagaagcggcaagtcgtctattcagaaagttgtctttcacaaaatgtctcccaacgaaactctgttcttggagagcactaataagatatgccgggaagatgtttccaacagctcctttgtcaattttcagatttgggacttcccaggacagattgacttttttgaccctacatttgactatgagatgatcttccggggaacaggagcactgatatttgtcattgactcacaggatgattacatggaagccctggccaggctccacctcacggtgaccagggcctacaaagtgaatactgacatcaacttcgaggtgtttattcataaagtggatggtctgtcagatgaccacaaaattgaaacccaaagagatattcaccagagggcaaacgatgaccttgcagatgctggattagaaaaaattcacctcagcttttatctgacaagcatatatgatcattcaatatttgaagcttttagcaaagttgttcagaaactgattccacaactcccaactctggagaatttgctgaacatctttatctcaaattctggaattgaaaaggcatttctatttgatgtggtcagtaaaatttatattgcaactgatagtactccggtggatatgcaaacctatgagctctgctgtgatatgatagatgtggttattgacatctcttgtatttatggtctcaaagaagatggagcaggaaccccctatgacaaggaatccacagccatcataaagcttaataatacaaccgtgctttatttaaaagaggtgacaaagttcctggctctcgtttgctttgtcagagaggaaagctttgaaagaaaagggctaattgactataattttcattgcttccggaaggccattcatgaagtttttgaggtgagaatgaaagtagtaaaatctcgaaaggttcagaatcggctgcagaagaaaaagagagccacccctaatgggacccctagagtgctgctgtaggtgaggtttcaggaatgtcttttgaaatcagaccttatccatgaggctgctgcgccatgttgcactaaaggaagaggaagaaggagattgggacacataccattgatttgttgttnnnnnnnnnnnnttcctgcaaccctcttgatcttctcttttataaataaagtaagcactttgaagcaaaaacttgtatatt

SEQ ID NO: 69411 - DNA, 692 bp, Homo Sapiens
cttatcctaatgaagcaacaatctgcagcttgcttctctgcaacagaaatgacactgcctgggatgagctgaagctcacgtgtcagacggcactgcatgtcctgtcagttaacactcaaggaaccatgggctttgttgggaggtggctgtactgaaactcatttggctgcatatatcagacacaagactcacaacgacccagaaagcattctcaaagatgatgaatgtactcaaacagaacttcaattaattgctgaagcattttgcagtgccctagaatctgttgttggctctttagaacatgatggaggtgaaattctcactgacatgaagtatggacacctttggtcagttcaggcagattctccctgtgttgctaactggccagatttgctttcacagtgtggctgtggattatacaatagccaggaagaactcaactggtctttcttaagaagcacacgtcgtccatttgtgccacaaagctgccttccacatgaagctgtgggctcagccagcaacctgaccttggactgtttgactgcaaagcttagtggcctacaggtggctgtagagacagccaatttgattttggatctttcatatgttattgaagataaaaactaagagaatagcatgttcgtattacaagagaaacaaataaactagtctgttggcaattgagatggccc

SEQ ID NO: 69412 - DNA, 2286 bp, Homo Sapiens
tttgttgttgtttttgggccatttctaagcctaccagatctgctttatgaaatccaggggaccaatgcattttatcactaaaactatttttatataattttaagaatataccaaaagttgtctgatttaaagttgtaatacatgatttctcactttcatgtaaggttatccacttttgctgaagatattttttattgaatcaaagattgagttacaattatacttttcttacctaagtggataaaatgtacttttgatgaatcagggaatttttttaaagttggagtttagttctaaattgactttacgtattactgcagttaattccttttttggctagggatggtttgataaaccacaattggctgatattgaaaatgaaagaaacttaaaaggtgggatggatcatgattactgtcgataactgcagataaatttgattagagtaataattttgtcatttaaaaacacagttgtttatactgcccatcctaggatgctcaccttccaagattcaacgtggctaaaacatcttctggtaaattgtgcgtccatattcattttgtcagtagccaggagaaatggggatgggggaaatacgacttagtgaggcatagacatccctggtccatcctttctgtctccagctgtttcttggaacctgctctcctgcttgctggtccctgacgcagagaccgttgcctcccccacagccgtttgactgaaggctgctctggagacctagagtaaaacggctgatggaagttgtgggacccacttccatttccttcagtcattagaggtggaagggaggggtctccaagtttggagattgagcagatgaggcttgggatgcccctgctttgacttcagccatggatgaggagtgggatggcagcaaggtggctcctgtggcagtggagttgtgccagaaacagtggccagttgtatcgcctataagacagggtaaggtctgaagagctgagcctgtaattctgctgtaataatgatagtgctcaagaagtgccttgagttggtgtacagtgccatggccatcaagaatcccagatttcaggttttattacaaaatgtaagtggtcacttggcgattttgtagtacatgcatgagttaccttttttctctatgtctgagaactgtcagattaaaacaagatggcaaagagatcgttagagtgcacaacaaaatcactatcccattagacacatcatcaaaagcttatttttattcttgcactggaagaatcgtaagtcaactgtttcttgaccatggcagtgttctggctccaaatggtagtgattccaaataatggttctgttaacactttggcagaaaatgccagctcagatattttgagatactaaggattatctttggacatgtactgcagcttcttgtctctgttttggattactggaatacccatgggccctctcaagagtgctggacttctaggacattaagatgattgtcagtacattaaacttttcaatcccattatgcaatcttgtttgtaaatgtaaacttctaaaaatatggttaataacattcaacctgtttattacaacttaaaaggaacttcagtgaatttgtttttattttttaacaagatttgtgaactgaatatcatgaaccatgttttgatacccctttttcacgttgtgccaacggaatagggtgtttgatatttcttcatatgttaaggagatgcttcaaaatgtcaattgctttaaacttaaattacctctcaagagaccaaggtacatttacctcattgtgtatataatgtttaatatttgtcagagcattctccaggtttgcagttttatttctataaagtatgggtattatgttgctcagttactcaaatggtactgtattgtttatatttgtaccccaaataacatcgtctgtactttctgttttctgtattgtatttgtgcaggattctttaggctttatcagtgtaatctctgccttttaagatatgtacagaaaatgtccatataaatttccattgaagtcgaatgatactgagaagcctgtaaagaggagaaaaaaacataagctgtgtttccccataagtttttttaaattgtatattgtatttgtagtaatattccaaaagaatgtaaataggaaatagaagagtgatgcttatgttaagtcctaacactacagtagaagaatggaagcagtgcaaataaattacatttttcccaagtgccagtggcatattttaaaataaagtgtatacgttggaatga

SEQ ID NO: 69413 - DNA, 981 bp, Homo Sapiens
  misc_feature (44)..(44): n is a, c, g, or t
  misc_feature (74)..(74): n is a, c, g, or t
aaaaagcaagcttcaaattccatcctaattattcatatgtaaantgtgggggcaaataattgagcagatttctntaaattaaaacatgtttatctgagggaaattctcactaattctctcttccttcctctgagacctttccacaaatccaacaagaatttctctttactgggatagaactggaggctaatagctgcatgaactggctcttcctgagtcagtcacattactcagggggttccattcatgctaaaataacacctaagtcacatggaaagaagctgcagactgaacaaacatgctgagcagttttactagtgaagatcaacatgggaaagttagcaagtctttgtttttcccatccttatcttttatcagtaaataaacatgagttcttgatattctttttcctgtggagcccctcgtttggacaatactatagtctcattttaaggtacaaaattcagtgcctgcttagaggattacagcatggagtaatcatattcacaccagagatgaaaggccagttagtagtagttccaggggtttttgctgttcccttgctcagtttctctagacttctttccttttgctatacaattgcagtgtaaacaaccttagggaaattataatgtttagactcaaagtaagaagaaataaagatggaccactagagaattgtagtaatctatttttaaattgatattgtgtctcatttttgtataacttttgaaataaaagtagattatgtcttaaaattgtaagtttacagtttgataactgaaaaacatttttaaaaaggcaatttttaatacaaaggtagataatttaggaagacagataaataaaatgaagaaagtaagttacttgtgatctcaccagtctttttagatacgcatctatatttatgtcacacatacctgttttatttatgtatttatgcacctttaattaaattaaaattatattgtttttaattcg

SEQ ID NO: 69414 - DNA, 1314 bp, Homo Sapiens
  misc_feature (1223)..(1254): n is a, c, g, or t
gtggtgaaagagtatgaagtcgacggcgcgccgaattcggccgaggcggcacgaggctgggactggggttgagttctgtctggttttgttgccattttggtttgggaggctggaaaagcaccccaagagctattacagagactggagtcaggagagagcaggaggccctcatgttcaccagggaacaggaccacaccggccactgaaggagggcaggagcagtcctccctctgaatggctgcagagttaatgttcccagcccagtcccctttcgggggccttgggagagtttaaggcacctgctggttccaggacctcgctttccatctgttcttgttgcaatgccatcttcaaaccgttttatttattgaagtgtttgttcagttaggggctggagagagggagcttgctgcctcctgccttgctacactaatgtttacagcacctaagcttagcctccagggccccacctctcccagctgatggtgagctgacagtgtccacaggttccaggaccatttgagattggaagctacactcaaagacactcccaccaggctctttctcccttttcctcttgctcactgccctggaatcaacaggctggttgctggttagattttctgaaacaggaggtaaaatttttctttggcagaggcccctaagcaagggaggggtgttggagagccagtgcccttaagactggagaaagctgcaatttaccaagttgccttttgccactgtagctgaccaggggactaggttgtagaggtgggaaggccccctctgggctgatcttgtgccattcttgaccttggacctgcttggttaaggagggagtgggccagaccagagtgccaggagctaatggagccaggcctgactcctaggagtggtccaaaggccttcagcctagatggtgcaaagctggggccagcctgtcttcaccggcaccctcacctgtgacaccaagacccaccccaatcccagacttcacacagtattctcccccacgccgtcctatgaccaaaggcccctgccaggtgtgggccacagcagcaggtatgtgtgaaagcaacgtagcgccccgcggactgcagtgcgcttaaccaactcacctcccttctcttagcccaagcctgtccctcgcacagcctcgcacaaaccacattgcctggtggggcccagtgtactgaaataaagtcgttccgatagacacgtcnnnnnnnnnnnnnnnnnnnnnnnnnnnnnnnngaccgcgtatgcggccgcaagcttattccctttcagtgagggttaattttagcttggcac

SEQ ID NO: 69415 - DNA, 3091 bp, Homo Sapiens
gatcaattgcgggagagtatgaagtcgacggcgcgccgaattcggcacgaggcgaacgttgagcacggttgtgggtggtgcggagtgccgagcggcctcacccccaaccgtcggcccagtcggacggttctgaggcgttgccgggagccgggcgcggctctgtgtggactcggagaaacgcggggcgtctgcctgagcccgcttttctacaagatgtggggatttttgaagcgccctgtagtggtgacggctgacatcaacttgagccttgtggccctgactgggatggggttactgagccggctgtggcgactcacctacccgcgggctgtggtttttgacgaactatattatgggcagtacatctctttttacatgaaacaaatcttcttcttggatgacagtgggccgccatttggccacatggtgctggccttgggaggttatttaggaggattcgatggcaattttttgtggaacagaattggagcagaatacagtagcaacgtgcctgtgtggtccctgcgcctgctgccagcactcgcgggggccttgtcggtccccatggcctaccagatagtgttggagctccactttttctcattgtgccgccatgggagctgctctgttgatgcttatccagaatgctctcatcactcatccaaggctaatgcttttggaatcactgttaatatttttcaatctattggccgtgttgtcctacctgaagttcttcaactgccaaaagcacagccctttttctctgagctggtggttctggctaacactgacaggggtcgcttgttcctgtgcagtgggcatcaagtacatgggtgtgttcacgtacgtgctcgtgctgggtgttgcagctgtccatgcctggcacctgcttggagaccagactttgtccaatgtctgtgtgttctgtcacttgctcgcccgagcagtggctttgctggtcatcccggtcgtcctgtacttactgttcttctacgtccacttgattctagtcttccgctctgggccccacgaccaaatcatgtccagtgccttccaggccagcttagagggaggactagctcggatcacccagggtcagccactggaggtggcctttgggtcccaggtcactctgaggaacgtctttgggaaacctgtgccctgctggcttcattcccaccaggacacctaccccatgatatatgagaacggccgaggcagctcccaccagcaacaggtgacctgttaccccttcaaagacgtcaataactggtggattgtaaaggatcccaggaggcaccagctggtggtgagcagccctccgagacctgtgaggcacggggacatggtgcagctggtccacggcatgaccacccgctccctgaacacgcatgatgttgcagcccccctgagcccccattcacaggaggtctcctgctacattgactataacatctccatgcccgcccagaacctctggagactggaaattgtgaacagaggatctgacacagacgtctggaagaccatcctctcagaggtccgctttgtgcacgtgaacacttccgctgtcttaaagctgagcggggctcacctccctgactgggggtatcggcaactggagatcgtcggggagaagctgtcccggggctaccacgggagcacggtgtggaacgtggaggagcaccgatacggcgcgagccaggagcagagggagcgggaacgggagctgcactcacctgcgcaggtggacgtcagcaggaacctcagcttcatggcgagattctcggagctgcagtggaggatgctggcgctgagaagtgatgactcggaacacaagtacagctccagcccactggagtgggtcaccctggacaccaatattgcctactggctgcaccccaggaccagcgctcagatccacctacttggaaacatagtgatctgggtttcgggcagcctcgctctggccatctacgccctgctgtccttgtggtacctgctccgacggcgaagaaatgtccatgacctccctcaggatgcctggctgcgctgggtgctggctggggcgctgtgtgccggtggctgggcagtgaactacctcccgttcttcctgatggagaagacactcttcctctaccactacctgcccgcactcaccttccaaatccttctgctccctgtggtcctgcagcacatcagcgaccacctgtgcaggtcccagctccagaggagcatcttcagcgccctggtggtggcctggtactcctccgcgtgccacgtgtccaacacgctgcgcccactcacctacggggacaagtcactctcgccacatgaactcaaggcccttcgctggaaagacagctgggacatcttgatccgaaaacactagaacaagagtgtggcaaagaacacccgtgctggggtcgggacgaggttgaagggtcttggtcaatgtacgtaatgagcagggtgggccccacgctgggaggacacgggctgggctgagcagggcctctagtggaacacatgggggtctcattgaaaagctctctgatgagcacctccttttgtgcaaagttaattttttctcgacaataaagatattccgtgtcttcacccctgaactaagacacagggagtatttcagaggccagcgtaggagtcatcgacaacgaaaagccgagaacccagggccagcagtggagcctcagcagaccagggcctggtccttgctaattgctgcagggtggagtttgatctggcagacccgatcctccttcatgaacacccagcaacctgagcaagtcccggccctgccctcagcgagcccggcaggcgtcccgggacagctcagtgttggagggccacctgaaccacgagccagggctggggcttgcatgtcattgtctatgacagcgtcaagactggcccttggcaccgtgctgtgtggaaaccctcccctctgagactccactgagacgtggctgagtgaaatcttcctcgtcagtggtcaaggtgtgtcatccatacagctccatgcctttgtcttttttaaatgtaattaaaaaaggaaccaactggcaaaaaa

SEQ ID NO: 69416 - DNA, 1108 bp, Homo Sapiens
  misc_feature (55)..(63): n is a, c, g, or t
accaaagttcttatgaattggaaaataatttgtttcaaagacggtgatgaaaggnnnnnnnnngtttaactttccaaaggtaatgctttcatgaagagttagaaatagcagttttagtaattagttgtaggaattctggttaagacttcaacattttaccttacttaaaagatttgctttatgcaacatttaatgcccagttttgcatggctctaaaaatctttaaaatgcaaaagcttttccagtgactggaagccaacacgacaagaatgaaatggtatgacctgtgaattagcctggtttataaaaaaataccagttcagagaccataaacaaaataaagaaactaagcaatccttaaattggatttagccttgggcaattagcagaaaaattcactcataaaaggatccacttttacagatattgttttttaaaatgtcaggaactggttttataagagtaaaaaagttaaaattaattgcatcttccataaagaatatgatggaaataattatatacgaaaaatgagacaataaaagtccatttataaagtgccttaatgtaccaaaaaggaggtcagatgtcctttatttacaaatcatatttaatcccatttacagaaaggcaaatattacactggagaggcagcataatagagtataaagaactctcaacttcgagtcagaagatctgaatctttttggctttgccactaattttctctgtgactttgagcaaatgagagtttttctgggcttcggttttctcatctgtaaaatgagaggtagaactacactgcttctaaagccagtccttgcttagatgtaaaattctgtgttaagcaatgtaaatatggttcttaagttttggaattacataacagggttctaccatattaataatctctgtaaaaactgattattccataataggtaggtaaaaacattatagaactgtgatcaaatacattttgagttcatgatttggctgctgtacaaaggtgcaaaaaaggcatagcattttggttactgatatacacgtgtaggttttcaggacccggccgtaatggccgaattcccgggcatatgtccggtaccgtcgactg

SEQ ID NO: 69417 - DNA, 744 bp, Homo Sapiens
  misc_feature (28)..(28): n is a, c, g, or t
  misc_feature (583)..(592): n is a, c, g, or t
atttgtcctcgagatagcttggcacttntgtgccagtggatacagtctaaattgcaggagtatatgtttaatagaccatacagcagaaaattggaggccgaagctgacaaaattggactactgcttgctgcaaaggcttgtgcagacataagagccagttcagtgttttggcagcaaatggagttcgttgatagcctgcatggccaacccaagatgccagaatggttatctacacacccttctcatggcaatcgagttgagtacttggatagacttatacctcaggctctcaaaattagagagatgtgtaattgtccaccactgtctaatccagaccctcgattactattcaaactcagcacgaagcattttcttgaagaatcagagaaagaagacctaaatatcacgaagaaacagaaaatggatactcttcctattcaaaaacaggagcaaataccattaacatacatagttgagaaaagaacgggcagttgaattaaaatttatgagacacaagatatatgaagaatgttgcagtccttatcattttatgttactttttaaaaaatgatgtttgaagtgnnnnnnnnnnggatattcagggtcaaatcatgtacattacagatattatctaaattcttctagaatttatttttcatgaaatattgatgtattttaatctatgttaaaatatcttcaatgaggaaaatgtcacagaataaatttatattacacattttaaaa

SEQ ID NO: 69418 - DNA, 987 bp, Homo Sapiens
gtatgaagtcacggcgcgccgaattcggcacgaggactgtctgggtctgagctggggagcggaagccacttgtccctctccctccccaggacttctgtgactcctgggccacagaggtccaaccaggctaagggcctggggataccccctgcctggcccccttgcccaaactggcaggggggccaggctgggcagcagcccctctttcacctcaactatggatctcctgccccccaagcccaagtacaatccactccggaatgagtctctgtcatcgctggaggaaggggcttctgggtccacccccccggaggagctgccttccccatcagcttcatccctggggcccatcctgcctcctctgcctggggacgatagtcccactaccctgtgctccttcttcccccggatgagcaacctgaggctggccaacccggctggggggcgcccagggtctaagggggagccaggaagggcagctgatgatggggaggggatcgtaggggcagccatgccagactcaggccccctacccctcctccaggacatgaacaagctgaatggaggcggcgggcgcaggactcgggtggaaaggggccagcttgggggcgaggagtggacccgccacgggagctctgtcaataagcccacgcggggctggctgcatcccaacgacaaagtcatgggacccggggtttcctacttggttcggtacatgggttgtgtggaggtcctccagtcaatgcgtgccctggacttcaacacgcggactcaagtcacccaggaggccatcagtctggtgtgtgaagctgtgcccggtgctaatggggcgacaacgacgagaagccctgtaccccccgctcactctatctgtggaggataactgaatttgctggatgccttcatctcacatctccccacagctcacctatgctcaactgaacgatctcgcaccgcaattaactaccattgatcggcggatcgaca

SEQ ID NO: 69419 - DNA, 2352 bp, Homo Sapiens
aaggctgcactttggcgtagagtacatagcatgcaacatgggaggcaggccttatgaaatgtatatacagaccccttggggtgaggggccccggccaggaggcactgagcaagggaggggtccatctcccgcctgccgggagtggggctctgggcaatctctaagggttgcatatccccagggagaggggacagctgccactcctgcctctgttatcccaacccaaaccggagagggtgctcagcaagaacacaggtccccagaagccatagaaggtgttggcatccctgtcattgaattcaggggtccaagaactgtttgcataaaatatcattagacctaagagatggtcaaaggcacaaagtttaaacatggggggggcgggtgttgagaggggtctgggataccctgaagcccagaggtgtgatttgttcccccttgcccagaagggtgactgttccactgggcctgtcaccacaggacattttccatgacaagcactcaccttcttggggaaggggcatcaggttggcacaggaaaggcccaggtgaggggccactctgtacattaatactttggtgattaatgtttggggagaggcaggattctcacccaggcttttgactcaaaccctctcactcagctggatatgaaacccagagtccatgctactcccagctctgacacaaggccaagcccacagaacactcccaaacgaggtcccgagagttagggaatagggtggaaaggattggagggcatcttctggaagagagcgctagggcagatcacagtttccgctccacaggttgctgtagacacagttcgctgcccgcagagatgatgggcaagtgattgtccatgtggtagctgataaggtgactgacactttcaaagcggtgatccttagtccgaaccacaccctcagggtccaccagtagcaaatgcttaggctgcccactctgcaagccagtgagcacatactggccaggtgtggtcgtgctctcccgtaccaggaagtccccattgagctgcagcagtgcctcagcctcccgccggctcagcttcccatggaaccagggctcccctcggagctgctcagccatggacaccgactggggaggtggaggcacgcgaagagcatcttcgaagggcttcatgtcaaacaggtcccggggtgcactgccattgatagcaggattggggggcccagcaccacccactgcttgccgggccttgtctaggttctggacgttgacataggagggatcatcaaaaagctctctgcctgctggacagggtggtggaggtggcatctgtttgcggacttctggatctcccccaacaggctgtcctacaggcaatgtagctcccaagtggctgggggtctgggcattgggtgcagtgggtcgagcagcccctggagcggctccttcccgaagcctcatgtctaccaccccccccaaggggggttccttccccgggaagtcattatagtactgatggtcaggtggctcttcctcctcctcatcccatgctgagccatcaaagccagccatcctgtcatgaggggtgaccagtttgggtgggttcctgaggtattgtttgaagcgcaactcgaaggcctggccaatggtgctgatgacatcctgggcaagcccttcgggacactccagaatgtggcaggctctctgattcacagggtctttggcaacataggcgacatactcggctgtgtccggatccccgccggatgcaaatgagatagattgcatgtggtggttggcgatgatctgtttgcagtctgcggccatgaggttgaggctgctggtggagacggtgagagtgattggcattccagcaaatttcaggttactcctccccaggatagagctgagcgggcggctacagggctttctcctccttgtcgcccccttagcacccggcacagcctcacacaccagactgatggcctccctggtgacctgagtccgggtgttgaagtccagggcacgcattgactggaggacctccacacaacccatgtaccgaaccaagtaggaaaccccgggtcccatgactttgtcgttgggatgcagccagccccgcgtgggcttattgacaaagctcccgtggcgggtccactcctcgcccccaagctggcccccttccacccgagtcctgcgcccgccgcctccactcagcttgttcatgtccagggcctcatggagtctccgcaccgcaccgcgggccgatttggtgccggatcacgccactgccagcttaggttaccgctccaactttctccccgggccctgcctcactggagaaactttattacactcacttcc

SEQ ID NO: 69420 - DNA, 371 bp, Homo Sapiens
acagaggcacacaggttattccctccctgaacctctcaactcaagggtaggaagaacaacccctcctgtcctaatccgtaatccaagagctgctccacaactctccccacctggctcacctgtcatgaggggtgaccagtttgaagtgggttcctgaggtattgtttgaagcgcaactcgaagccctggccaatggtgctgatgacatcctgggcaaacccttcgggacactccagaatgtgcaggctgagggcacagcagaggctgtcagtgagctgagcccactgggaggaggcacagacaggggcccatcatcttcctctgcaggaacccccattgagatctactttgagtgggtacagataacaaag

SEQ ID NO: 69421 - DNA, 1001 bp, Homo Sapiens
  misc_feature (166)..(166): n is a, c, g, or t
  misc_feature (593)..(633): n is a, c, g, or t
ctggccgatgcaggctttcgattttattgaaatatgttaaagctcatttgagtagttatcgtgctcagttcagacacctgtatcctcatatgtacgtccttctatggtatatttcactctctcagtacatctggacttgtgatacttgtacatgcaaatttctatntatatgcatatatattgttcatagacatccagtcttatctgatacagcgtttgctttatttccagttcttggaccagaacaataaaatacataagacatcgtttctatatggtcatatactatatagaataaagaattgttatgtaaattattaaatgagtatacagacctttacataaaaactaaggtacctcagtggaatctgctacagtgcttccccctccctacccctccattttgtttataaccttttagctatctaaataatacgtattccatactcaggatagctggttagctagcaaaagaattaacatttgtgatatttacttgcaaactttactgaagccatattcattatcttccttgtcaccaaggctgttgaccttaaataaacattaagttgattttgcacaacactgtattnnnnnnnnnnnnnnnnnnnnnnnnnnnnnnnnnnnnnnnnngggaaataattatgtttgtttccgcatatattcatttttaatgcattctgtaacttttctcgagtggtggtcattgagggtagggaagattttattttttaagttgtcgttaaggtatttcattagtgttcctgagtgtaaaacagttttttcccaaatacttatggcagataagagcatttttgtaaataataaactagcaccgtttgggtaaatttgcattattttttggacaggttcattgtcatgtaaaacaaatatctcaaaattcattttacatttagcaaaggtgcaacatttgtttttggagtttgagagatattttccttgtcttccatcattcaataaatactaaaattgataaccac

SEQ ID NO: 69422 - DNA, 1765 bp, Homo Sapiens
  misc_feature (39)..(39): n is a, c, g, or t
  misc_feature (87)..(87): n is a, c, g, or t
  misc_feature (179)..(386): n is a, c, g, or t
  misc_feature (1698)..(1711): n is a, c, g, or t
ccgcacggctttacgtctgctttgtgctttgccaatgtntctgcgtatccctgtctgtgataccgatacgccttgatgagtgtacgntccgcagcgaacgacgagccagcgatcatgagcgggagcgagagcgcccatacgcaaccgctctcccgcgcgtgccgatcataatgcagctnnnnnnnnnnnnnnnnnnnnnnnnnnnnnnnnnnnnnnnnnnnnnnnnnnnnnnnnnnnnnnnnnnnnnnnnnnnnnnnnnnnnnnnnnnnnnnnnnnnnnnnnnnnnnnnnnnnnnnnnnnnnnnnnnnnnnnnnnnnnnnnnnnnnnnnnnnnnnnnnnnnnnnnnnnnnnnnnnnnnnnnnnnnnnnnnnnnnnnnnnnnnnnnnaagaattcggcacgagggtgaatatgaaaagctttgtccagcactggaaaccttctcttggaagaaaagtcatggatattttaaaaagagagtgcaagtagcattaagatggatagcacataatggcacttgtctatgtacaaaacacaaactttagagcaagaagacctcagacaggaaactggaattttttaaagtgccaaaacatatagaaatgtttgaatgcatgggtcttatctaatttatctcttctggacccatgtttaaatacagttttatttcatgaagagaaatgaaaacccctacactgatatctgttttctatgggactgattctgaaattcttaactattaagaatattttaatagcagcatgacatttagcagtaatccattaagggcagtacctctaacaaggacgccttccagcttcagctatgttacttacgtttgatgctacttaaagtaatgaatgacgttttaaggaatccctaaccctactatcagaaaaggtgtttgttaaagagccttctcttgtgtgttacgcatgaactttggtctgtaggtgttaaatggaacctctccatgtgtatatagtatttccttgtataaagcactttactacctaccacttgtgttgtgaacgtttggtgactgctgttgaaagaaggaaaagggtgtgtgagaaagcctactgaagcagcagcactgccactacatgtggacaaaagtgaccatataaaagaagttgtgctatttaactctgaatacttggagaaactaggtgaagatgcaaccagaaaggagaatatgtatgcgtgaagtctcagctttgagctggaggctagattccaagatgacagccatgatgaaactttttaaaaaactaaaccagaagagactttaaaataagagaaagaaatcataaatgtagacatatgcttggctaaaggggaaatggactttaaattttaaagagctcatttgcaatgcacttgtatacacttcaaaaattattgtagacacagaatttgttatatttttgtgcttagtatttaaacctgaacattgaaacagttctcctccttgtctttcttaacagtaatagtcattatatttacctgttttttaacacaatgtatgtgatagtcaaaaaatcacagtttttcattattattcatcttctgtacccacgcataaccactatacatagtttcttttgtacttgaatatacaaaacatgaacacagtgccatatgaataatttcacatacagaacctttttttctctgaagtcctgtggacttgcaannnnnnnnnnnnnntgctttgttaatttgtttttatatttcatatatgtaataaaggaatatgatctg

SEQ ID NO: 69423 - DNA, 1031 bp, Homo Sapiens
  misc_feature (18)..(18): n is a, c, g, or t
  misc_feature (26)..(26): n is a, c, g, or t
  misc_feature (81)..(81): n is a, c, g, or t
  misc_feature (122)..(122): n is a, c, g, or t
  misc_feature (137)..(137): n is a, c, g, or t
  misc_feature (191)..(191): n is a, c, g, or t
  misc_feature (204)..(204): n is a, c, g, or t
  misc_feature (208)..(208): n is a, c, g, or t
  misc_feature (267)..(267): n is a, c, g, or t
  misc_feature (448)..(448): n is a, c, g, or t
  misc_feature (521)..(568): n is a, c, g, or t
  misc_feature (961)..(974): n is a, c, g, or t
caccctcatatttgtttnttggatgnttgaatctactatagattttatgcgctgacattgcagtatcataaggcgtacttnaacagaccctccagcttagcgtgtattacgttgtgctactnaagtatgatgacgtntaaggatccctaacctatatcagaaaagtgttgtaaagagccttctcttgtgtntacgcatgaactntgtnctgtagtgtaaaatggaacctctccatgtgtatatagtatttccttgtataaagcactntactacctaccacttgtgttgtgaacgtttggtgactgctgttgaaagaaggaaaagggtgtgtgagaaagcctactgaagcagcagcactgccactacatgtggacaaaagtgaacatataaaagaagttgtgctatttaactctgaatacttggagaaactaggtgaagatgcaaccangaaaggagaatatgtatgcgtgaagtctcagctttgagctggaggctagattccaagatgacagccatgatgnnnnnnnnnnnnnnnnnnnnnnnnnnnnnnnnnnnnnnnnnnnnnnnnaaatcataaatgtagacatatgcttggctaaaggggaaatggactttaaattttaaagagctcatttgcaatgcacttgtatacacttcaaaaattattgtagacacagaatttgttatatttttgtgcttagtatttaaacctgaacattgaaacagttttcctccttgtctttcttaacagtaatagtcattatatttacctgttttttaacacaatgtatgtgatagtcaaaaaatcacagtttttcattattattcatcttctgtacccacgcataaccactatacatagtttcttttgtacttgaatatacaaaacatgaacacagtgccatatgaataatttcacatacagaacctttttttctctgaagtcctgtggacttgcaannnnnnnnnnnnnntgctttgttaatttgtttttatatttcatatatgtaataaaggaatatgatctgaaa

SEQ ID NO: 69424 - DNA, 734 bp, Homo Sapiens
agctagagtctgatgtgtcttagaccatgtgtgcgtatctgaaccatcatccctgctctcatctcagctccctccaggcctgagcaccggttccttttgtcccatacgtcatgaagtcacactattgggaaacctgtgcttccctctccatggcttaactccctgtcagtgtcggagtgtataagaatgcttgtaaatactgtaatatatttattaatatttgaaaggcattcattcagtggacagtgggaattaactctcccaaggcaagtgaaaatgaatgattgacgtacgttgatttaacaatcttactagattttaattcttaaggatttcaaatgaaaccagaaggtggttatgtaagaggcttaaaatgatcttatgtttaaagagattctgttattagcaccatgaactcgtactatgaaatttttaagccttttatttttctaactatattactgtaggactggatattaggtgtcatataggaaacacaaaagttattgctgtttgctaaagcaaaatagcagaaaattttgtatatgcaaaactgttgaaggaccatagagaaatgtgtactactgacggggcttttactaggcttcctgcgtgtgtaaaagtcgaggtattgctggcattcagggtgacatgatggtactaaatgttttccattaaagtcttctattttaaaatttagagaaaaataaaatggctttccatcagaaaaaaaa

SEQ ID NO: 69425 - DNA, 325 bp, Homo Sapiens
aaaatcttactgtgtcaaaagaggcattatgttgcttgtgtgatatagtgaatagtgtccctccaaatttcatgtacacctggaatgtcacaatgtgacttaacagtagccacccctcacccccgcccttatctgtggtggatacatttgcaagatccccagtggatgcctgaaaccgcagatagtactgaaccttatatatactgtttgttttcctatgcatacatatccctatgataaagtttatgaatttggcacttaacagcagaactaataagatgaaagagttgtaacaatatactctaataaaagttatttaaaatgt

SEQ ID NO: 69426 - DNA, 895 bp, Homo Sapiens
tggtacggtcggatttccgggatatcgtcgaacccaacgcgtcgcgccggtagccgggctgggccagaacagcccaagatggccgacttcgatgatcgtgtgtcggatgaggagaaggtacgcatagctgctaaattcatcactcatgcacccccaggggaatttaatgaagtattcaatgacgttcggctactacttaataatgacaatctcctcagggaaggggcagcacatgcatttgcccagtataacatggatcagttcacgcctgtgaagatagaaggatatgaagatcaggtcttaattacagagcacggtgacctgggtaatagcagatttttagatccaagaaacaaaatttcctttaaatttgaccacttacggaaagaagcaagtgacccccagccagaagaagcagatggaggtctgaagtcttggagagaatcctgtgacagtgctttaagagcctatgtgaaagaccattattccaacggcttctgtactgtttatgctaaaactatcgatgggcaacagactattattgcatgtattgaaagccaccagtttcagcctaaaaacttctggaatggtcgttggagatcagagtggaagttcaccatcacaccacctacagcccaggtggttggcgtgcttaagattcaggttcactattatgaagatggcaatgttcagttggttagtcataaagatgtacaggattcactaactgtttcgaatgaagcccaaactgccaagggagttttattaaaatccatagaaaaatgcacgaaaatggagtatccagacacgccaattaactgaaaaacctatcaaacccaatgttcagaataccaccatttccaggggcccttggcgccccggcaggctttcccac

SEQ ID NO: 69427 - DNA, 2037 bp, Homo Sapiens
  misc_feature (780)..(798): n is a, c, g, or t
  misc_feature (1276)..(1309): n is a, c, g, or t
cagagaaccccaagtgacccccagcagaagaagcagatggaggtctgaagtcttggagagaatcctgtgacagtgctttaagagcctatgtgaaagaccattattccaacggcttctgtactgtttatgctaaaactatcgatgggcaacagactattattgcatgtattgaaagccaccagtttcagcctaaaaacttctggaatggtcgttggagatcagagtggaagttcaccatcacaccacctacagcccaggtggttggcgtgcttaagattcaggttcactattttgaagatggcaatgttcagttggttagtcataaagatgtacaggattcactaactgtttcgaatgaagcccaaactgccaaggagtttattaaaatcatagagaatgcagaaaatgagtatcagacagcaattagtgaaaactatcaaacaatgtcagataccacattcaaggccttgcgccggcagcttccagttacccgcaccaaaatcgactggaacaagatactcagctacaagattggcaaagaaatgcagaatgcttaaaggctgaatgtaggattcttcagtatgtggaaagacaaggattcaacgtgtggtcatatgataaataagtgatttataaacaagagtgatattttgctagggctttcaaagttaaccggttttctagcctcatggaatactgttgaacctatagcgttgtcttgattctttggtgttctctgccttgtaattttctgttactgctatatctacgtgtaaatcnnnnnnnnnnnnnnnnnnnggttaattctgccacatttaatgttggtgagagagtgatctatcctaatgacattttactgtttaaaaaagtttcctagccatgaagccctgctactgatttagacaaggtattatggtcattactttgtacccctatccttccaagcacttctggtacttcagtcgtttttactgatccaccaacacctaaagaggctatgctacagtctctagctaaatggaagacacattcatccttctccctctgactgctttgatcatcatttattgcatctcataactaattttctaaagtttggattgggacttttcaggtcctttttggagggcaaaggaagtgccagcttctctggggaacttgtttttaaatccaaagacttgaaccacattccctgcacatgaacatgtttgcttttatcccttctctcattgtctccttcccatcttagtaccattgtagttataaacatctgcannnnnnnnnnnnnnnnnnnnnnnnnnnnnnnnnnaacattcaagaactgctgacgtactgtggatgtagagtataaaacttgaaaaatgcagatgttgaaggaataataggtatcttgtgctttaatactttatggcaggattgtactataagcaaatgaattaaacagctatgtaaatcataaagaaaaactaaaaatgaaccaaagtgaaaggataacttccaggcagtatctttctattgtaacctgttatttaaggaaatactagtgatttcttctaaataggatgtaaaacttctttcaaattactcttcctcagtcctgcctgccaagaactcaagtgtaactgtgataaaataacctttcccaggtatattggcaggtatgtgtgtaatctcagaatacacaggtgacatagatatgatatgacaactggtaatggtggattcatttacattgtttacacttctatgaccaggccttaagggaaggtcagttttttaaaaaaccaagtagtgtcttcctacctatctccagatacatgtcaaaaaaagaaaggtgtttgtgcttccgttttgtttctgctcagtaatatagtcaagcaagtttgttccaagtgacccattgagctgtgtatgcatttttgtttatttcaataaaatatatttgtattatttgtccttcatactatccatccataccacactatcttctgtatcaggtagtctaatagaaatatacctgttttgttctgaaaaaaa

SEQ ID NO: 69428 - DNA, 734 bp, Homo Sapiens
tctgtagctcccaaaccagctgctaacagagcttctggagagtggactctgggactgagaacagactcaaggtgacctccaaggaaggactcaccccataccctcccctgcaagaagcgggaagcatcccagtaaccaaacctgaattgccaaagaaaccaaaccctggccttatacgaagtgttaatcctgagattccgggaagagggcccctggctgagagctctgatagtgggaagaaagtgccaactcctgccccgcggcctttgctgctgaagaaatctgtttcctcagaaaaccccacctacccttcagctccactgaaacctgtcactgttcctccccgactcgcaggggcatcacaagccaaagcatacaagtcactgggagaaggacccccagccaaccccccagttccagttctgcagagcaagcccttggtggacatcgatctcatcagctttgatgatgatgttttgcccaccccatcggggaacctggctgaagaatctgttggttcagagatggttctagaccatgtggaggcattacctttaacaagagagttaatcaataatctttttaaaagagctgaacataagcataattaggctgaaagaaactgggagaattatctcttgtcgtctttgccacttctgaagaactgcttcccccaatgaccctcagattctgataagtaaaaatttttaaaataataaaatagtgatttatct

SEQ ID NO: 69429 - DNA, 977 bp, Homo Sapiens
  misc_feature (153)..(188): n is a, c, g, or t
agggagagttggggtctttgggttcttctagacgttttgttttcccttcctggggagtttcttgcatgagtcttaacttaaaactacgtttccgccttctctttttccctcttcccccttcattccctcttgtttccttccatttgcggttcnnnnnnnnnnnnnnnnnnnnnnnnnnnnnnnnnnnncctttgttgtacaagtaacagagaggaggttttttttgtaactcattttgggggtggagggggccacctgggtggcaggggccctggagctctattgacctggtacactgctccgggactcctcccccgccaccctccgcgcatagggtccttggtctggaccctgccccccaaaagtagggccttgctcctctaccttgctctgagcacggagagccctgaccccaccagtaggctcgcccccagaagggcccaagtggccgtctaccgtcaccttccagactcccgcccctaacacccagtggctacagtgcgcctgtcggggcacctggagcgctcacctggttgaattcaaagtcccagaaggccccgctggcgtgaagccggccccttacattttgcgaagtgcattatagtccttgtttttctctccctcgtgggggcaacgacccctcccctggcagtaggggtggggtaggtgactctcgctagatccctccaaagcagaccggtggcgatgtcagcggatgtcacgagctcgttagctgcgttcggggaaggttggggcgtcagggagctctcggatcacagcagcccccgccctctcctaggcctggcccggcagagcccccagagtggaccccccagcgactggggtcttctccccactcctccctccttctggtctgatgcggcagcgcgggggctgcggggcctgtttgggacgaacagagctctcccttggtaagacttattttgttaataaatggaatacttggctatattcac

SEQ ID NO: 69430 - DNA, 1409 bp, Homo Sapiens
  misc_feature (335)..(346): n is a, c, g, or t
  misc_feature (1337)..(1346): n is a, c, g, or t
gtaaatatccagggaaccctgcccagactaatactgttggtggcataagagaatcaagccattctcaagagataacttcataaccagaattgtctgttggctagcagctgtcacagataggcagggcacttgggatatgacctttctgtccaggtgattcacagactagacctttcttatcctcctcctaaagttttgacttgggactctagtgttaagatgatgagcccgtgcatcaggtccttctgcactttggtggaagtctcccagggtaggtttcctatttgaaacagtggaatcatgtttccagtgataaagtttaatgacctcatccnnnnnnnnnnnnctcatctgccatttgtgtgtcttagatgggttttaattgcatgaatgtggctaatgtggttctcagaaattggtcagtatggcccaacatagcttctgctctgtcttactgactcaatacctttaggatttgtatcagagtttggataccagtgttagtggtggtgtcaccactacttaattgggagataatgaaaccaatcatggatgctgtttttattgggcatgtcatctaagagaggagaaatagctgggttttgggtctaattatgaataaggactgattcagaaaacgagtttatggtaggtagactaaagtttcacatcagactgtaccattgtgatttagacctatctaaaattcagagcatatcatctgggctacctcagggtcaccacccatgtattgggcttagtcaggattgacagatacattctcagctggcctgtcatataaaacatactgtcattgagcttaagctccgcttgttctgaggtttcacctccatgtgtttcattggtgcaaaagtggatctcttagttggtcacttaattctttctttttcagaaagatagtatgttcactggtatatttggtcactcttagaaccttccttcacattgttttttatgggacccatgaatggttagcctttcttttctattgtagaaggaaataaataggagtaaaaagaccattgtagtaaataagttcaaggggaacttgggaccagaaaccactgttatgtacaaaaaaatggcaaattcaataaactcaaatttaaaataatttttaaattaacagttatgataaattttatattttatacaaatagattgcttagaatggttctcaagaattataagagaaatgaactcacagtacaaaaattttataattactatacttgtgttttgtttgggggctgggaaatgtatttttacattgtagccaatcattttatatttgtcaatttaaatcttatgggtcnnnnnnnnnnatctctcttgatgtcagattttatagtctttttaaataaatccatttaattaaaacgttaaaa

SEQ ID NO: 69431 - DNA, 1240 bp, Homo Sapiens
  misc_feature (85)..(85): n is a, c, g, or t
  misc_feature (753)..(841): n is a, c, g, or t
  misc_feature (880)..(905): n is a, c, g, or t
cagctgacccatgctgcccagcagctcaagctggccagtaccggcacctctgagtatgccgcttatgaccagaacatcacacctntgcacacggacttctctgggagcagcactgaaagaatttgaaactgacttttggagctttccttcttttttcatttcaactgaaaatgctttaggtaaaaacctttccagtatgttcacctctagaatagccacccaaagaccttcctgaggctgcctcagaagcaccacttgctgttttgaatgactctactagtatgagaaggatgtgaaggtggttggctggttgggctttaacttcctgggattcataatttttaagcttggaagatagctgctgttcccatgatgggcacatttcctgagaagcttgaatgactgatgagcatagagcacccctgccttcctcaggaaacctgaccggcaggggctctctggcttcctgaaagcttcacctcttccctcgtttatatctcaactgtaagggcattttcaagcttctgttcatggaatgagcaactcagactgtctggagcttgctgagtacaaacacaccaccactaagtttcagaactttccttagaacttgggcaaaatgtggtggtaactcttaagtgcttttggtatctcttgagattctaacttttaaagagcaaccattaatgtgtaaaatgattcctattattcaagggttttttttctaatgaaaataaaatatttgattttctnnnnnnnnnnnnnnnnnnnnnnnnnnnnnnnnnnnnnnnnnnnnnnnnnnnnnnnnnnnnnnnnnnnnnnnnnnnnnnnnnnnnnnnnnccccagatttagggagttcccgggtttttttggtcacannnnnnnnnnnnnnnnnnnnnnnnnnattaaaaaggcggggagccgggggcgggccgttttaaacaacccggcctgttgtgatggtgggaacaacccgtgccccgtcgcggggagcatctcttggcgggggaggggaaccctatattgcgcgggggcgggggcaccattcttgggcgcgaccacatccctccacggagagattttttaaggctcgaggagggggaaaacatcttcaacatcttggaggcgcttctccgggtgtggtgctcaacccacgacgggcggataatagtctgccggttctgggaaaagatttgggctcaacaggaaggtatgtcctctgacaaatattttttgcga

SEQ ID NO: 69432 - DNA, 1399 bp, Homo Sapiens
tcatggaacgccaagaggagtctctgtccgcgcggccggccctggagaccgaggggctgcgcttcctgcacaccacggtgggctccctgctggccacctatggctggtacatcgtcttcagctgcatccttctctacgtggtctttcagaagctttccgcccggctaagagccttgaggcagaggcagctggaccgagctgcggctgctgtggaacctgatgttgttgttaaacgacaagaagctttagcagctgctcgactgaaaatgcaagaagaactaaatgcgcaagttgaaaagcataaggaaaaactgaaacaacttgaagaagaaaaaaggagacagaagattgaaatgtgggacagcatgcaagaaggaaaaagttacaaaggaaatgcaaagaagccccaggaggaagacagtcctgggccttccacttcatctgtcctgaaacggaaatcggacagaaagcctttgcggggaggaggttataacccgttgtctggtgaaggaggcggagcttgctcctggagacctggacgcagaggcccgtcatctggcggatgaggctaagaatcttgtagaatattccgtggttgcttcttgaccaagggaaatacagtctggctgtgagagacttaaaatctcttgaggagcgctctggagaatggctgaaggagaggaaacaggagccttgagcagtgtaattacaaacaaataggttggcatagtcttaagtctttgagtctagagagatttgagttttgttttgcctgtggaggcaattgggggtttcaggtcaaagagagggtgggccttgtgaggtgtggggaagccctgggaccctcactccccttccagtgtgtaactggattggctcccaccagcccagaagatttacgacgtgggaaatggtatacttggattaaaatatttcatccagatttgtttacatctagagagaaccccttgtaggttataaggaaactttttaacattcttccttgaatatattttctgtagctgaaaatgtttgtgaagtggctgtcaactacacatcgcatgagtagaggggctctgggtcggggtttcatatgcagcagagcagctcccttgctgccgtccatcaagagccctcaacacaagagtttgttataaatagaaataaacgacaaaaagtagaggggtatgtttaagtacactattagatgtgactgactaccttgaaacctgatttttttccatggggagaaacagtgcttgaattctgcatgccccccttgcatctagcaccttttggtaggggtggaaggagggtgtcagggagaatgattaggagataatggaggggaggggaaacttgcgttgtgtaatagcatttgaagagcacttaaaaaaaa

SEQ ID NO: 69433 - DNA, 1156 bp, Homo Sapiens
tcatggaacgccaagaggagtctctgtccgcgcggccggccctggagaccgaggggctgcgcttcctgcacaccacggtgggctccctgctggccacctatggctggtacatcgtcttcagctgcatccttctctacgtggtctttcagaagctttccgcccggctaagagccttgaggcagaggcagctggaccgagctgcggctgctgtggaacctgatgttgtagttaaacgacaagaagctttagcagctgctcgactgaaaatgcaagaagaactaaatgcgcaagttgaaaagcataaggaaaaactgaaacaacttgaagaagaaaaaaggagacagaagattgaaatgtgggacagcatgcaagaaggaaaaagttacaaaggaaatgcaaagaagccccaggaggaagacagtcctgggccttccacttcatctgtcctgaaacggaaatcggacagaaagcctttgcggggaggaggttataacccgttgtctggtgaaggaggcggagcttgctcctggagacctggacgcagaggcccgtcatctggcggatgaggctaagaatcttgttagtgtcacttttgacattagcaagatgaacccttaaccctcgattcaattgccttacgcacgcttttcacagtgactagccaaggggaggtggggttgatttctgttcctaactacacctgcatatgtcagggctccagtcagcaaaaggtatagatgttgcctctaggcatgaggtcattggtcacattctacttggagacagtgattgcattcattgatttcatggttaattgctagttggtaggtaaaggcctctagatgattagcaatcttgataaaagaggcctagtaatgttcttttgaggttagaaatccttgctgctaggacagtctctgtgacaggttgcgttgaatgatgtcttccttatcaatggtgagcccaccagtgaggattactgatgtggacagttgatggggtttgtttctgtatatttatttttatgtacagaactttgtaaaaacgaaactatttaaaaaacaagaataacatttttagcatctttattcaaggagatttatggacttcaatttgtctatcaaacattaaatagctttttattacaacctccaaa

SEQ ID NO: 69434 - DNA, 754 bp, Homo Sapiens
  misc_feature (667)..(685): n is a, c, g, or t
  misc_feature (690)..(690): n is a, c, g, or t
atcatagaatagatttatttacctgaaaccatgtctgtgcgacgctcattgttaccagcacagaaagaaacaaactgatctctatttacagtctaaagtcaaacatgcgcagtgataaattgacatttagcattttattaagataaatgcatcacaatatttgtattgcaccaacatctgtctactgcttctgatttcattaaataagttacatttaatacagtgcgaaatagctgtctgcacactcagaaaataactgaaaatgaactggaggcctacattttaaccattcaacacctgtagtgtttttaatgaatttataaataagcaaactgtacagggccaattaaaaagtagcatgttccaatgtcactggagagggatctggctacttacaaccgaaggcatgcattacaattgaatactgtacatgtatataagctatgacattttgtcagagaaatgtggcgacttggctgacggcttccaagttctagataaggttacagagcctcattcctcttgcagcaaagaaaccaaacttctctggagaggctttctgattaagctaaattgtacatctgtaatcagtattttgatttaaaagctaacaaccccatttggtaatacacatttcctccacataacacaaagtgagttgggaagnnnnnnnnnnnnnnnnnnncccancatcagtcatgcacagggttgggagatgtgttgctaaaacgcacatgcacgcaaccgaacaccc

SEQ ID NO: 69435 - DNA, 1177 bp, Homo Sapiens
  misc_feature (998)..(998): n is a, c, g, or t
cagtgcttctagatgctaccctgtgtgggcggcacctcagggacagtaaatcagaaatgctggtcttgaaaccttgaaaagatcaagctgaatgttccttttcatctgtcgctgttgatcttcatctatttaaataggtattctaacgtttcctctctgtatttcatgaagctgatttcctctctctttccttttcagcaatactggagtaaccgcttcctaaaccattttgcagaaatgtaagggtgttcggttgcgtgcatgtgcgtttttagcaacacatctaccaaccctgtgcatgactgatgttggggaaaaagaaaagtaaaaaacttcccaactcactttgtgttatgtggaggaaatgtgtattaccaatggggttgttagcttttaaatcaaaatactgattacagatgtacaatttagcttaatcagaaagcctctccagagaagtttggtttctttgctgcaagaggaatgaggctctgtaaccttatctaagaacttggaagccgtcagccaagtcgccacatttctctgcaaaatgtcatagcttatataaatgtacagtattcaattgtaatgcatgccttcggttgtaagtagccagatccctctccagtgacattggaacatgctactttttaattggccctgtacagtttgcttatttataaattcattaaaaacactacaggtgttgaatggttaaaatgtaggcctccagttcattttcagttattttctgagtgtgcagacagctatttcgcactgtattaaatgtaacttatttaatgaaatcagaagcagtagacagatgttggtgcaatacaaatattgtgatgcatttatcttaataaaatgctaaatgtcaatttatcactgcgcatgtttgactttagactgtaaatagagatcagtttgtttctttctgtgctggtaacaatgagcgtcgcacagacatggtttcaggtaaataaatctattctatgtancgcagccccttttccctttttaaaaaaccttgtcggccgcccttcgcccctttaaaaagactttcataaaaccaattccttttgcgccgcgccggggcccccagtttgtgtttaactgtgaacacatgggcccacaaaaatctggttttctcctcaagcgaagaattaccctggcgact

SEQ ID NO: 69436 - DNA, 1069 bp, Homo Sapiens
  misc_feature (37)..(37): n is a, c, g, or t
  misc_feature (42)..(42): n is a, c, g, or t
  misc_feature (95)..(440): n is a, c, g, or t
  misc_feature (479)..(529): n is a, c, g, or t
ggcggaccttgaaaacccagcacgcgcctttacgtcntgctnttctgcctttgctacatgtttcctcgtatcccctgatctgtgatacggtatannnnnnnnnnnnnnnnnnnnnnnnnnnnnnnnnnnnnnnnnnnnnnnnnnnnnnnnnnnnnnnnnnnnnnnnnnnnnnnnnnnnnnnnnnnnnnnnnnnnnnnnnnnnnnnnnnnnnnnnnnnnnnnnnnnnnnnnnnnnnnnnnnnnnnnnnnnnnnnnnnnnnnnnnnnnnnnnnnnnnnnnnnnnnnnnnnnnnnnnnnnnnnnnnnnnnnnnnnnnnnnnnnnnnnnnnnnnnnnnnnnnnnnnnnnnnnnnnnnnnnnnnnnnnnnnnnnnnnnnnnnnnnnnnnnnnnnnnnnnnnnnnnnnnnnnnnnnnnnnnnnnnnnnnnnnnnnnnnnnnnnnnnaagaattcggaacgaggggagcggccgcggctgtaggcnnnnnnnnnnnnnnnnnnnnnnnnnnnnnnnnnnnnnnnnnnnnnnnnnnngagatggagtctcgctctgttgccaggctagaatgcatggcacaatctcaactcactgaaactgactaaaacacagcagaggaactcagacctggacatttttctgcttccatttacaatttcatttatcctcatgcctcacgtttgggtttagaaacctttgtctgctgaagcaggaagaccagagtatcttctgcggctgctgctgacctggccccaaccctgaagattccaactgagtggttctgatggggagagtctaagcatctgcactcccactgctatgtgacttttcagggtgtctgctggctgggaatcaatgctgtacagagcccaccgccaggccagctgtcaggaaacaggggctctaggcccagcttcaccacttaggagctatggctttgttcagaaacattgtgactctcttacccacacattcctctgctggaaggggagattgacaaaccagcatcatctctaatttactacaaaagccctcactggaaattattcttaacttagcagctggtaggatccatt

SEQ ID NO: 69437 - DNA, 772 bp, Homo Sapiens
cacattgcaggagggagacaggtctcactgtgttgctaggcggtcttgaactctgggctcaagtgattctcccaccttgacctcctaaatgttgggataacaggtgtgagacagtgcacctggccgaaatagctcaagtttctgaaaaacaaatctgaatctatttgttattcttagcgtcactggtctggctttcagaattaacatacaaggttgccacacctagttctgcccagctttatgtcttttattccagtattccaccaaagtttgttttcctgcattccagttctcaagtcttaagataaagattgtacttgacagtttagtatatccataaaactatttgaggtggttaaggttcttgggttcattttccttaatactttgctgaatattgtagattgtaggcaatgaaaaagtctactaaattaggaaaaccttgaataattaggtatcctaggtaagagcccctaaacatcaagcaatctgtgagtctgtaaagaaataaatattttttggattattcttatctaattccacccctgttggaagatgatttctttgttctttgcaactatggaagctgtgaaaatcatcacaagtgcctctgaaagcgagtgttaggttggttagagggtttaatattttctgcaatggtttgtaggaattttaataaatgtagtatattttctgagatgattttgtaaaagtactattttaaatatcaaatcaaccaataaattcacatttgtgttaggaacagaaaaaa

SEQ ID NO: 69438 - DNA, 429 bp, Homo Sapiens
ttaaataaattattataacctttcagaaatgctgtgtgcattttcatgttcttttttttagcattactgtcactctccctaatgaaatgtacttcagagaagcagtattttgttaaataaatacataacctcattctgaataatgtccctcattttgactataactgtgcttggtttcaaaagcaaaattaaacaaaaatctcagtcccctccgaagtgaactttgtgttaccctgcgtcagaaatgccaagttgtgtttacttttcattcagattttgtgaatatgaacatgctgttataggatctacagatgaatatttaactcaatagaaaaattattttagaacacattgtattggtattacaaccagattatattcttgacgttgacttcattaaaattatctacaatttcctaataaaaaaaa

SEQ ID NO: 69439 - DNA, 1785 bp, Homo Sapiens
  misc_feature (19)..(19): n is a, c, g, or t
  misc_feature (1324)..(1455): n is a, c, g, or t
  misc_feature (1463)..(1463): n is a, c, g, or t
  misc_feature (1470)..(1470): n is a, c, g, or t
  misc_feature (1472)..(1504): n is a, c, g, or t
  misc_feature (1634)..(1656): n is a, c, g, or t
gcgaggggtgcgggtggtnccgcccggagcccgcagcccgctgcgccccggggcgcgtctcccggcggtgggagggggcggcccccactcggttcctggcccctcgcggccccgtcagcctcccgctcggggtgcgccgcccttcgtctgggtctccgcccccaggacccgcggccgagagctccggagcgcggcttccccggccggctgcgcgatgggctgcgggaactccaccgccaccagcgcgggcgcgggccaaggccctgcaggagcagccaaagatgtaacagaagaatccgtaacagaagatgacaagaggagaaactatggaggagtatatgttggcctaccatctgaagctgtcaatatggtgtccagtcaaacaaagacggttcggaaaaattagaagaaaataacatcatgactcaagaatcaagagcttgctcatcagtttggaaggaatttggctccgtgggacgttgtaatgtgcacagacatttccaaggaaattctaaacagtcacccttcccttttgcattcccccaaatcttaagtgtatacataaaaccctgggtacatattgttgtggtaatagaagggaattggttaaacagtacacttgtttatggaactttctgtggccacctacgaaagacaagttaacaaactgtcatggaggctgttgttgcccagccagggccgctgcattttgacaacatttccaccctggccactcagcacatttcatggaggtcatgtcttttcactgatacttttttgatagtttttatataacaaaatccttattctatttataacttaagatgataaggcactataaattaatgacctaaaataatatatttgtctgttatcttttgctatttctacttcactttaatttttagctgtaaaattggtaaatggattcttacaactatctctttccatttcttactatttggttttcaaatttcatttaaatgtcagaatttccttttttaggaacaatgtgtatttcattgcactatttaaaaataaactcaaatttgcatgccatatgcacattttgattacatttttattttctttcgtgaaaggcatgtgcaactacaaatacttcatagctgtttgggttgctcattctacatcacgacaatctcatcatattatttctataacttttcaaggacttgcgatggatggttagtgggatatctggaaattaatttgataatgacttgtgtatctacttagtattgcaatgtaagttactcaattcaccaatgtatttcaacaattaaaacatttttatccctcttcnnnnnnnnnnnnnnnnnnnnnnnnnnnnnnnnnnnnnnnnnnnnnnnnnnnnnnnnnnnnnnnnnnnnnnnnnnnnnnnnnnnnnnnnnnnnnnnnnnnnnnnnnnnnnnnnnnnnnnnnnnnnnnnnnnnnaagaacanggaccangnnnnnnnnnnnnnnnnnnnnnnnnnnnnnnnnncgccccggggagcgggcccacacccgaaaaaaatacgtttccagaaaatctgaggggtctccggggatctccccggcattaacaccaacaagagaatcccgtcccgtggtatacgcccccggcgtcttgnnnnnnnnnnnnnnnnnnnnnnntttctcaaggggagtaattcggggattgaccccacaggggggggctccttcatcaaaattggaatgtcggggtcctggccggtcacctttgaggggattttgggagaaaagttggtcccaaaaatttat

SEQ ID NO: 69440 - DNA, 749 bp, Homo Sapiens
ttcccaaagtgctgggatgatagggtttccagcatcttggacagagctgttattgaacacaattgttgtctgcaagcaaattatataataatattaccttcgaagaacttggagctcttttagagatccctgcagctaaggcggaaaagatagcatctcaaatgataaccgaaggacgtatgaatggatttattgaccagattgatggaatagttcattttgaaacacgagaagccctgccaacgtgggataagcagatccaatcactttgtttccaagtgaataaccttttggagaaaattagtcaaacagcaccagaatggacagcacaagccatggaagcccagatggctcagtgaatccttgcagaacttctgtgcacatgacatctttttccatgttgtgcagatcagtttcactatctccaaagcatttgcatcatgaccttatacatttcaatcccttttatgctggattccgtttaaagaagacattattagagcaggaagtacaagcatttaaaatatgtagttcccatatatttcagggtctctgtgtattaagctaactcagatgttttgaaagctttttctttaaacagaggtgaaatatctgtggctaaaaagtttgagatttgtgataactttgtagtcatgtaaaacttaagtgcttcatgcctctccaaatgtggttattctaataaatggagaaatgagccaaataaaagtagtactttgtttttagataaa

SEQ ID NO: 69441 - DNA, 1233 bp, Homo Sapiens
gggggagctgggagaaagatggcggcagccgtgcgacaggatttggcccagctcatgaattcgagcggctctcataaagatctggctggcaagtatcgtcagatcctggaaaaagccattcagttatctggagcagaacaactagaagctttgaaagcttttgtggaagcaatggtaaatgagaatgtcagtctcgtgatctcgcggcagttgctgactgatttttgcacacatcttcctaacttgcctgatagcacagccaaagaaatctatcacttcaccttggaaaagatccagcctagagtcatttcatttgaggagcaggttgcttccataagacagcatcttgcatctatatatgagaaagaagaagattggagaaatgcagcccaagtgttggtgggaattcctttggaaacaggacaaaaacagtacaatgtagattataaactggagacttacttgaagattgctaggctatatctggaggatgatgatccagtccaggcagaggcttacataaatcgagcatcgttgcttcagaatgaatcaaccaatgaacaattacagatacattataaggtatgctatgcacgtgttcttgattatagaagaaaattcattgaagctgcacaaaggtacaatgagctctcttacaagacaatagtccacgaaagtgaaagactagaggccttaaaacatgctttgcactgtacgatcttagcatcagcagggcagcagcgttctcggatgctagctactctttttaaggatgaaaggggccaccaacttgctgcctatgggatcctagagaaaatgtatctagataggatcatcagaggaaatcaacttcaagaatttgctgcccatgctgatgcctcaccaaaaagcaactacagctgatggttccagcatcttggacagagctgttattgaacacaatttgttgtctgccaagcaattattataataatattaccttcgaagaacttggagctcttttagagatccctgcagctaaggcggaaaagatagcatctcaaatgataaccgaaggacggatgaatggattttattgacccggattgatggaataggtcattttgaaacacgagaaaccccggccaccgtggggataagcgagatccaattcactttgtttcccaggggaataacccttttgggagaaaattatgccaaacagccccccgaatgggacaggcccaaggcctt

SEQ ID NO: 69442 - DNA, 968 bp, Homo Sapiens
  misc_feature (739)..(739): n is a, c, g, or t
gtgactgtccaccgccgcgggattgacttctaaagactcttggtacgtgaggaagaaacccggaagaggaagaggaaagcaaaggagtcagggatggctcttcctcagggtctattgacattcagggatgtggccatagaattctctcaggaggagtggaaatgcctggaccctgctcagaggactctatacagggacgtgatgctggagaattataggaacctggtctccctggagtaggcaggggagtgtccattggcagcacctgcctcctgagtgtctcccaggccatcaccatcagccccaggagctcaggtgggcagagcttaaagggaacgcccccaagcacgctggctcctgtgtgttcctcagctggctcctccctggtcaatatcattgttctcatgcacgtgaccggcaagtggagcaacaaaaataccacgaagacaaaagatctgggatactgttctgctgctgatcacgagggcaccagagagtcgctgacgcggcactgctgtccttccctgatgtgatctgcctggggctcatgctctggggcagcagctccatcgtttgcatcctgcacaggcacaagcggcgggtccagcacattcataggaccagcgtgtcccccacatcctcccctgagtccggagctaccaaaaccatcctcctggtgagcacgtttgtgtccttttacactctctcttcaactttcaagtttgtttggctcttttgnaataatcccagtcagctggtggtgaacatctctgcaatgatcagtgcaggtttcccaactgtcagcccctttcttctcatgagtggagactccagtgtatccaagctttgctttgcttggctgaataacacaaaaacccctgatcttttcagaaatatgtgaattggatatgtctgtacaatgtttatgtttcttcattgatctctatagacccataaacacggttatg

SEQ ID NO: 69443 - DNA, 1048 bp, Homo Sapiens
  misc_feature (976)..(986): n is a, c, g, or t
ttacggctaggtacgaggctgggtgtcgaatcggcacgaggcggagacgcgcgcgtcggggtttaacgcgtttctgggccgccgtaagcccggcctaggggcagctttgactcgagagccggctataggcgcatggaaggttccctggaacgggaggcgccagcgggggcgctggccgccgtgctaaagcacagctcgacgttgccgcccgaaagcacccaggtccggggctacgacttcaaccgcggtgtgaattaccgcgcactgctggaggccttcggcaccaccggcttccaagcaaccaacttcgggcgcgctgtacagcaagtcaatgccatgatcgagaagaagctggaaccactgtcacaggatgaagaccagcacgcggacctgacccagagccgccgcccacttaccagctgcaccattttcctgggatatacatccaacctcatcagttcaggcatccgtgagaccattcgctaccttgtgcagcacaacatggtggacgtattggtgaccacagctggcggcgtggaggaagacctcatcaagtgcctggcgcccacatacttgggcgagtttagcctcagggggaaggagctccgggagaacgggatcaataggatcggaaacctgctggtgcccaatgagaattactgcaagtttgaggactggctgatgcccaatcctggaccagatgggtgatggagcagaaacacagaggcgtgtaaggtggaccgccttctaaagaatgattcggcccggtggcgccagggggatcaacaaaccagagttccgtgtattacctgggcccagaagaaccacaatcctgttgtttagtcccgcacttacagaacggtccgttgggcgcaaatgatcttccttcattcctacaaagaaacccggcctggtctggacactgtgagacctggggctctcacacccggccctcgccactgcgggggaacacccnnnnnnnnnnncaaccccatcgcccccctggggggccaccgttacacaccccggtgtgtgtcctcccccaggg

SEQ ID NO: 69444 - DNA, 830 bp, Homo Sapiens
ccggcagtaactataacggtcctaaggtagcgaggcctgggtggcgaattcggcacgaggcttgcgggtcgcaccccgcccaggcccctctcccgccccaggtctctcagtcttttttctcagggcgtgtagcttcctgcacacccggaagcagatcgcgcggggaaaagatcacagcgctgcgcgtcagtttccgtctacctggactaaacatttgcttcgccccgtctgcctgaatcgaacgtgcacttggcagtcttcccttgtccatacccgtttcctggggatcgctacggaccttaaaataccagcaacagccccttcgccccaaggtcttgctctgtcagactagagtacagtgccatgatctccgctcactgcagcctcaacctcctgggctcaagcagtctttctgcctcagagtgctgggattacagacgggagccaccacgccaggcctacgagatttgacttgtaaagaattaattatattgactgagagagaagcccagaagaggaagaagaggaaagaaaaggagtcagggatggctcttacacagggacctttgacattcagggatgtagccatagaattctctcaggaggagtggaaatccctggaccctgtgcagaaagctttgtactgggatgtgatgttggagaactacaggaacctggtcttcctgggtaaggataattttgctctagaagttaagatctgccctcgtgtatttttgtattttctctgttgtctttcttggggagcccttccattatttgactgagactgaagccttgttgactcacaaataaaaagcttcataatgctg

SEQ ID NO: 69445 - DNA, 2529 bp, Homo Sapiens
cggcaacggcagtaactataacggtcctaaggtagcgaggcctgggtggcgaattcggcacgaggctgcggagacgcgcgcgtcggggtttaacgcgtttctgggccgccgtaagcccggcctaggggcagctttgactcgagagccggctataggcgcatggaaggttccctggaacgggaggcgccagcgggggcgctggccgccgtgctaaagcacagctcgacgttgccgcccgaaagcacccaggtccggggctacgacttcaaccgcggtgtgaattaccgcgcactgctggaggccttcggcaccaccggcttccaagcaaccaacttcgggcgcgctgtacagcaagtcaatgccatgatcgagaagaagctggaaccactgtcacaggatgaagaccagcacgcggacctgacccagagccgccgcccacttaccagctgcaccattttcctgggatatacatccaacctcatcagttcaggcatccgtgagaccattcgctaccttgtgcagcacaacatggtggacgtattggtgaccacagctggcggcgtggaggaagacctcatcaagtgcctggcgcccacatacttgggcgagtttagcctcagggggaaggagctccgggagaacgggatcaataggatcggaaacctgctggtgcccaatgagaattactgcaagtttgaggactggctgatgcccattctggaccagatggtgatggagcagaacacagagggtgtaaagtggacgccttctaagatgatcgcccggctgggcaaggagatcaacaacccagagtccgtgtattactgggcccagaagaaccacatccctgtgtttagtcccgcacttacagacggctcgctgggcgacatgatcttcttccattcctacaagaacccgggcctggtcctggacatcgttgaggacctgaggctcatcaacacacaggccatctttgccaagtgcactgggatgatcattctgggcgggggcgtggtcaagcaccacattgccaatgccaacctcatgcggaacggggccgactacgctgtttacatcaacacagcccaggagtttgatggctctgactcaggtgcccgaccagacgaggctgtctcctggggcaagatccgggtggatgcacagcccgtcaaggtctatgctgacgcctccctggtcttccccctgcttgtggctgaaacctttgcccagaagatggatgccttcatgcatgagaagaacgaggactgagcggctgcggtcccaggaaggtcttaccccctcttctatttattaatttgcagacccagcccctcccctactttttggtcagctacgtctctagaataagatggtatctgaagtccttccatgtctgtgtctcggtccttggtcctgttggtgggtcccctggcttcagcctgctccatcctctgcctcataggcctcctctcgccagcactggacgctgcctcccatggcggtcagcaggcagggctctgttgggtggtaggccagcgactgcaccacaccggaacccacaggcagggccagagccagcgcaccctccaccaggtcccagaagaacaccttcccgtcctcagaacagctgaccacatgtgtgtcacgctcgctcaggcagcagtccagcttgtattcctggttcttatggcccttgtactcgcccagcagctcccctgtgtctttgtccaggagccgcaatgtggagtccaggctggacaccagggtgcactgcccatcccggctgaagcaggtgcaggtgatggggctgcccacgtagtctgagaagagctgccccatccttaggtcatagcgtctcacgcggccatccacggagcctgccaggatctcgtggtctgacaccttcacactggacacgccatctctggcctcatccagcgtctgcactggctcaggcctccgtgagcggcaatcccaacagcggatactggaatcaatagagccggacaggataactgtggcctcttcattaaactgcaccgtgttcaccttccctgcgtggccccggaatttgcgcacgacctgccctgatgccacatcccacagaaccaccgccttgtccccgccgccggagcagagactactgttgtcaaaggagccggccgcatccagcacctcgtagccgtggccgctgtacgtccgcagcagcgtcccccgaagcgggttccacagcttcagcgtcttgtcactgccgcacgtcaggcagtaattgccatccacattaaatcgtacggctcgcactgccccctgcccgcagtccagcgtcttcaaccgtttctgcggcagctctggaggccgcggctttggctcagggaaagccatgctcccaggactccttccttgcagccttaaatcggtctgtacggaaaattcccctcgtgccgaattcgccacccaggcctcgctaccttaagaccgttagtagttactgccgtcgttataacccgggggttgacactgagctcgttc

SEQ ID NO: 69446 - DNA, 540 bp, Homo Sapiens
gggtcccacaaacccggaagcggatcgcgtggagtgaaggtcacgccgcggcgcgattgacttctaaagagtcatgctgtgtgatgaaaaagcccagaagagaaggaagaggaaagcaaaggagtcagggatggctcttcctcagggacacttaacattcagggacgtggccatagaattctctcaggaggagtggaaatgcctggaccctgcacagagggctttatacaaggatgtgatgttggagaactacaggaacctggtctccctgggaatctctcttcctgacctgaatattaactccatgttggagcaaaggagagagccctggactggtgagagtgaagtgaaaatagcaaaaaatccagatgggagggagtgcatcaaaggtgtgaacacagggagcagctatgcattgggaagcaatgcagaagacaaaccaattaaaaaacaacttggagtatcctttcacttacatctgtctgaactggagctatttccagatgaaaaggtaataaatggatgtaatcaagtcgaacc

SEQ ID NO: 69447 - DNA, 504 bp, Homo Sapiens
gcattgaccagaatgggcatagccagtcctcaaacttgcaagtaattctcattgggcaccagcaggtatcctgatccatattgatcccgttctcccggagctcctgccccctgaggctaaactcgcccaagtatgtgggcgccaggcacttgatgaggtcttcctccacgccgccagctgtggtcaccaatacgtccacctgcagccacaaggcagtgaatttggcccaagaaggaagcccctgccctcattctgggcagaacttctaacctcatccttgtccagtgactcttatgagggagctctgctacaaaacaaaacttgattctattcctctgcttataacagacccctatctgcccatctcacttaaacgatcaataactgcattgcccattgacccagaggccaaggccacggtctcaccaggtccccaccatgttgtgctgcacaaggtagcgaatggtctcacggatgcctgaactgatgaggttggatgtatat

SEQ ID NO: 69448 - DNA, 714 bp, Homo Sapiens
agcagggagaaatgccttgcctgtcgcccaggaagtgggctcggcacccataactaacacctcccacccttggaaccatgtcttctgggggtgagatgaccattctgggtctaagactgtttcaaagagggctcatagactgactggtccagaagacagagggtacaacagtggcatcacagtgaccagtgtcatggggagctgggcgggcccagccaaaccctcctttcttcctagagcccagccagcaggcaggagttcctggaccctcaggacagtgaacttccagacctcagggcaggtctatgggccactgcaggagatgagaccagccttctgtgttcacctaacgatttatactgtgtatctgtctttgatggaattttgtaactttttatatttttttatgcaaaagcagcttcttaacagatggcattttctgtgactctaggcctcacaaaagagccagagttctggacccatgtttggagcatttgtagccttattctcttgcgtgtgaatctcttaccctgaaaaaaagccataatgaattaagccagactgaccacttgcttggagtgtgtgcttgaaaaaaccagagcaatactgttgggtattgtatcaggcttcagtacaaactggtaacaccaatgtggatcctgacagctttcagttttagcaaaaatacacgtgaaatctgactaccatttaaaa

SEQ ID NO: 69449 - DNA, 989 bp, Homo Sapiens
  misc_feature (812)..(812): n is a, c, g, or t
  misc_feature (814)..(814): n is a, c, g, or t
  misc_feature (907)..(907): n is a, c, g, or t
  misc_feature (962)..(962): n is a, c, g, or t
caaagcacgagccttgtctgtatctgggcagcaggtgttccatgctgctaggtggcgggggtcgggggtcttctgtttcactaacaggaacaaagacagaaaccatgacagggctgccccgccaggccccggtgggtttgtctgcacttggtgctcctgcccacaccagccactttggtgacaatgacccttccaagaatctttggttcaaggagcaccagttccctcttcattcttgaagcagggagaaattgacctttgccttgtcgcccaggaagtggggctcggcacccataactaacacctcccacccttggaaaccatgtcttctgggggtgagatgaccattctgggtctaagactgtttcaaagaagagctcatagactgactggtccagaagacagagggtacaacagtggcatcacagtgacagtgtcatggggagctgggcgggcccagccaaaccctccttcttcctagagcccagccagcaggcaggagttcctggaccctcaggacagtgaacttccagacctcagggcaggtctatgggccactgcaggagatgagaccagccttctgtgttcacctaacgatttatactgtgtatctgtctttgatggaattttgtaactttttatatttttttatgcaaaagcagcttcttaacagatggcattttctgtgactctaggcctcacaaaagagccagagttctggacccatgtttggagcatttgtagccttattctcttgcgtgtgaatctcttaccctgaaaaaaagccataatgaattaagccagacaaaaantnaaaaccctataaactaaaaaaaacatgtcggccgccctccggccctcgaagaagctttctaggacattttcgttgggcggcgcgggcccccgntaaggtaaggtgaaacatgggccataagctggtttctctaaggaaatccctgggncatgaactaagggccttgggattcctc

SEQ ID NO: 69450 - DNA, 1041 bp, Homo Sapiens
  misc_feature (87)..(87): n is a, c, g, or t
  misc_feature (89)..(89): n is a, c, g, or t
  misc_feature (202)..(463): n is a, c, g, or t
  misc_feature (511)..(528): n is a, c, g, or t
tctatgtcttcgttcccactttgattactgatttttgtctctcaggggcgactatgaaaacccacacgcgcttttacgtctgccctntntgctttgctacatgtctctgcgtatccctgatcttgatacgtatacgcttgagtgactgtccgctccccagccgacgaccggcgcagcggtcatgagcgaggagcggagagcnnnnnnnnnnnnnnnnnnnnnnnnnnnnnnnnnnnnnnnnnnnnnnnnnnnnnnnnnnnnnnnnnnnnnnnnnnnnnnnnnnnnnnnnnnnnnnnnnnnnnnnnnnnnnnnnnnnnnnnnnnnnnnnnnnnnnnnnnnnnnnnnnnnnnnnnnnnnnnnnnnnnnnnnnnnnnnnnnnnnnnnnnnnnnnnnnnnnnnnnnnnnnnnnnnnnnnnnnnnnnnnnnnnnnnnnnnnnnnnnnnnnnnnnnnnnnnnnnnnnnnaagaattcggcacgaggtttgatgttggagcggccgcggctgtaggcnnnnnnnnnnnnnnnnnncatacttttctgtgtatcccagaatcatcttctttggggtctacaaccatcttaatgaacttcctgtacctgctgggagaagttctgaacaactatatctgggatacacagaaaagtatggaagaagagaaagaaaagcctaaattggaatgagatccaagtctaaacgcaagagctagattgagccgccattgaagactccttcccctcgggcattggcagtgggggagaaaaggcttcaaaggaacttggtggcatcagcaccccccacccccaatgaggacaccttttatatataaatatgtataaacatagaatacagttgtttccaaaagaactcaccctcactgtgtgttaaagaattcttcccaaagtcattactgataataacattttttccttttctagttttaaaaccagaattggaccttggatttttattttggcaattgtaactccatctaatcaagaaagaataaaagtttattgcacttctttttgagaactatgtta

SEQ ID NO: 69451 - DNA, 1418 bp, Homo Sapiens
cagtcgacggtaccggacatatgcccgggaattcggccattacggccggggagccggtccaggcctctggcgaacatggcgcttgtcccctgccaggtgctgcggatggcaatcctgctgtcttactgctctatcctgtgtaactacaaggccatcgaaatgccctcacaccagacctacggagggagctggaaattcctgacgttcattgatctggttatccaggctgtcttttttggcatctgtgtgctgactgatctttccagtcttctgactcgaggaagtgggaaccaggagcaagagaggcagctcaagaagctcatctctctccgggactggatgttagctgtgttggcctttcctgttggggtttttgttgtagcagtgttctggatcatttatgcctatgacagagagatgatatacccgaagctgctggataattttatcccagggtggctgaatcacggaatgcacacgacggttctgccctttatattaatcgagatgaggacatcgcaccatcagtatcccagcaggagcagcggacttaccgccatatgtaccttctctgttggctatatattatgggtgtgctgggtgcatcatgtaactggcatgtgggtgtaccctttcctggaacacattggcccaggagccagaatcatcttctttgggtctacaaccatcttaatgaacttcctgtacctgctgggagaagttctgaacaactatatctgggatacacagaaaagtatggaagaagagaaagaaaagcctaaattggaatgagatccaagtctaaacgcaagagctagattgagccgccattgaagactccttcccctcgggcattggcagtgggggagaaaaggcttcaaaggaacttggtggcatcagcacccccctcccccaatgaggacaccttttatatataaatatgtataaacatagaatacagttgtttccaaaagaactcaccctcactgtgtgttaaagaattcttcccaaagtcattactgataataacattttttccttttctagttttaaaaccagaattggaccttggatttttattttggcaattgtaactccatctaatcaagaaagaataaaagtttattgcacttctttttgagaaatatgttaaagtcaaaggggcatatatagagtaaggcttttgtgtatttaatcctaaaggtggctgtaatcatgaacctaggccaccatggggacctgagagggaaggggacagatgtttctcattgcataatgtcacagttgcctcaaatgagcaccatttgtaataatgatgtcaatttcatgaaaagcctgagtgtattgcatctcttgatttaatcatgtgaaacttttcctagatgcaaatgctgactaataaagacaaagcttccctg

SEQ ID NO: 69452 - DNA, 2248 bp, Homo Sapiens
  misc_feature (57)..(95): n is a, c, g, or t
  misc_feature (98)..(132): n is a, c, g, or t
  misc_feature (180)..(188): n is a, c, g, or t
  misc_feature (1462)..(1473): n is a, c, g, or t
aaaaaaattttttttggaatcaaccacactaaataagggggccggcctatcgcgagnnnnnnnnnnnnnnnnnnnnnnnnnnnnnnnnnnnnnnncgnnnnnnnnnnnnnnnnnnnnnnnnnnnnnnnnnnncagtcgacggtaccggacatatgcccgggaattcggccattacggccnnnnnnnnntttctgggaaaaggcttgtgaacggcgtttctgcgtctgccgtggacagcgaagctgctgcggttcctgagccggaggagtgcctgtgaagaaaacggggtattgccctgaggcttatattctgcctcagttgtcttttcttgaaatattataaatcagaatgtctgcacagtcagtggaagaagattcaatacttatcatcccaactccagatgaagaggaaaaaattctgagagtgaagttggaggaggatcctgatggcgaagagggatcaagtatcccctggaaccatctcccagacccagagattttccgacagcgattcaggcagtttggataccaggattcacctgggccccgtgaggctgtgagccagctccgagaactttgccgtctgtggctcaggccagagacgcacacaaaagaacaaatcttggagctggtagtgctggagcagtttgttgccatcctacccaaagagctacagacttgggttcgagatcatcatccagagaatggagaggaggcagtgacagtgctggaggattggagagtgaacttgatgaccctggacaaccggtttctctccgtcgacgaaaacgggaagtactagtagaagacatggtatctcaagaagaagctcagggattaccaagttctgagcttgatgctgtggagaaccagctcaagtgggcatcctgggagctccattccctaaggcactgtgatgatgatggtaggactgaaaatggagcactagctccaaagcaggagcttccttcagcattagaatcccatgaagttcctggcactctcagtatgggtgttcctcaaatttttaaatatggagaaacctgtttccccaagggcaggtttgaaagaaagagaaatccctctcgaaagaaacaacatatatgtgatgaatgtggaaaacacttcagtcagggctcagcccttattcttcatcaaagaattcacagtggggagaaaccttatggatgtgttgagtgtgggaaagcattcagccgaagttccattcttgtgcaacaccagagagtccacactggagaaaaaccttacaaatgtcttgaatgtgggaaagcctttagccagaattcggggcttattaatcatcagagaatccatactggggagaaaccttatgaatgcgttcagtgtgggaaatcgtatagtcaaagctcaaatctttttagacatcagagaagacacaatgcagaaaaacttctgaatgttgtgaaagtttaagaaattgnnnnnnnnnnnngaatcagccctcaggtctttttcttcagaaatgaagacaaaatttaaaatatgaaatgatgcagaatagttttttccctattgactgtcagaaaatccactggggaaatgtaaaaatcttcactcaccattatgatatttatcttgaaagaaatggtgtcatacctgcctagaaactgaaattttaaacttaattcaggtcttaatgcctaaattttccatgtgatgtttatagtctgtattacttctccaaataatgaactacctgattcattgtccctttcttgaaagtttcttttttaagacaaatacattatttctgcattgatcattgaaatgttctctatatggatacattcccttatatattaaaaggcaacaggaattacaaagtctgaaaaccattttaaaccatcttttaaaaatttacccttatttccttttacctaatttgaatatgcatttgagaaaataagaggataaaggatggctaagagcctcaaaatgaaccataagatctcagataagaagtgatggtgataaaacatcaaaaagtgaatggaacaccttgattgaggaagatatgcaaatactttgatctaagaattgaaatgtatcaagaatttatattttgcctgcaggaaaattcaaaagctactcatcctctctataatttggagtcatcttactaatgaaaataatgttttcccatatattattaaaaagcatacagtctaaataataaacagttgtaaaataatgaaggtagaaattat

SEQ ID NO: 69453 - DNA, 545 bp, Homo Sapiens
gcatctttaacatggaagtacttcttactgatgattacattttttaaaatcatgcctgccagcccatctaagccaaattcaaacaccactctgcattaaatgaaactgcagtaggaaagctgagcacatagcacccaactgatcggaaagaaacgtaccatgtttaataaaattccagattcctgtggtcgttgtccataaaaatgctttgcagtgttggatatatggtttgcaaaagcaagcaaatcctccacagttccatatctgactgatgacaaccatggtacctcttggccactaagcagcagagacttagaacgctcatcgttttgattactgtcttgacacatggtcattagactgggttcataaactgctggctcttcacttgcataaagattttccataatgtctattacatcagacacatttaaatgtttaattaataaatcaatctctgttaatcctcacgaccacctcatgagactctccagaaagagcaacattaatggagtacatgagcactggaagtgacacctcgtgcc

SEQ ID NO: 69454 - DNA, 428 bp, Homo Sapiens
tttttgtttgcctcaagctctcttgcctatgtaatttttaaaagcatataatttaatgaaaataaaaactctttagcacgagaccatgttcctgaaaatgcacaaaagcctacagttcaacaatgtatcatctctataaaatggaacacaaagatctggatgtagttcttttgaactagtaccataacatcttggaactacttctagataaaataattgcacgccatgggttaccctgatatggagtatagtaagaaaagtagtctactctaagctcatgttatcacatattagtaaaagtggcttcaatggatagttgaatctgctatttacttctaaaacccttttgagagttaaataaggaccccaatagacattttaactgttatttatagatcaaaaaaaccacgtgaacactgaaaacttgc

SEQ ID NO: 69455 - DNA, 942 bp, Homo Sapiens; identical to SEQ ID NO: 6929
  misc_feature (789)..(789): n is a, c, g, or t

SEQ ID NO: 69456 - DNA, 1057 bp, Homo Sapiens
ctatcttactcggcagatcacagagggaaggaagattatgataaggctgctccatgagcagatcattaatgagggcaaagataaaatgttcctgatagaaaaattgatcaagctgcaggatatggagaagaaagcaaaccccagctcacttgttctggaaaggagagaggtggagcaacaaggctttttgcatttgggggaacatgatggcagtcttgacttgcgatctagaagatcagttcaagaaggtaatccaagggcctgatgactcttttggtaaccagacaccaatcaaataaggggaggagatgaaaatggaatgatttcttccatgccacctgtgcctttaggaactgcccagaagaaaatccaaggctttagccaggagcggaaactgactaccatgtaattatcaaagtaaaattgggcattccatgctatttttaatacctggattgctgatttttcaagacaaaatacttggggttttccaataaagattgttgtaatattgaaatgagcctacaaaaacctaggaagagataactagggaataatgtatattatcttcaagaaatgtgtgcaggaatgattggttcttagaaatctctcctgccagacttcccagacctggcaaaggtttagaaactgttgctaagaaaagtggtccatcctgaataaacatgtaatactccagcagggatatgaagcctctgaattgtagaacctgcatttatttgtgactttgaactaaagacatcccccatgtcccaaaggtggaatacaaccagaggtctcatctctgaactttcttgcgtactgattacatgagtctttggagtcggggatggaggaggttctgcccctgtgaggtgttatacatgaccatcaaagtcctacgtcaagctagctttgcacagtggcagtaccgtagccaatgagatttatccgagacgcgattattgctaattggaaattttcccaataccccaccgtgatgacttgaaatataatcagcgctggcaatttttgacagtctctacggagactgaataag

SEQ ID NO: 69457 - DNA, 1828 bp, Homo Sapiens
  misc_feature (295)..(374): n is a, c, g, or t
ggaattcccgggatgaccagaagtttggagtccgctgacgtcgccgcccagatggcctccaggctgaccctgctgaccctcctgctgctgctgctggctggggatagagcctcctcaaatccaaatgctaccagctccagctcccaggatccagagagtttgcaagacagaggcgaagggaaggtcgcaacaacagttatctccaagatgctattcgttgaacccatcctggaggtttccagcttgccgacaaccaactcaacaaccaattcagccaccaaaataacagctaatnnnnnnnnnnnnnnnnnnnnnnnnnnnnnnnnnnnnnnnnnnnnnnnnnnnnnnnnnnnnnnnnnnnnnnnnnnnnnnnngctcccaacagattctcctacccagcccactactgggtccttctgcccaggaactgttactctctgctctgacttggagagtcattcaacagaggccgtgttgggggatgctttggtagatttctccctgaagctctaccacgccttctcagcaatgaagaaggtggagaccaacatggccttttccccattcagcatcgccagcctccttacccaggtcctgctcggggctggggagaacaccaaaacaaacctggagagcatcctctcttaccccaaggacttcacctgtgtccaccaggccctgaagggcttcacgaccaaaggtgtcacctcagtctctcagatcttccacagcccagacctggccataagggacacctttgtgaatgcctctcggaccctgtacagcagcagccccagagtcctaagcaacaacagtgacgccaacttggagctcatcaacacctgggtggccaagaacaccaacaacaagatcagccggctgctagacagtctgccctccgatacccgccttgtcctcctcaatgctatctacctgagtgccaagtggaagacaacatttgatcccaagaaaaccagaatggaaccctttcacttcaaaaactcagttataaaagtgcccatgatgaatagcaagaagtaccctgtggcccatttcattgaccaaactttgaaagccaaggtggggcagctgcagctctcccacaatctgagtttggtgatcctggtaccccagaacctgaaacatcgtcttgaagacatggaacaggctctcagcccttctgttttcaaggccatcatggagaaactggagatgtccaagttccagcccactctcctaacactaccccgcatcaaagtgacgaccagccaggatatgctctcaatcatggagaaattggaattcttcgatttttcttatgaccttaacctgtgtgggctgacagaggacccagatcttcaggtttctgcgatgcagcaccagacagtgctggaactgacagagactggggtggaggcggctgcagcctccgccatctctgtggcccgcaccctgctggtctttgaagtgcagcagcccttcctcttcgtgctctgggaccagcagcacaagttccctgtcttcatggggcgagtatatgaccccagggcctgagacctgcaggatcaggttagggcgagcgctacctctccagcctcagctctcagttgcagccctgctgctgcctgcctggacttggcccctgccacctcctgcctcaggtgtccgctatccaccaaaagggctccctgagggtctgggcaagggacctgcttctattagcccttctccatggccctgccatgctctccaaaccactttttgcagctttctctagttcaagttcaccagactctataaataaaacctgacagacctatgaaaaaaa

SEQ ID NO: 69458 - DNA, 445 bp, Homo Sapiens
  misc_feature (14)..(14): n is a, c, g, or t
  misc_feature (25)..(25): n is a, c, g, or t
  misc_feature (31)..(31): n is a, c, g, or t
  misc_feature (67)..(67): n is a, c, g, or t
  misc_feature (78)..(78): n is a, c, g, or t
  misc_feature (129)..(129): n is a, c, g, or t
  misc_feature (322)..(322): n is a, c, g, or t
  misc_feature (379)..(379): n is a, c, g, or t
  misc_feature (382)..(382): n is a, c, g, or t
aaaaggccttaaanaaaaaaaggtncctttnccccaaaaacccttaagggaaaccctttttggttgnaataacggaanaccttgaggcaggaaggtggcaaggggccaaaatcccaggcaaggccaaancagggctgcaaactgaagaactgaaggctggaaaaggtaacgctcgcccctaaacctgaatcctgcaaggtcctcaaggccctggggtcatatactcgccccatgaagacagggaacttgtgctgctggtcccagagcacgaagaggaagggctgctgcacttcaaagaccagcagggtgcgggccacagagnatggcggagctgcagccgcctccaccccagtctctgtcagttccagcactgtctggntgntgcatcgcagaaacctgaagatctgggtcctctgtcagcccacacaggttaaggtcataagaa

SEQ ID NO: 69459 - DNA, 850 bp, Homo Sapiens
cagtcgacggtaccggacatatgcccgggaattcggccattacaggccgggggcaggtccgctgacgtagacgcccagatggcctccaggctgaccctgctgaccctcctgctgctgctgctggctggggatagagcctcctcaaatccaaatgctaccagctccagctcccaggatccagagagtttgcaagacagaggcgaagggaaggtcgcaacaacagttatctccaagatgctattcgttgaacccatcctggaggtttccagcttgccgacaaccaagctcaagcaagccaagttcagccaccaaaataacagctaataccactgatgaacccaccacacaacccaccacagagcccagcagccaacccaccatccaagccaaccaagcaaatacccagatcccaacagattctcctacccagcgccactactgggtccttctgcccaggagctgttactactctgctctgacttggagagtcattcaacagaggccgtgttgggggatgctctaggtagattttctcccatgaagcttactacgcacagccttctcagcaatgacagacaggtggagaccaacatggcctatataccccattcagacataggacagactccttaacacaggtcctgctcgcggagcagcaggagaacaagcaaaaacaaaacaatgggacgaagcaatacctcgacttaacgccccaacggaacgtacaacacaataggaccaaccagaacccgggaagggactcaacggaagcaaaagagtgacacacgcaaaggacctcaggagtctatccacagcccaagagctaggccaaaagggacaccaagacaag

SEQ ID NO: 69460 - DNA, 810 bp, Homo Sapiens
  misc_feature (44)..(85): n is a, c, g, or t
  misc_feature (89)..(123): n is a, c, g, or t
  misc_feature (499)..(499): n is a, c, g, or t
ccaagactgtatagactcactatagggcgctacgcgtttttatnnnnnnnnnnnnnnnnnnnnnnnnnnnnnnnnnnnnnnnnnnccgnnnnnnnnnnnnnnnnnnnnnnnnnnnnnnnnnnncagtcgacggtaccggacatatgcccgggaattcggccattacggccggggagtctgcactggagctgcctggtgaccagaagtttggagtccgctgacgtcgccgcccagatggcctccaggctgaccctgctgaccctcctgctgctgctgcttggctggggatagagcctcctcaaatccaaatgctaccagctccagctcccaggatccagagagtttgcaagacagaggcgaagggaaggtcgcaacaacagttatctccaagatgctattcgttgaacccatcctggaggtttccagcttggccgaaaaccaactcaacaaccaattcagccaccaaaataacagctaataccactgatgaacccaccanacaagccaccacagagcccagcagccgaaccaccatccaacccagccaatcaaatacccagatcccaacagattctcctacccatgccactactgggtccttctgcccaggagctgttactctctgctctgacttggagagtcatcaaaagaggccgtgtagggggatgcttaggtagatatctccctgaagctctaacacgccttctcagcaactgaagaaggtggaagacaacatggccttataccccattcaagaatcgccagcctccttacccaggtcctgctcgagggctgaggaagaaaaccaaa

SEQ ID NO: 69461 - DNA, 779 bp, Homo Sapiens
  misc_feature (91)..(125): n is a, c, g, or t
agaaaacaacgcgcaaagaacgatcacctatgtgggcacgctatcagcgaacgacgagcgcagcgaagctagctgagcgaggaagcggcgnnnnnnnnnnnnnnnnnnnnnnnnnnnnnnnnnnncagtcgacggtaccggacatatgcccgggaattcggccattacggccggggagtctgcactggagctgcctggtgaccagaagtttggagtccgctgacgtcgccgcccagatggcctccaggctgaccctgctgaccctcctgctgctgctgctggctggggatagagcctcctcaaatccaaatgctaccagctccagctcccaggatccagagagtttgcaagacagaggcgaagggaaggtcgcaacaacagttatctccaagatgctattcgttgaacccatcctggaggtttccagcttgccgacaaccaactcaacaaccaattcagccaccaaaataacagctaataccactgatgaacccaccacacaacccaccaacagagcccaacacccaagccacatccaacccagccaaacaattacccagttcccaacagattctcctacccaggccactactgggtccttctgcccaggacctgttactctctgctctgacttggagagtcattcaacagaggccgtgttgggggatgctcacggcagatttctccctgaaagctctaccaaggccttctcagccactgaagacggtggagaccaagcatggcctttgccccatcagcatcgcaagcctccttaccag

SEQ ID NO: 69462 - DNA, 2081 bp, Homo Sapiens
  misc_feature (1381)..(1448): n is a, c, g, or t
  misc_feature (1620)..(1650): n is a, c, g, or t
gggtataggaaaaagtaatttatgaagtaagcttcagtggcttaatcaaactaaggatagtctaacaacggagcaagatcctcatctgagagtgcttaaaaggggatccccagagaccattaaccaatacgggaacgggtatctagctacggatgtcttacttggagtttatttatgcttcagaatacagtggttggcccggtgcatgaatatacccatattggggtgtggatatgtgaagcttttccaaatagagctctcagaagaattaagtttttacttctaattatttggcattacttggagttaaattggaatagagtattaaatataaagtggtagattcttatgtgttttggtattagcccagacatctgtaaggttttggcacgggtgacagacaaaatcggttttaaaatcatatccagcacaaaaactatttctggctgaatagcacagaaaagtattttaacctaactgtagagatcctcgtcatggaaaggtgccaaactgttttgaatggaaggacaagtaagagtgaggccacagttcccaccacacgagggcttttgtattgttctactttttcagccctttactttctggctgaagcatccccttggagtgccatgtataagttgggctattagagttcatggaacatagaacaaccatgaatgagtggcatgatccgtgcttaatgatcaagtgttacttatctaataatcctctagaaagaaccctgttagatcttggtttgtgataaaaatataaagacagaagacatgaggaaaaacaaaaggtttgaggaaatcaggcatatgactttatacttaacatcagatcttttctataatatcctactactttggttttcctagctccataccacacacctaaacctgtattatgaattacatattacaaagtcataaatgtgccatatggatatacagtacattctagttggaatcgtttactctgctagaatttaggtgtgagattttttgtttcccaggtatagcaggcttatgtttggtggcattaaattggtttctttaaaatgctttggtggcacttttgtaaacagattgcttctagattgttacaaaccaagcctaagacacatctgtgaatacttagatttgtagcttaatcacattctagacttgtgagttgaatgacaaagcagttgaacaaaaattatggcatttaagaatttaacatgtcttagctgtaaaaatgagaaagtgttggttggttttaaaatctggtaactccatgatgaaaagaaatttattttatacgtgttatgtctctaataaagtattcatttgataaaaaacacacaacaaaccctaaacacacaaaccaccttaannnnnnnnnnnnnnnnnnnnnnnnnnnnnnnnnnnnnnnnnnnnnnnnnnnnnnnnnnnnnnnnnnnntcaatccactcatgtcactcgtccaccctttccccctttccctttccctcaatcggattgcccatccctcacctccttttacactttccctatcccttatacagccttttcgctttggcgtcacccgcgaccctcccccatgtaaaatacttttccgattctgaactcacannnnnnnnnnnnnnnnnnnnnnnnnnnnnnntacccttcatttgctccacatcccacattcccccacccccttccccttgccgctcctctcccgtctacaccctcctatcactcttgtgtgccccgccaatagcgcgtccgctcctcgtaccgcctcccccctccccgcatatatatatttccccgcccctcccgcacacagcacagtatgtcttacaccccccacaacaccactttcttcaccgccgcgcgtatacacacacgcgtgttttcacagtccgtgtaccccttttttacacctgccacccttcatacatagcgcctccccctcccgccatatccttacatctttcattctcgcaattatcaccaaatcagccatacctttatctgcacccgcgcctattgaaactcctactactcacccagccacatgcgaccctcttatccgcttccaccgtt

SEQ ID NO: 69463 - DNA, 994 bp, Homo Sapiens
  misc_feature (915)..(934): n is a, c, g, or t
tcggctgtatctagaggaccccgatgagtaaatctgagcgggatctgagatgccagccaagtgtgatcctgcttagtccttcgatgccatcagcactctgaggggagaatatctgttctttaaagacagatatttttggcgaagatcccactggaaccctgaacctgaatttcatttgatttctgcattttggccctctcttccatcatatttggatgctgcatatgaagttaacagcagggacaccgtttttatttttaaaggaaatgagttctgggccatcagaggaaatgaggtacaagcaggttatccaagaggcatccataccctgggttttcctccaaccataaggaaaattgatgcagctgtttctgacaaggaaaagaagaaaacatacttctttgcagcggacaaatactggagatttgatgaaaatagccagtccatggagcaaggcttccctagactaatagctgatgactttccaggagttgagcctaaggttgatgctgtattacaggcatttggatttttctacttcttcagtggatcatcacagtttgagtttgaccccaatgccaggatggtgacacacatattaaagagtaacagctggttacattgctaggcgagatagggggaagacagatatgggtgtttttaataaatctaataattattcatctaatgtattatgagccaaaatggttaatttttcctgcatgttctgtgactgaagaagatgagccttgcagatatctgcatgtgtcatgaagaatgtttctggaattcttcacttgcttttgaattgcactgaacagaattaagaaatactcatgtgcaataggtgagagaatgtattttcatagatgtgttattacttcctcaataaaaagttttattttgggcctgttnnnnnnnnnnnnnnnnnnnngcctacagccgcggccgcaagattattccctttagttgagggttaattttagcttggcac

SEQ ID NO: 69464 - DNA, 1035 bp, Homo Sapiens
  misc_feature (110)..(166): n is a, c, g, or t
  misc_feature (230)..(230): n is a, c, g, or t
  misc_feature (237)..(237): n is a, c, g, or t
  misc_feature (258)..(258): n is a, c, g, or t
  misc_feature (284)..(284): n is a, c, g, or t
ttccgattgaaagcggccatgacccaacgcattattggatagctcatcatagccaccccagctttacacttatgctcccgctcgtatggtgttggaatgtgagcgatacnnnnnnnnnnnnnnnnnnnnnnnnnnnnnnnnnnnnnnnnnnnnnnnnnnnnnnnnnttgcccctcgagccccaagaatcgcaccgagtgggaggagcaaacagatataagtatgtgtgtnaatgtantagtgagctgttatgtatccnccagcaatgtccaaagtgatcagagntactagatgacttattacaatgttcagatcccactcctcatttcctcctctctcagtgacctgtctacccccaagctttagaactgagctctctccaacttagaactcattagagtttgttgcattagtgattgaatctcctcatgaaagttttttgaccaatgacagtagagcccctttaagctagccaggcccaagatagggaagcactgctggtttacatttctgctctttctaattcagttgtctattgcatgcagacatcccctgcccgacttctccattatggaaggctaaggccatccttccttgtccagtttctctacctacacactaacatgccttttccccatggagtgaactctgccagttgtctttggacattttctgcagatgcaggctcagttctgctcttttgttcccacccacttctagatcttcctccatttaatcccttattcttataaggagtctaatttttgtgtattgtccttgattagggcagctgacagctttacaccaaagctgaagtctctcacttaatcctaagcaaggggctagggagaactaagatatccttcccatatcaagggatataggttactagaagggtggaggtctcttaacaggctcactcacctttcagagtttaaattatggtcaggcttaagaagctctctcttgtgactgagtgtattgcatagacatgtctgtgaaaataaaagcacccattttgctaaggctttctgag

SEQ ID NO: 69465 - DNA, 1619 bp, Homo Sapiens
ctgagtgatctaaatttttcttgcttgtgatcattagctaagacaaggagtgttaaaggttttctaaatgcaaacacatacgtttctgcatttcagaagtcagtcttgatagtaaatcctacaaactctcaactttctgcattgtattttaagtctatacaatgttagagcacatggtaatgtgggacagagttgattatatgatagcatgagaaatttgcactggttggtgttacaaaccaatgatctaaccagcatactctccaaatatgaaaaagtaaaaacatctcattaggtttggaagagcctaaggtagtccatacaggaagtttgcctgagaacagagaggagcctgttgattggcatggctcatgatgcctttcttgtatgaattatcaaaactgatactgagttgcccctagaaaacagccttccagaatatgtttgcttatttatggtggaagaggaagtgagaacaagatgagagtttcccttaaagtgaggagaatcattatacaactttgcaactgaagtatgtttccttgtagcaaacctttggtttattttatcgtcaaatcaaagccaccctcagttttttgtatggtgccatcaacctaaggaggacaatcaaataacctattgtttgccttggattcagtatatctactaagtacacagtctcgtataccttcaaaccagttacttgactaaacttccaccatattaccttagttcttcctatgccctttcctctgtgccaccacaaatcagagggaaagactgcagtacttctagaaagttgtggacttctaagaaagagccaggcttccatctcactatcccttgatcattatctctgaagtccctacctgcacttccctgattgccctgtagcaacaccagcatggtgggaattggagggaaagattgtggaaaatccctaaagggtcattgttcatgacgttattttgaattgtaaaattgtgagccactcacatttcaattacaaaaagaacagaactcttaatcacgttgtgaagattaatttcttgccattttctggattagcacagaagcttgtatcaatgaagagtatttaggaggggaatagggggaaaattgtatttttctgttcaaactctctccttctatttgtgtttccttcacccctctccctccaccacactgtgttggtcaaatgatactattctatgaaaccctgagctatagttgtcaaaagtaactatggattgtgattagtcctctgtgggtgcttccttccctcttttttctccctcactctctttctcagtctccactctggtaaatggaaaaggtgatgtcgaagaattgatgcttgcttggactcatgttgtatctgtgactatgctattagctgtctcctttttccttcctatatgggtagaattcttatgacttatgaagttcccttcttgataagtaggttaaatgcacaatgtggtactgttttatagtttctagatggttgtataaagcaaaaagttaatgtggttatgtgtttttaaagaaaataagtgattggtcactaaactctgtccttttttcattattacaatttctctctgttttccaacgaa

SEQ ID NO: 69466 - DNA, 761 bp, Homo Sapiens
tccacacatagctgataaaacagctttgaagagtcccaggcaacacacacagagggaaatggtagatacgtgggcatctttgtattttcacattaaaatgcaatgtattcagacccaagtagatagataataaaagtggcattcaagttgggaatggtagcacaagcctgtggtctcagctactcaggaggctgaaatgggaagatcacttgagcacaggagtttgaggttttagtgcactgtgattgcacctgtgaatagccactgcacttcagcctgagtaacatagcaagaccccatctctttttttaaaatgttacatttataatcagtgaggaaaatataaactatacaataaatgaaagggtcattggccaattgtttggagggaaaaaatacaccatgttctaaaataaatttctagtgatttattgtgactttcatgcatttggatgattttaaagattttatataaaaatgaaaccatagccttacgagaagaaaatataaagaaaaacttgtatagtcttgggaggggggattatattatgtgaaacattaagtaaaatatttattttttaaatattaaaaaactaaaaactgtgctttagaagtcaccaaaaaattaaagggcaggctgggcatggtggatcacacctgtaatcccagctttgggaggctgaaatgggagaatcacttgaggcggggaagttcgagaccagcctgtgcaatataacaagacccccatctctccaaaaaaa

SEQ ID NO: 69467 - DNA, 2899 bp, Homo Sapiens
  misc_feature (1221)..(1229): n is a, c, g, or t
  misc_feature (2081)..(2081): n is a, c, g, or t
  misc_feature (2083)..(2083): n is a, c, g, or t
  misc_feature (2203)..(2251): n is a, c, g, or t
  misc_feature (2331)..(2391): n is a, c, g, or t
  misc_feature (2492)..(2492): n is a, c, g, or t
  misc_feature (2636)..(2636): n is a, c, g, or t
gaattgtttcgcagaggaagatggcatctgtgctttaaatttctcattactgggttagaaaacaaagagggagtgccctgcacattttcttttgtgcttttaaatgtttcttaagttggaacaggtttcctcgggcctgttttgactgattgctggagtgcatttgatagttaaaaattactaattggttttatttcccttcacactctgcctccccacttctccccccgttactgaaaaataaccattttagtgtcaggctagaaattgaattgctgagttttgtgtatcctttaaattaaaaaccacaagtgtttattgtagtggttaaactgtagcatctcagcatctgggtggaagctgcctatatttcttcccagtttaactggggaccatctgtgaaattaattttccatccagacagctgctgtgagcaaatgaacataaatgctcgctggaaatttactaaccagtttttatattgacctgcagtgtaaaaagcacatttaattataaacaatatattcaaaatgggcaaattttattttcaaatgcagtgtagagctagattaaaagcaactctttgccacctactctgcccttttggcaaagttaccttgaacaaagaatcttaagggtttattaagaactctttattttcttcataccctgttctctgcagtgctttctaacagcttctgggtgcagattttcttcggcatccttttgcactcagcttattacaggtaggtagtgcttaagaaaagtcatggaggactaaagcctaagtccttttcacttttcctccatctgaaggtaggtgagttcatcctcttcatagtaatgctgttttaccaagactttatagcagatggacccagaaagaattttctgctattgtgttcactacaacaggatagggacatcagacagccccagaaaccccttccagatctgatatgggactattaatttttatgctgttaattggtattcattcacaatgcagttgaagggggaaggctccactgcattctttggctaaggcctgaatgcttgctcatctgtaagatctatactcgaggttttgttttccttttaaaattctttagggagagagggatggtttctgaggggttctgaaagtatgattcaatgtgcaacatacaggtaggtcttcagcataagctgaaatatatgcatgtaaaaactttgacatcnnnnnnnnnaattttccactttcttcttaactttacttctctttttgtccccccccatcttacagaagttgaggccaagggagaatggtaggcacagaagaaacatggcaaactgctctgtgctttcaaaccaaagtgttccccccaaccccaaatttgtctaagcactggccagtctgttgtgggcattgttttctacaaccaaattctgggtttttttcttctttctttaaacatagaggtaccaccacaagggatgccctactctctcgcagctcttgaaagcatctgtttgagggaaaggtctctgggcaagcaagtggttatttggattgcttgcttccctttttccacctgggacattgtaatcataaaataacagtaaattccaaacctcaaaaactattatggcctgagcacagctgaaatctagcagagtttaactcttctgcctccatgtctgtcacttataattcaggttctgctgttggcttcagaacatgagcagaagaatcgttttatgctagttattgcattcatggttgaaactcaacttagggaaagggttccaatgtattaagcaatgggctgcttctccccaatcctccctaacaattcgttgtgtggacttctcatctaaaaggttagtggcttttgcttgggatcagtgctctctattgatgttcttgctggtctccagacacattcctgttgcattaagacttgaaagacttgtagatgtgtgatgttcaggcacaggatgctgaaagctatgttactattcttagtttgtaaattgtccttttgataccatcatcttgttttctttttgtaggtataaataaaaacactgttgactancnctgtaacccgcatccttcccatcattttcccctctcttactcccccgcccctcttcctctcttactcctctcggccgcgcttcccctcttcccttccctcgtgcgccggtcccctctccnnnnnnnnnnnnnnnnnnnnnnnnnnnnnnnnnnnnnnnnnnnnnnnnngtccggcctgtgccctattcttacaaccccgttgctccacgtggcacgaattgatcttacaacttccacgcagcgtcgannnnnnnnnnnnnnnnnnnnnnnnnnnnnnnnnnnnnnnnnnnnnnnnnnnnnnnnnnnnnacccatcgttctttatccgcctcgcccgtttcggccctcctctctcacctctccgtctatgcttcgatctcgcccgtgtcccacatgcacatcacccgtantccggccgtccaattgcttgtacaccatttctctaaccaccttctctcctttcttctcccatcttcccgcctctttttccacccatcctcgccccctttttattccctcccccctcgttgaccctttctacacttctttccctnttctcctttttcctgcccacaccttctttacaccctgtcttacaccaacacacacaagtctcattccctgtatcacggtcctcgaacacgtggacacacctgaaatcttcaaatcgtccaaacatcaccactttatattccacaattttccacttcgccacacccgtttcccacacacgttcacacctaaactattcttctcccacctactattgtttccatacctcgctactcatcacgcgtcaacacccgtacgaccatct

SEQ ID NO: 69468 - DNA, 1603 bp, Homo Sapiens
  misc_feature (38)..(38): n is a, c, g, or t
  misc_feature (45)..(46): n is a, c, g, or t
  misc_feature (48)..(461): n is a, c, g, or t
  misc_feature (499)..(560): n is a, c, g, or t
  misc_feature (1240)..(1264): n is a, c, g, or t
gggggcggacttatgaaaaacgccagcacgccgccttntacgtcnntnnnnnnnnnnnnnnnnnnnnnnnnnnnnnnnnnnnnnnnnnnnnnnnnnnnnnnnnnnnnnnnnnnnnnnnnnnnnnnnnnnnnnnnnnnnnnnnnnnnnnnnnnnnnnnnnnnnnnnnnnnnnnnnnnnnnnnnnnnnnnnnnnnnnnnnnnnnnnnnnnnnnnnnnnnnnnnnnnnnnnnnnnnnnnnnnnnnnnnnnnnnnnnnnnnnnnnnnnnnnnnnnnnnnnnnnnnnnnnnnnnnnnnnnnnnnnnnnnnnnnnnnnnnnnnnnnnnnnnnnnnnnnnnnnnnnnnnnnnnnnnnnnnnnnnnnnnnnnnnnnnnnnnnnnnnnnnnnnnnnnnnnnnnnnnnnnnnnnnnnnnnnnnnnnnnnnnnnnnnnnnnnnnnnnnnnnnnnnnnnnnnnnnnnnnnnnnaagaattcggcacgagggcaaagttaaaagaaaattgnnnnnnnnnnnnnnnnnnnnnnnnnnnnnnnnnnnnnnnnnnnnnnnnnnnnnnnnnnnnnntacaagaataacaaacttgacagtaaatactggactagattgttctgaaaagaccagagaggaggggaactttaggaaatcttttagcccaaaagatgatacttcattacatttatttcatatttccactggtaaatctcccaaacattcttgtggattaagtgaaaaacagtcaacaccactaaaacaagaacatactaaaacatgtttatcaccaggaagttctgaaatgtcattacagcctgatcttgttcggtatgataatacagaatctgaattcttgccagaaagttcaagtgtaaaatcttgtaagcataaggaaaaaagcaaacatcagaaagatttccacttagaatttggtgaaaaatcaaatgccaaaataaaggatgaagatcatagtccaacatttgaaaattcagattgcacactgaaaaaaatggatcaacagaaggtaaaacattaaaaaaacatcaaattgaagcatacaagagagggacacacgaaaaagcataaaaaagaaattgaaggtgaaacaggacaaaatacaaaactaaggatagtgccaaagaactgcagaggagtgtggaatttgatagagaatttgggaaagagaatttttttaaaagtgatgaaactgaagatctctttttaaatatggaacatgaatccttaacattagnnnnnnnnnnnnnnnnnnnnnnnnncatcaaagatgataaatcaaccaaggaaaagcatgtgtcaaaagagaggaactttaaagaggaacgagacaagattaaaaaggaaagcgaggaatctttttagggaggaaaaaataaaagatctaaaagaagagagagaaaacatacccacagataaagactcagaatttacttctttgggtatgagtgccattgaggaatctatagggcttcatttagtggaaaaggaaatagacattgaaaaacaagaaaagcatataaaggaaagtaaagaaaaacctgagaagcgatctcaaattaaagaaaaggacattgagaagatggaaagaaaaacctttg

SEQ ID NO: 69469 - DNA, 1352 bp, Homo Sapiens
  misc_feature (1273)..(1291): n is a, c, g, or t
aattacggctaggtacgaggcctggtggcgaatcggcacgaggcggaggagcgggtcccgggatgtgaccggggctctgcttgtggctgcggcggtggcttctgaggctgtcgggtctttgcgggttgcggaagggggccccaatacccttcttcttcaggtcttaagaagctggccgtggtgcaataaggaacttaaaacaatggaagagcggaaagtgaagaggaggagtcctaagtcttttagtgcccactgtactcaggttgtcaatgccaaaaaaaatgccattccagtgagtaaaagcacagggttttcaaatcctgcatcacagtcaacttcacagcgaccaaagttaaaaagagtgatgaaagaaaagaccaaacctcagggtggagagggcaaaggcgctcagtcaactccgatccagcactccttcctcactgatgtctcagatgttcaggagatggagagagggctgctcagtcttttgaatgatttccactctggaaaacttcaagcatttggaaatgaatgttccatttgaacagatggaacatgttcggggaatgcaggagaaattagctcgcttgaatttggagctctatggggagttagaggaacttcctgaggataagagaaaaacagccagtgactccaatctggataggcttctgtcagatttagaagaattgaattcttccatacaaaaactccatttggcagatgcacaagatgttccaaatacttctgctagctaaaatgaaatgtagtttgctttcttgtgatttgaagagaagcagcagtctttacttttccagccaaatccagtagcagaatcatcttccacaacaaggaattaaagtaattaaagtgcaagttcaatgatcgttttcacttactgcttttagtaaatgtgactcgctgtaattcgccataactggaggcctaggccttgttgaaggcttcatcaggaaatgtgacgcagagattgtgctgctgtgcttcatattgttgccttatgggattatacttgaaatgcattgtgctgatgttcttgacagggcggagggatttctctttcctgagctcaccaaacttattccagtgttgatcgcaagctgttgatgcacaggcgtcttgtggcaagcccagcttcagtttatgttagacaatcagtacacatgctggtgtgttttccaatggccagtgataagaaattaaataagtatttgtgagatttgctattttttaataaagtaattgttttaaattnnnnnnnnnnnnnnnnnnngaccgcgtatgcggccgcaagcttattccctttagttgagggttaattttacggttagcac

SEQ ID NO: 69470 - DNA, 1818 bp, Homo Sapiens
ttacggctaggtagcgaggcctgggtggtgaattcggcacgaggcggtggtggccctcgcctgtggcccccgtgctgcttgcactcgaactcgtcgccatggaggagctccaggagcctctgagaggacagctccggctctgcttcacgcaagctgcccggactagcctcttactgctcaggctcaacgacgctgccctgcgggcgctgcaagagtgtcagcggcaacaggtacggccggtgattgctttccaaggccaccgagggtatctgagactcccaggccctggttggtcctgcctcttctccttcatagtgtcccagtgttgtcaggagggcgctggtggtagcttggaccttgtgtgccaacgcttcctcaggtctgggcctaacagcctccactgcctgggctcactcagggagcgcctcattatttgggcagccatggattctatcccagccccatcatcagttcagggacacaacctgactgaagatgccagacatcctgagagttggcagaacacaggaggctattctgaaggagatgcagtatcacagccacagatggcactagaggaggtgtcagtgtcagatccactggcaagcaaccaaggacagtcactcccaggatcctcaagggagcacatggcacagtgggaagtgagaagccagacccatgttccaaacagagaacctgttcaggcactgccttcctctgccagccggaaacgtctggacaagaaacgttcagtgcctgtagccactgtagaactggaaagaaaagaggttcagaactctgcctttagtgccaagccccctacaaggcctgaccaatcaggatttacaagagggagaagattggggagcaagaagatgaggacatggcaccccagattagaacacagttcctcagttcaaggaagattctgaatccccaagtcctgaagatataccagaactacctccctgcaaatacaggcccatccacagtgcagaacagcaacatgcctatgagcaggactttgagacagattatgctgaataccgcatcctgcatgcccgtgttgggactgcaagccaaaggttcatagagctgggagcagagattaaaagagttcggcgagggaactccagaatacaaggtcctggaagacaagataatccaggaatataaaaagttcaggaagcagtacccaagttacagagaagaaaagcgtcgctgtgagtaccttcaccagaaattgtcccacattaaaggtctcatcctggagtttgaggaaaagaacaggggcagctgaagttatcaagggaatttttgagcctctgcttagtgaaacacaaaggaacaaagcagctataaactaaatagaatgcaactatctgcttttcttatgctgaccactggagtccatggtggcaagtagagagctgctctaggttcttgaggtttggttttcattattaatttttagggtatgggcactgtgcaaagactccatagctgtgcctaggagtctaggaaaagtgacagaggcttggcttttttacctttagttcagccaagtcattttcaagtcctgagaaatgacatcatcttcaggataaaataatgaggacattagacaaaccaaactaagtgaattttagcctggtagcctctctaaggaaacagtaataataacttctgataagagttaaaagaacttgtagcatacctggatataatgggaaagggcctgggtgttacccatgtactgaaaatgaacttttaccaacatggctaaaaaattaaaactgactgcttctgtgaaaaaaa

SEQ ID NO: 69471 - DNA, 608 bp, Homo Sapiens
  misc_feature (78)..(107): n is a, c, g, or t
  misc_feature (172)..(180): n is a, c, g, or t
  misc_feature (396)..(396): n is a, c, g, or t
  misc_feature (399)..(399): n is a, c, g, or t
gttggtaacgacggccagtgccataccgaaattaaccctcactaaagggacacagcttgcggccgcggctgttggccnnnnnnnnnnnnnnnnnnnnnnnnnnnnnnaagttttaacagatgtatttcaaatacagcatgttttacaggagttcacaagcttttcatctctnnnnnnnnnctttcaactacctgactgttccattccaccccagacaaacctgacatgactgaactacttcatgtgttactttcccaaaaataaagttaaaaaaaaaaaggaactcatgataaatgcagatctctaatacagtatctaacacaaaagaagctttaaaaagacagtttctttccttatttgattagctagaagtttatctaggtaaaagcaaaaaanaanattttacaaagcataacataacattggggttctttttatactcaagatgtttaactgttcaaaatgacaacaattacatcttttaagagtataataaaatgggtggaaaacagcaacacaactgacaaaagtgtagatgctaaataaaccaaagtttttttcttaaggagtaggaagaatccacagcttggggaaatctcagaattaaa

SEQ ID NO: 69472 - DNA, 1992 bp, Homo Sapiens
gagaagacgacagaaggggagctctcatcatggcgcgtgctgctgcggcatatggacttttaataatgtttttgaatttcgtattctttcattccactgtgtaaagtgctagacattttccaatttaaaattttgctttttatcctggcactggcaaaaagaactgtgaaagtgaaattttattcagccgactgccagagaagtgggaatggtataggattgtccccaagtgtccatgtaacttttgttttaacctttgcaccttctcagtgctgtatgcggctgcagccgtctcacctgtttccccacaaagggaatttctcactctggttggaagcacaaacactgaaatgtctacgtttcattttggcagtagggtgtgaagctgggagcagatcatgtatttcccggagacgtgggaccttgctggcatgtctccttcacaatcaggcgtgggaatatctggcttaggactgtttctctctaagacaccattgttttcccttattttaaaagtgatttttttaaggacagaacttcttccaaaagagagggatggctttcccagaagacactcctggccatctgtggatttgtctgtgcacctattggctcttctagctgactcttctggttgggcttagagtctgcctgtttctgctagctccgtgtttagtccacttgggtcatcagctctgccaagctgagcctggccaagctaggtggacagacccttgcagtgatgtccgtttgtccagattctgccagtcatcactggacacgtctcctcgcagctgccctagcaaggggagacattgtggtagctatcagacatggacagaaactgacttagtgctcacaagcccctacaccttctgggctgaagatcacccagctgtgttcagaattttcttactgtgcttaggactgcacgcaagtgagcagacaccaccgacttcctttctgcgtcaccagtgtcgtcagcagagagaggacagcacaggctcaaggttggtagtgaagtcaggttcggggtgcatgggctgtggtggtgttgatcagttgctccagtgtttgaaataagaagactcatgtttatgtctggaataagttctgtttgtgctgacaggtggcctaggtcctggagatgagcaccctctctctggcctttagggagtcccctcttaggacaggcactgcccagcagcaagggcagcagagttgggtgctaagatcctgaggagctcgaggtttcgagctggctttagacattggtgggaccaaggatgttttgcaggatgccctgatcctaagaagggggcctgggggtgcgtgcagcctgtcggggagaccccactctgacagtgggcacacggcagcctgcaaagcacagggccaccgccacagcccggcagaggggcacactctggagaccttgctggcagtgctagccaggaaacagagtgaccaagggacaagaagggacttgcctaaagccacccagcaactcagcagcagaaccaagatgggccccaggctcctccatatggcccagggcttaccaccctatcacacgtggccttgtctagacccagtcctgagcaggggagaggctcttgagacctgatgccctcctacccacatggttctcccactgccctgtctgctctgctgctacagaggggcagggcctcccccagcccacgcttaggaatgcttggcctctggcaggcaggcagctgtacccaagctggtgggcagggggctggaaggcaccaggcctcaggaggagccccatagtcccgcctgcagcctgtaaccatcggctgggccctgcaaggcccacactcacgccctgtgggtgatggtcacggtgggtgggtgggggctgaccccagcttccaggggactgtcactgtggacgccaaaatggcataactgagataaggtgaataagtgacaaataaagccagttttttacaaggtacttga

SEQ ID NO: 69473 - DNA, 1491 bp, Homo Sapiens
  misc_feature (122)..(122): n is a, c, g, or t
  misc_feature (139)..(381): n is a, c, g, or t
  misc_feature (420)..(438): n is a, c, g, or t
  misc_feature (775)..(815): n is a, c, g, or t
  misc_feature (889)..(906): n is a, c, g, or t
  misc_feature (1041)..(1049): n is a, c, g, or t
  misc_feature (1168)..(1168): n is a, c, g, or t
ctacatgtcttcctgcgtatccctgatctgtgataacctataccgccttgagtgagctatacgttcccgcagccgaacgacgagcgcagcgatcagtgagcgagaagcggagagcgcccatnacgcaaccgcctctccnnnnnnnnnnnnnnnnnnnnnnnnnnnnnnnnnnnnnnnnnnnnnnnnnnnnnnnnnnnnnnnnnnnnnnnnnnnnnnnnnnnnnnnnnnnnnnnnnnnnnnnnnnnnnnnnnnnnnnnnnnnnnnnnnnnnnnnnnnnnnnnnnnnnnnnnnnnnnnnnnnnnnnnnnnnnnnnnnnnnnnnnnnnnnnnnnnnnnnnnnnnnnnnnnnnnnnnnnnnnnnnnnnnnnnnnnnnnnnnnnnnaagaattcggcacgaggggagcggccgcggctgtaggcnnnnnnnnnnnnnnnnnnngtccttggaagaataaccttccttccaccaagtccaagaacctgagatttttaatcattaggttttagatttcctttagcagcagagactgacttgctgtatagagggaagtcaagtagtgactaactcactatatgtcaaacacatcattactcttctcttttcctactttacatgtaatggttgcgaggaccaactttcaaatgagctaacttgggtgagacgttcactaaagtaccaagcacaatacaaatgcatcttcgagttctttgggcctcactttccctatctgaataataaggatagtaatcccttgccttttctcaaaccagttcannnnnnnnnnnnnnnnnnnnnnnnnnnnnnnnnnnnnnnnnaaatgtgaaatttgcatgctatgaggctaaatggtactgattctcaaaacaaggagctcatagtctaaaaccannnnnnnnnnnnnnnnnnccccctaaacaacctcttaaaggggtaagaagttagggggttgtttattaagaacccctgaagagcaaccctttaccactctcttaaatttgaaaaattccaaaataatattaacacctcttgactagaaaaggnnnnnnnnnggaacatgccgtatgaagagcctctccaataataaatgcaaagcagctgtcaaaatatagagtcaagtgatactttcataaagtgtttgcacaattagaaaatgttatcctttttcgcngggagaaatgggacatttttattttctctgctaagtgaaatgcaactttttgaagaatcaacatgcttgacatttttacaatgtacataaagaactgaactattattaaaacaacttacacactccattgcttataacttttgagagaatgaaaagaaccttaaacagaatgtgcctgtggagcttcgctttagaaatgaaatacccaaggtgttttaactacaactgtctacatgtaatagtgtgtctgcataatgactttgtaaatattaactgcaattctgtatttgctttcgttgatatgacttttaacattcgaactt

SEQ ID NO: 69474 - DNA, 1309 bp, Homo Sapiens
  misc_feature (586)..(605): n is a, c, g, or t
  misc_feature (941)..(962): n is a, c, g, or t
ggggttttaccagttttatttctagactttcatgtttgtctttttgtcttctgctggaaacatgccggttacatgttggtgctgggaagcgccgcggtgcaaccagaaatgcacagacccagccgcccgccgcccagaccctcagacttgcgcgtcacaggacagactccgctgtgccccgtgcacttgccaccagcctttggcctctcgatacacacaacatccaggacttgtgcccttgccccatcacgacagacaaagcgtccctcaaggcctctgagcacaggatgaccctgccagggcagggccccaaccacgtgggcccgcagcggggtgcaaattcttttggttcggcagcttgctaggtgaccggggcacacagcactgtgagctggcttcattgagatttggagtctctttaaattagcattatggtgtaattaacaaaacaataacaaacagaacactagtacataacagattaaacatacccaaaacttgaacaaattccagaagctattccaatcatcccgaatgagagtcctacaggtacaacgccgtggtggcacgtaagacacacttgttnnnnnnnnnnnnnnnnnnnntatgcaacttccatagctacacgcaaagaataacacagctgtaaaaactactatgatgctacgcccccgatcagatgaagtgcccagcatcacaggcgcagggaagagaagagggacacagcctggtctctggggacaccggcgcggttctcacgcacgcggcctcggggccggcccccgccagcctgtgtgggatcgcgcccgcgtgtctgcccgccaaagcaggcagaacctgcccgctgggtccaccatggctaagtgaagcatgaggtattgtgaaacagcaacctttttggaatagagcagtaatcacattaagtcaaaattgatcacatnnnnnnnnnnnnnnnnnnnnnnggcatctgtaatacaatgttctaagagaaaactaaaactagtacatggcagtatatgacattgtaaaacaaaaaactgatcctccaatagcagcaaacaatgtgaaagagatacacagaagcgatgtgaatatttccaaaccgtgcctggaagtcaacggtagcagcgcaataagaaaatggagctgcggcctgtccccggtgtgggcaccgccccttcccctcgggagcctcctcctcacacctcctcccgcctgtcctccctcacacgtcagcctccacactcttgccacctcccttcaacacttcctaaataaaaattacaagaattacatagccaagatgtcc

SEQ ID NO: 69475 - DNA, 1039 bp, Homo Sapiens
  misc_feature (32)..(32): n is a, c, g, or t
  misc_feature (39)..(40): n is a, c, g, or t
gcgtgtagctatggaagtggcataattattantatatannttataacaagtgtgtcttacgtgccaccacggcgttgtacctgtaggactctcattcgggatgattggaatagcttctggaatttgttcaagttttgggtatgtttaatctgttatgtactagtgttctgtttgttattgttttgttaattacaccataatgctaatttaaagagactccaaatctcaatgaagccagctcacagtgctgtgtgccccggtcacctagcaagctgccgaaccaaaagaatttgcaccccgctgcgggcccacgtggttggggccctgccctggcagggtcatcctgtgctcggaggccatctcgggcacaggcccaccccgccccacccctccagaacacggctcacgcttacctcaaccatcctggctgcggcgtctgtctgaaccacgcgggggccttgagggacgctttgtctgtcgtgatggggcaagggcacaagtcctggatgttgtgtgtatcgagaggccaaaggctggtggcaagtgcacggggcacagcggagtctgtcctgtgacgcgcaagtctgagggtctgggcggcgggcggctgggtctgtgcatttctggttgcaccgcggcgcttcccagcaccaacatgtaaccggcatgtttccagcagaagacaaaaagacaaacatgaaagtctagaaataaaactggtaaaagcccaaataaagacataccatctacacaacaaaagagggggggcgcataaagataccacgaaggggcccaagctctgacccgtacaccagcttctcttgtcaacagggcggcccaaaggtggaggccaatataatagcaaagccgcgtgccgtgtttcaaacacgtcgtgagcgtgcacacggcatctgggaattctgtgcaagaaccccacatcggcggggcacaatcgggccacacacctaccgaaattagcgcaggaaaataacgagggttaatggtaaccacccatgagtgggcaatggtcgcgttgaat

SEQ ID NO: 69476 - DNA, 1488 bp, Homo Sapiens
  misc_feature (645)..(667): n is a, c, g, or t
  misc_feature (1234)..(1244): n is a, c, g, or t
  misc_feature (1344)..(1352): n is a, c, g, or t
ctgaaccagcatcagcagctgagttaagtagcgtgcgtaaagaagaagaaactgctgttgccattcaaaccattgaggagcatcctgcatcttttgactggagctcttttaagccaatgggatttgaagtatcatttctgaagtttcttgaggagtctgcagtgaagcagaagaaaaatactgacaaagaccatccgaatactggaaacaaaaaaggatcccattcaaattcaagaaaaaatattgataagactgctgtgactagtggaaatcatgtatgtccttgtaaagaaagcgaaacgtttgtacagtttgccaatccatcacagcttcagtgcagtgataatgtaaaaattgttttagacaagaatcttaaagattgcactgagcttgtcttaaagcaacttcaggaaatgaaacctaccgtcagtctgaaaaaacttgaagtacattcaaatgatccagatatgtctgttatgaaagatatcagtataggtaaagccacaggcagaggtcagtactgataattaatgtagtataaatacatcatttaccattttattttaaataggaagccatcaagcatgctagaattgtgaaactttcattatatttttttgttgttgacatgaattaacctggccnnnnnnnnnnnnnnnnnnnnnnncatgacatttgtcatgtaaaacttttttttatccctatgggacttgaggaacagaatcagtacttcagttattgtaaatagtgagctaaacctcaaatttctatcacccagttgcccttttcatgaactaaacaattatctgtgtgattggtatgtttcaccaggtcactgctcatgtataacagtactctttatttgtagataccttttttgtatatatttattattgtaaatcatgtgctgccaccagcagtctgtaagtctaaactattaaatgacacatttatatttggaattttaatttttaactaagcgatcaagttttttaaattgttcttttattgttttaaattaagaactttttgaactaaaaccagaaactctgccatagttcattgatttttacatgaaacatttatttacaagatgatatcaagattacttttcacaaaataggcacattatatcaacactttgctctgctttgtaaatttgccatccaggattttggggtggtattcatgtgaaattaaagcagattctctagcagtttcctatagctacagnnnnnnnnnnncattgcttctaattggatatagttactatgagtccatgaaatacaatggaaatgtgaataaagaatttactacattgaagattttaaacatttggtattnnnnnnnnntcctttgtgaatgtgatagaaaactagtagtgtggagcagtgtaaatatttgaggtggtgatttgtgaagtagcccagtattgccttaaataaaatcacatttcatttcttgttttatacatgtgatcttataaag

SEQ ID NO: 69477 - DNA, 1260 bp, Homo Sapiens
  misc_feature (1155)..(1170): n is a, c, g, or t
cagtcgacggtaccggacatatgcccgggaattcggccattacggccggggttctgattcacccacgaaggttacatttatgctgaatacatttgtaaatactcagttttatactgtatgtatatgattgctactctaaaggtctggatatatgtagtgtaattagaagtgtggcacgatgacatttcatttgtgccaaaaatattaaaaatgccttttttggaaggactaacagaaagcacctgatttgcacttgaaccagattatagatttaaaagtatatgacatgtatttggtatttaaaactagaatagccagtatttatgttttttataaaactgtgcaatacgaattatgcaatcacaatacatttgtagctcccgagtgtcctaaagggagtgcacttctttgaagctggtgtgttaatactatgtaataaatggttaactttcaaatgatgctgctgccaaaattatattaatagtgagtttcaggcccctgggcatttggtaccatgtaattatcctctggtgatgctgtttctcgttagtggcagtagtgcctccgtctcctagtgataatgctccaagtctatgaactgttaaatcagcattcattttaagaaaagcaactttagtttcaaagatacttttaagcttctaaattgatcatttaaactatttctttaaataagagagccaaattagaggctcatactttagcttgtgaagaagataatgaattttttaaagggaactttctatgcaatgttcaggataaatgcatactgctggccaatcagtgtcatctcctgggtaaattttgatgtcgcattataaagacatgcataattgatggtttctagattatctagtccaaacaatagagtttattttttcttcatctgaaccaacatgctacagtagctaagaagtattaaaactatatacatccatataaagatgaaatatgaactatctcattagaagtcatagttgaccacagacatgttattcttctgaaagagccacattttggttttatttcttgtcacatgatttcttttcttgatggatgaaaaatatgaaaggaaacttttatatctgttgcctagttttgtacatggatctcattttacaagagaatctctctgcnnnnnnnnnnnnnnnncagtttaaaaatgcattgaaagcagagttctgaaatgagtaaagtttgtaaatgcatatataaaaatatttaataaatgatgcagaatat

SEQ ID NO: 69478 - DNA, 1593 bp, Homo Sapiens
  misc_feature (76)..(110): n is a, c, g, or t
  misc_feature (1071)..(1071): n is a, c, g, or t
agactatatacctacttgggcgcccgcgtcagccgaacgacgagcgcagcggagtattgagcgaggaagcggccgnnnnnnnnnnnnnnnnnnnnnnnnnnnnnnnnnnncagtcgacggtaccggacatatgcccgggaattcggccattacggccggggactccagacagacggctttggaatccaccagctacatccagctccctgaggcagagttgagaatggagagaatgttacctctcctgactctggggctcttggcggctgggttctgccctgctgtcctctgccaccctaacagcccacttgacgaggagaatctgacccaggagaaccaagaccgagggacacacgtggacctcggattagcctccgccaacgtggacttcgctttcagcctgtacaagcagttagtcctgaaggcccctgataagaatgtcatcttctccccactgagcatctccaccgccttggccttcctgtctctgggggcccataataccaccctgacagagattctcaaaggcctcaagttcaacctcacggagacttctgaggcagaaattcaccagagcttccagcacctcctgcgcaccctcaatcagtccagcgatgagctgcagctgagtatgggaaatgccatgtttgtcaaagagcaactcagtctgctggacaggttcacggaggatgccaagaggctgtatggctccgaggcctttgccactgactttcaggactcagctgcagctaagaagctcatcaacgactacgtgaagaatggaactagggggaaaatcacagatctgatcaaggaccttgactcgcagacaatgatggtcctggtgaattacatcttctttaaagccaaatgggagatgccctttgacccccaagatactcatcagtcaaggttctacttgagcaagaaaaagtgggtaatggtgcccatgatgagtttgcatcacctgactataccttacttccgggacgaggagctgtcctgcaccgtggtggagctgaagtacacaggcaatgccagcgcactcttcatcctccctgatcaagacanagatgggaggaaagtggaagccatgctgctcccagagaccctgaagcggtggagagactctctggagttcagagagataggtggtccataaggctgtgcttgatgtatttgaggagggcacagaagcatctgctgccacagcagtcaaaatcaccctcctttctgcattagtggagacaaggaccattgtgcgtttcaacaggcccttcctgatgatcattgtccctacagacacccagaacatcttcttcatgagcaaagtcaccaatcccaagcaagcctagagcttgccatcaagcagtggggctctcagtaaggaacttggaatgcaagctggatgcctgggtctctgggcacagcctggcccctgtgcaccgagtggccatggcatgtgtggccctgtctgcttatccttggaaggtgacagcgattccctgtgtagctctcacatgcacaggggcccatggactcttcagtctggagggtcctgggcctcctgacagcaataaataatttcgttgg

SEQ ID NO: 69479 - DNA, 1855 bp, Homo Sapiens
  misc_feature (1579)..(1579): n is a, c, g, or t
gggacgaggagctgtcctgcaccgtgtggagctgaagtacacaggcaatgccagcgcactcttcatcctccctgatcaagacaagatggaggaagtggaagccatgctgctcccagagaccctgaagcggtggagagactctctggagttcagagagataggtgagctctacctgccaaagttttccatctcgagggactataacctgaacgacatacttctccagctgggcattgaggaagccttcaccagcaaggctgacctgtcagggatcacaggggccaggaacctagcagtctcccaggtggtccataaggctgtgcttgatgtatttgaggagggcacagaagcatctgctgccacagcagtcaaaatcaccctcctttctgcattagtggagacaaggaccattgtgcgtttcaacaggcccttcctgatgatcattgtccctacagacacccagaacatcttcttcatgagcaaagtcaccaatcccaagcaagcctagagcttgccatcaagcagtggggctctcagtaaggaacttggaatgcaagctggatgcctgggtctctgggcacagcctggcccctgtgcaccgagtggccatggcatgtgtggccctgtctgcttatccttggaaggtgacagcgattccctgtgtagctctcacatgcacaggggcccatggactcttcagtctggagggtcctgggcctcctgacagcaataaataatttcgttggaaaaccctgctccggatctcccaccgaataaaacaacaatacccgccatgagcaacaaataactctaatcccgccgggggccccctccggccctcaggaagacttcaacaccagatagttcggtgcggcccggcccaacattagtatacggaccgggggctctcacctactctcccaggataatcgcagattcctgcaccattcccttccgtccttcccctcaatttagtggaatattgctgcgccgccccccgccagtggggttctccaaaacaaagccctacagggcgagttcccagacacgggttattcccgcggtgagcaaaccctcgcatccgcatctcccccgctagttcttaccgcccatcttccacaccaatccctttgcgcatcccggcgcgtcgtgatacaattacgcgattccgacgctcatgagccgccgcttgagaatatttccccccgcacacattatcccttattatagggcatggcactacatatgcccgacataattccctccttctcttatccactagatatgttgttacgcggttcggacacgaaaccgtcggacctgtatagacgctattttgcttctcctcccccgcatctgttcattaataccccccaccccagtccacggctatttataggtgttgcccacccctcattcccttgttatatcgccccatgatcgtacactcggaattgcgtgcggatccccccacggatatatcccaataaaactaaacacgacaccctgagcacgcagacacaaaataaatctacaatcatgttcctacataaacgatccaggtatgcccccacgtctntttcgcagagtgtctccgacgcgacctatgtagctctctgacgaattgtggttcacttatacggctgcacatctgacgtggatttcgtcccccgcgataggaacgttttattatgctctctccgctatccataatcagtccgcctcgatctacagaggtaccaacaaatgtcagcaccgagccttcagttcgtacactgtctccacactccgcgctcgcgccactattctacagcaccgcgtgttactaatgaaccctataatatccctacgagag

SEQ ID NO: 69480 - DNA, 1041 bp, Homo Sapiens
gtgcacccttcccaagaggggtccatgccccctgctgtgacagggttaccccccgtggtgtcccctgcgtgtggctcccacaccccggtcacacacctgtggagtcctcccgccccgtatccccccagtgccgggtcctctctctggctccattaggcccattgggccggaatttgttcgccggcccgccatacccccatccagtcagcaagtcacatcctggatgattctttcttttgggcacatccccttttgccagggacatactcttcagcttcaagtcgaattctgtggcataggtatcacacctgccctgcctcttcacggccccactgttggcttcaatgtaaatcacatctccagcttctactcgctctttctgcaaactttcaaaaatgctggggtccagtttcaactgtttggttcctttggctgttttgagtcctatgatcacatggctaatggttttgccatatcctcccatgggattctctgtctcacacggagttagctctgtgacttcaccttcataaacttccttggtctcctttattcgcagcccaatggccctgcggaagttctccatcagcacctctgtcttcttgatctcagttgagtaaacttcactccccaccattgggcagaaggggaccttactacccagctcctgagcaatagccagagccagagctgtcttgccagttccaggaggtcctgccaacaagacagctcttccagccattttcttgcttttgattaattctactatgacgccacatgcctctcgcgcgttctcctggcccacaagccctgaggccgcctgcttggccaagccgctctcgtccagccccagccctttcacgtggctgtgggaggcgatgcgctgcgtcttcgtagtgctcttcacctcctcaatcttcattttgcagacgccgggagctaaaaccagcgtggaaaaccagcagctaggacagtgcgcccggcgcctgagttaccatgcggccgttactagcctcgtccgatgtaaaaagcgctcagggg

SEQ ID NO: 69481 - DNA, 1796 bp, Homo Sapiens
  misc_feature (1744)..(1762): n is a, c, g, or t
  misc_feature (1796)..(1796): n is a, c, g, or t
acggcagtactactaacggtttaaggtagcgaggcctgggtggcgaattcggcacgaggtggtaactcaggcgccgggcgcactgtcctagctgctggttttccacgctggttttagctcccggcgtctgcaaaatgaagattgaggaggtgaagagcactacgaagacgcagcgcatcgcctcccacagccacgtgaaagggctggggctggacgagagcggcttggccaagcaggcggcctcagggcttgtgggccaggagaacgcgcgagaggcatgtggcgtcatagtagaattaatcaaaagcaagaaaatggctggaagagctgtcttgttggcaggacctcctggaactggcaagacagctctggctctggctattgctcaggagctgggtagtaaggtccccttctgcccaatggtggggagtgaagtttactcaactgagatcaagaagacagaggtgctgatggagaacttccgcagggccattgggctgcgaataaaggagaccaaggaagtttatgaaggtgaagtcacagagctaactccgtgtgagacagagaatcccatgggaggatatggcaaaaccattagccatgtgatcataggactcaaaacagccaaaggaaccaaacagttgaaactggaccccagcatttttgaaagtttgcagaaagagcgagtagaagctggagatgtgatttacattgaagccaacagtggggccgtgaagaggcagggcaggtgtgatacctatgccacagaattcgaccttgaagctgaagagtatgtccccttgccaaaaggggatgtgcacaaaaagaaagaaatcatccaagatgtgaccttgcatgacttggatgtggctaatgcgcggccccaggggggacaagatatcctgtccatgatgggccagctaatgaagccaaagaagacagaaatcacagacaaacttcgaggggagattaataaggtggtgaacaagtacatcgaccagggcattgctgagctggtcccgggtgtgctgtttgttgatgaggtccacatgctggacattgagtgcttcacctacctgcaccgcgccctggagtcttctatcgctcccatcgtcatctttgcatccaaccgaggcaactgtgtcatcagaggcactgaggacatcacatcccctcacggcatccctcttgaccttctggaccgagtgatgataatccggaccatgctgtatactccacaggaaatgaaacagatcattaaaatccgtgcccagacggaaggaatcaacatcagtgaggaggcactgaaccacctgggggagattggcaccaagaccacactgaggtactcagtgcagctgctgaccccggccaacttgcttgctaaaatcaacgggaaggacagcattgagaaagagcatgtcgaagagatcagtgaacttttctatgatgccaagtcctccgccaaaatcctggctgaccagcaggataagtacatgaagtgagatggctgaggttttcagcagtaagagactccccaggtgtgcctggcctgggtccagcctgtgggcgcttgcccctgggcttggggctgccgtccccactcaggcgtggtctgcagcgctgtcagttcagtgtggaaagcatttctttttaagttatcgtaactgttcctgtggttgctttgaaagaacccttccttacctggtgtgttttctataaatcttcataggttattttgatnnnnnnnnnnnnnnnnnnnaagttttttaaaaataaacttttcagaacagttn

SEQ ID NO: 69482 - DNA, 1458 bp, Homo Sapiens
  misc_feature (73)..(73): n is a, c, g, or t
  misc_feature (89)..(89): n is a, c, g, or t
  misc_feature (111)..(111): n is a, c, g, or t
  misc_feature (120)..(494): n is a, c, g, or t
  misc_feature (512)..(559): n is a, c, g, or t
  misc_feature (1097)..(1097): n is a, c, g, or t
  misc_feature (1101)..(1101): n is a, c, g, or t
  misc_feature (1104)..(1104): n is a, c, g, or t
  misc_feature (1106)..(1106): n is a, c, g, or t
  misc_feature (1110)..(1268): n is a, c, g, or t
  misc_feature (1274)..(1274): n is a, c, g, or t
  misc_feature (1290)..(1290): n is a, c, g, or t
ttgtctgccggtccacctcgattagtcgattttgtgctgtcagggccgacctatgaaaacccagcacgcgccntttacgtcctgccctntgctgcctttgctcacatgtcnttcctgcgnnnnnnnnnnnnnnnnnnnnnnnnnnnnnnnnnnnnnnnnnnnnnnnnnnnnnnnnnnnnnnnnnnnnnnnnnnnnnnnnnnnnnnnnnnnnnnnnnnnnnnnnnnnnnnnnnnnnnnnnnnnnnnnnnnnnnnnnnnnnnnnnnnnnnnnnnnnnnnnnnnnnnnnnnnnnnnnnnnnnnnnnnnnnnnnnnnnnnnnnnnnnnnnnnnnnnnnnnnnnnnnnnnnnnnnnnnnnnnnnnnnnnnnnnnnnnnnnnnnnnnnnnnnnnnnnnnnnnnnnnnnnnnnnnnnnnnnnnnnnnnnnnnnnnnnnnnnnnnnnnnnnnnnnnnnnnnnnnnnnnnnnnnnnnnnnnnnnnnnnnnnnnnnnnnnnnnnaagaattcggcacgaggnnnnnnnnnnnnnnnnnnnnnnnnnnnnnnnnnnnnnnnnnnnnnnnnttcttcattcagaaaaattatcttagggactgatattggtaattatggtcaatttaataatattttggggcatttccttacattgtcttgacaagattaaaatgtctgtgccaaaattttgtattttatttggagacttcttatcaaaagtaatgctgccaaaggaagtctaaggaattagtagtgttcccatcacttgtttggagtgtgctattctaaaagattttgatttcctggaatgacaattatattttaactttggtgggggaaagagttataggaccacagtcttcacttctgatacttgtaaattaatcttttattgcacttgttttgaccattaagctatatgtttagaaatggtcattttacggaaaaattagaaaaattctgataatagtgcagaataaatgaattaatgttttacttaatttatattgaactgtcaatgacaaataaaaattctttttgattattttttgttttcatttaccagaataaaaactaagaattaaaagtttgattacagtcaaaaaancccncancncccnnnnnnnnnnnnnnnnnnnnnnnnnnnnnnnnnnnnnnnnnnnnnnnnnnnnnnnnnnnnnnnnnnnnnnnnnnnnnnnnnnnnnnnnnnnnnnnnnnnnnnnnnnnnnnnnnnnnnnnnnnnnnnnnnnnnnnnnnnnnnnnnnnnnnnnnnnnnnnnaaaaanaaaaacaaagttgtgngccgctcccctcgccccccaagaaaatatctctttcaaccccttttggcgggcgggccgcggccccaccaagagagaagagagaaccccggggataaaccttcgtgttctcaaaaagaacaccaccgccggcacaacacaaagcgggcttgtccttcttcccaccaac

SEQ ID NO: 69483 - DNA, 665 bp, Homo Sapiens
acccccccgccacccaccccccgccaccttccagcatggaggagcaggacttggagcgaaggttcgagctgctgagccgcgagctgcgggccatgctggccatcgaagactggcagaaaacgtccgctcagcagcaccgagagcagctcctactggaggagctggtgtcgctggtgaaccagcgcgatgagctagtccgggacctggaccacaaggagcggatcgccctggaggaggacgagcgcctggagcgcggcctggaacagcggcgccgcaagctgagccggcagttgagccggcgggagcgctgcgtgctgagctgaggccgccggcccgggtggcccataacttctcgcgtccccggcgtccgccgccgccccgggcctgcgctgcggacgacccggccgtcccggaggccgcgcgcgtgtccgctaggggccgccggcgcccttccccgtatagggcagggcggatccccgaccccacgggcggggcggccgccgtatttatttgtcaccgagggtgtgtgcgcgctcgcggcgggtgcggggtcctccccgacggcacggccgggccggcggcctcggggagagggatgcctgggcactaccgccccgcgctggcttgccctcctgttctccagagcaataaagttggacgagact

SEQ ID NO: 69484 - DNA, 543 bp, Homo Sapiens
gggtcggggatccgccctgccctgtacggggaagggcgccggcggcccctagcggacacgcgcgcggcctccgggacggccgggtcgtccgcagcgcaggcccggagcggcggcggacgccggggacgcgagaagttatgggccacccgggccggcggcctcagctcagcacgcagcgctcccgccggctcaactgccggctcagcttgcggcgccgctgttccaggccgcgctccaggcgctcgtcctcctccagggcgatccgctccttgtggtccaggtcccggactagctcatcgcgctggttcaccagcgacaccagctcctccagtaggagctgctctcggtgctgctgagcggacgttttctgccagtctgagggtcgacgcggctaagcgtcaggaggcgcgggcccaaggctgtgccgcctccaccctggctctgtcttgcctcccggcccctgagcccatgtcccaccttcgatggccagcatggcccgcagctcgtggctagcagctcgtaccttcgcttcagtgctgcttc

SEQ ID NO: 69485 - DNA, 541 bp, Homo Sapiens
gcggccgccccgcccgtggggtcggggatccgccctgccctgtacggggaagggcgccggcggcccctagcggacacgcgcgcggcctccgggacggccgggtcgtccgcagcgcaggcccggggcggcggcggacgccggggacgcgagaagttatgggccacccgggccggcggcctcagctcagcacgcagcgctcccgccggctcaactgccggctcagcttgcggcgccgctgttccaggccgcgctccaggcgctcgtcctcctccagggcgatccgctccttgtggtccaggtcccggactagctcatcgcgctggttcaccagcgacaccagctcctccagtaggagctgctctcggtgctgctgagcggacgttttctgccagtcttcgatggccagcatggcccgcagctcgcggctcagcagctcgaaccttcgctccaagtcctgctcctccatgagcagctgcagctggtcctgcctccggatgagagcgttcttcttgttgaccagagtgaaccactcctggatcag

SEQ ID NO: 69486 - DNA, 1019 bp, Homo Sapiens
  misc_feature (93)..(93): n is a, c, g, or t
  misc_feature (168)..(168): n is a, c, g, or t
  misc_feature (182)..(182): n is a, c, g, or t
  misc_feature (203)..(203): n is a, c, g, or t
  misc_feature (223)..(223): n is a, c, g, or t
  misc_feature (408)..(417): n is a, c, g, or t
  misc_feature (933)..(941): n is a, c, g, or t
ctcctgacctgggattgtaccaatgacgacaatcttcactttctagcaggcagtgtcaccaggaattgctatggatgggagtgtattgtagtngctgtacacgttgaagagcagaggtctcagcattgactgcgctgtcatcggtaatgatgtgctgtgtcccagtgntatcattctctccntcacagtggtgagttaggggntaatgtccttgaatgtcacntgtgagtcctgacacttagctcttcagaaacaatggttttgttgaggatggggaacagggaatgccgattttatatacatggtacacagagaggggtgtcacttcagaaaatcttccagcatgttcttcagaatattaatttatatgcgaggtgaggttgggaatgaaaagaacaggtcagcacnnnnnnnnnncctagaacatacaaaagaacatggtggactttcagggagtgcaatggaaggtgaatatttccttaagggtccccgagaaatgggagtgaggggaggggacacaatggctttttgagcttacttttaccttctgatactagtcaaggtccagaaccagccaccagccaaatttctatctgggtgcgggccactgaaaatccttgttaaaaaccagatcacaaatctggggctcttggtcccattggagaaggaaggaagagcctcaaaataagtgtgcacccatgcacatattcaggaacagcttgtttagtctttacactttgcctgaaagttgcttctcctcgtccctttgtgtgcctgggtggcctcggccctgtgcgttggcaacgcaggatcaaatgtgctgcagcttttgcagaaaacaactcagaaacacaaaaccccccaacagctcaattattattttttcaatgttttcctacaagagccaagtagcaccatgtacagaagacgccnnnnnnnnnggaatattgaaatcgttctgcatgtaaaatatgggataatgacctgtttatattaaaattctgattaaattatctgag

SEQ ID NO: 69487 - DNA, 893 bp, Homo Sapiens
  misc_feature (684)..(748): n is a, c, g, or t
gggtagagggataggttagtaagatgtattgttaaacaacaggttttagtttttgctttataattagccacaggttttcaaatgatcacatttcagaataggtttttagcctgtaattaggcctcatcccctttgacctaaatgtcttacatgttacttgttagcacatcaactgtatcactaatcaccatctgtttttgtgggatgtgctgcagcatttcccaaaaaaactttacgtgtaatgttgcaaaatgaatgtactcagacattcttaatttttacttagggcagaccaactctttgagtctctcttggacttatatatacagatatcttaagagtgggaatgtaaagcataacctaattctctttcctatagagattctattttatttaaaatctatttttacactagttagaatcctgctgttttggccaagtacttgtcttgcatgtctgaccttgcagaagctggggtggatcatagcatactaatgaagagaattagaagtagtttacaaagctcgctcactcctcatttctctgtgatcccttctatccagtggccccaccaccacctgggaaaacagatttttcagtacaggtgggataaatgctctgaaaggctgtgcccagaggaatgagcaaataggcaagtgtttccaaactacttggaggtttacnnnnnnnnnnnnnnnnnnnnnnnnnnnnnnnnnnnnnnnnnnnnnnnnnnnnnnnnnnnnnnnnnaaacagtcaaagagtcatgtttgaatttcacaaaatcacatcagacagaagttgttttcttcaggagggaaatgaaccacttaatatacccatactaccttgaacaatgaaattgaattaaaatagccaaactttgaaattaaaa

SEQ ID NO: 69488 - DNA, 2186 bp, Homo Sapiens
gctaggtacgaggcctgggtggtgaatccggcacgaggaaagtttgctggagacactgaagtgtttgaagaaagatgatgaaagtaatttggtggaggagaaatcaaacatgatccggaagtcactggagatgttggagctcggcctgagtgaggcacaggttatgatggctttgtcaaatcacctgaatgctgtggagtccgagaagcagaaactgcgtgcgcaggttcgtcgtctgtgccaggagaatcagtggctacgggatgaactggccaacacgcagcagaaactgcagaagagtgagcagtctgtggctcaactggaggaggagaagaagcatctggagtttatgaatcagctaaaaaaatatgatgacgacatttccccatccgaggacaaagacactgattctaccaaagagcctctggatgaccttttccccaatgatgaagacgacccagggcaaggaatccagcagcagcacagcagtgcagccgcggctgcccagcagggcggctacgagatccccgcgcggctgcggacgctccacaacctggtgatccagtacgcctcgcaggggcgctacgaggtagctgtgcccctctgcaagcaggccctggaggacctggagaagacttcaggacacgaccacccggacgtggccaccatgctcaacatcctgggccttggtgtacagggatcatgaataaatacaatagatgcagctaacctactgaatgatgccttggctattcgtgagaaaactttgggcaaagatcatcctgcggtggcggcgactttgaataaccttgcagtcctttatggtaaaagagggaagtacaaagaagcagagccgttgtgtaaaagagctctggaaatccgagaaaaggttttggggaaggatcaccccggatgttcgccaagccagttaaagtaacttggccttactgtgccagacatccagggcaagtatgaaagaagtagaatattattatcaaagagccctcgtagatctaccagacaaaactgggacctgaagtgaccccaacgtggctaagacgaaaaataagccctggcatcctgctatttgaaacaaggaaagttcaagcaagcagaaacactgtacaaagagattctcactcgtgcacatgaaagggagtttggttctgtagatgatgaaaataaacccatctggatgcatgctgaagaaagagaagaatgcaaaggaaagcaaaaggatgggacatctttggagagtatggcggctggtacaaagcctgcaaagttgatagtccaactgttacaaccactctaaaaaaccttggggcactttacagacgtcaaggcaaatttgaagctgcagaaacgttagaagaagctgctatgaggtctcgtaaacagggtcttgacaatgttcacaaacagagggtggcagaagtgctcaatgaccctgagaacatggagaagcgcaggagccgtgagagcctcaacgtggacgtggtcaagtacgagagtggccctgacggaggggaggaaatgaggaaaatgaagctcgggctggttaactgacttgctcagcgtcccatggcctagccgcccgtgactctcacactgtctcctgcatgacgggtggcgcctcccgcagcttcccttctctctccagtgctgcccgctgtgtctagcagcctctaggatcttgtcagagctgcacctctctgtgaactggccattcctttcggtgctgctgtcctttttgggggggttcctgatttctgtatacatgtagctttgccagatatgtacttagtaatataaactgtattaataaaatccatttactgtgtaatacacgagtttaaaaattaagagcgattagctgttcactttggtaacaggtagttaagtgtcacacaaggtgttgttgcaatggcatgacggtgacctgttgacgtaactaagccttacagcaaggcatgtgccgcacgtgctccgtggtacttagagccctgggggccccgctcggactccgggtctccctaggatatgccccagtagcatttgctgtgtagtctgtgtgtgaaatttgggcattctgcttttctctactaatcttgaagtgctcagtgatttgtgtatttgtgtctttctaacttctaataaactcactccgaccggaacaacaaaaa

SEQ ID NO: 69489 - DNA, 914 bp, Homo Sapiens
gctaggtgcgagcctgggggtgtaatcggcacgagggagcggcgcaggcggccgagcgggactggctgggtcggctgggctgctggtgcgaggagccgcggggctgtgctcggcggccaaggggacagcgcgtgggtggccgaggatgctgcggggcggtagctccggcgcccctagctggtgactgctgcgccgtgcctcacacagccgaggcgggctcggcgcacagtcgctgctccgcgcgcgcgcccggcggcgctccaggtgctgacagcgcgagagagcgcggccctcaggagcaaggcgaatgtatgacaacatgtccacaatggtgtacataaaggaagacaagttggagaagcttacacaggatgaaattatttctaagacaaagcaagtaattcaggggctggaagctttgaagaatgagcacaattccattttacaaagtttgctggagacactgaagtgtttgaagaaagatgatgaaagtaatttggtggaggagaaatcaaacatgatccggaagtcactggagatgttggagctcggcctgagtgaggcacaggttatgatggctttgtcaaatcacctgaatgctgtggagtccgagaagcagaaactgcgtgcgcaggttcgtcgtctgtgccaggagaatcagtggctacgggatgaactggccaacacgcagcagaaactgcagaagagtgagcagtctgtggctcaactggaggaggagaagaagcatctggagtttatgaatcagctaaaaaaatatgatgacgacatttccccatccgaggacaaagacactgattctaccaaagagcctctggatgaccttttccccaatgatgaagacgacccagggcaaggaatccagcagcagcacagcagtgcagccgcggctgccc

SEQ ID NO: 69490 - DNA, 577 bp, Homo Sapiens
caattttcacaaacagagggtggcagaagtgctcaatgaccctgagaacatggagaagcgcaggacccgtgagagcctcaacgtggacgtggtcaagtacgagagtgcccctgacggaggggaggaagtgagtatgagcgtagagtggaacgggggcgtctctggccgagcctctttttgtggaaaacgacagcagcagcagtggcctggaagacgccaccgctaactgaccccaacctggccccgctccaggatgggactgccgagtgtggcccggagctggcccgggacagccagggcggcagggagggcccctggccgggagccgcagcgctcactcatttctcctgcgtctgtgtgcataggacatgatactaataaccacacggctggcgtgaccttggggctggggctgggcctaagctggtgccctggtgcggcgtggtctctcccaggagacctggggcatgagctgggcccacggctcccttcccatgtgtaacttcctcacgttgtgtgcgataacgtattttattgtacatttttttaaattaaaagtttatatgccttatgcttt

SEQ ID NO: 69491 - DNA, 731 bp, Homo Sapiens
ggcctcccacttgttgctgccgtggcctgtgggtgccagagccattggcatggctggtctggcctctgaccgcacagcttggtgagccatggtgatgggggagggtgacacagctgctcctggcaccaagcagtgtagttcaggccccacgggccttgccagcagctctggccagatggaggctgctaaggggcccctaggctgtccctcaagtccaaggtctgcagccacacgctggtgtcacgcccggagctctgaagacgcctgagggccgcctgcacgccctgagtgaaactcgtctgtgcttcatctccagggcgtctctggccgagcctctttttgtggaaaacgacagcagcagcagtggcctggaagacgccaccgctaactgaccccaacctggccccgctccaggatgggactgccgagtgtggcccggagctggcccgggacagccagggcggcagggagggcccctggccgggagccgcagcgctcactcatttctcctgcgtctgtgtgcataggacatgatactaataaccacacggctggcgtgaccttggggctggggctgggcctaagctggtgccctggtgcggcgtggtctctcccaggagacctggggcatgagctgggcccacggctcccttcccatgtgtaacttcctcacgttgtgtgcgataacgtattttattgtacatttttttaaattaaaagtttatatacct

SEQ ID NO: 69492 - DNA, 1472 bp, Homo Sapiens
  misc_feature (789)..(807): n is a, c, g, or t
  misc_feature (858)..(1330): n is a, c, g, or t
  misc_feature (1347)..(1347): n is a, c, g, or t
gtggtccttaaggttttttagctttaaccaaagtgataaactcaggacttagaatagtgcctaaagtgctgcagccaaagacagaccggaactatgaaaagtgggcttggagatggcaggagagcttgtcattgagcctggcaatttagcaaactgatgctgaggatgattgaggtgggtctacctcatctctgaaaattctggaaggaatggaggagtctcaacatgtgtttctgacacaagatccgtggtttgtactcaaagcccagaatccccaagtgcctgcttttgatgatgtctacagaaaatgctggctgagctgaacacatttgcccaattccaggtgtgcacagaaaaccgagaatattcaaaattccaaatttttttcttaggagcaagaagaaaatgtggccctaaagggggttagttgaggggtagggggtagtgaggatcttgatttggatctctttttatttaaatgtgaatttcaacttttgacaatcaaagaaaagacttttgttgaaatagctttactgtttctcaagtgttttggagaaaaaaatcaaccctgcaatcactttttggaattgtcttgatttttcggcagttcaagctatatcgaatatagttctgtgtagagaatgtcactgtagttttgagtgtatacatgtgtgggtgctgataattgtgtattttctttgggggtggaaaaggaaaacaattcaagctgagaaaagtattctcaaagatgcatttttataaattttattaaacaattttgttaaaccnnnnnnnnnnnnnnnnnnngcctacagccgcggccgctccaacatcagaatgcctcgtgccgaattcttnnnnnnnnnnnnnnnnnnnnnnnnnnnnnnnnnnnnnnnnnnnnnnnnnnnnnnnnnnnnnnnnnnnnnnnnnnnnnnnnnnnnnnnnnnnnnnnnnnnnnnnnnnnnnnnnnnnnnnnnnnnnnnnnnnnnnnnnnnnnnnnnnnnnnnnnnnnnnnnnnnnnnnnnnnnnnnnnnnnnnnnnnnnnnnnnnnnnnnnnnnnnnnnnnnnnnnnnnnnnnnnnnnnnnnnnnnnnnnnnnnnnnnnnnnnnnnnnnnnnnnnnnnnnnnnnnnnnnnnnnnnnnnnnnnnnnnnnnnnnnnnnnnnnnnnnnnnnnnnnnnnnnnnnnnnnnnnnnnnnnnnnnnnnnnnnnnnnnnnnnnnnnnnnnnnnnnnnnnnnnnnnnnnnnnnnnnnnnnnnnnnnnnnnnnnnnnnnnnnnnnnnnnnnnnnnnnnnnnnnnnnnnnnnnnnnnnnnnnnnnnnnnnnnnnnnnatcacaaatcgacctcngtcagagtgggaaaccgacagactataagaacaggcgttcccctggagctcctctgcgtctctgttcgaccctgcgctacgaactgtcgctttctcctcgggagctgggcttccaagtcaccgtg

SEQ ID NO: 69493 - DNA, 1315 bp, Homo Sapiens
cgcttgtgactatagcaccacgtttaaaaaagcaggctggtaccggtccggaatcccgggatatcgtcgaccacgcgtcgcttgggggcctcactgcagccgccgctgctgttggagtgggctttgcgagtctgaacgttggcggggctaggctcgttaactgccgagagcctccgggtttgcggtggaggacgctgaggcccgtggggggcaggcacccgggcgccgggcctcccagccgacatgtctctagtggcggaagccttcgtctcccagattgcagctgcagaaccttggcctgaaaatgctacattatatcagcaattgaaaggggagcaaattttactttctgacaatgcagcttctcttgcagtgcaggcctttttgcaaatgtgtaacttgcctatcaaagtagtttgtagggcaaatgcagaatatatgtctccatctggtaaagtaccttttattcatgtgggaaatcaagtagtatcagaacttggtccaatagtccaatttgttaaagccaagggccattctcttagtgatgggctggaggaagtccaaaaagcagaaatgaaagcttacatggaattagtcaacaatatgctgttgactgcagagctgtatcttcagtggtgtgatgaagctacagtaggggagatcactcatgctaggtatggatctccttacccttggcctctgaatcatattttggcctatcaaaaacagtgggaagtcaaacgtaagatgaaagctattggatggggaaagaagactctggaccaggtcttagaggatgtagaccagtgctgtcaagctctctctcaaagactgggaacacaaccgtatttcttcaataagcagcctactgaacttgacgcactggtatttggccatctatacaccattcttaccacacaattgacaaatgatgaactttctgagaaggtgaaaaactatagcaacctccttgctttctgtaggagaattgaacagcactattttgaagatcgtggtaaaggcaggctgtcatagagttatgtgttagtctcaggagtcttaacttttgaaatatgttttacttgaatgttacattagatattggtgtcagaattttaaaaccaaattactgctttttgaaacctcaaattatataatgtatcttatgtatgtgctttatattgttatttgtgtatacattaaaataattctgaattatttaatctgatatgttgtattctgtatcttgaaatttttgtttccttgaaacatgcatgcatttaaaaataaagcttaaacaactgtatggatgtta

SEQ ID NO: 69494 - DNA, 1104 bp, Homo Sapiens
  misc_feature (152)..(258): n is a, c, g, or t
atgagccactgcacctgcccagctccccaactccctgccattttttaagagacagtttcgctccatcgcccaggcctgggatgcagtgatgtgatcatagctcactgtaacctcaaactctggggctcaagcagttctcccaccagcctccnnnnnnnnnnnnnnnnnnnnnnnnnnnnnnnnnnnnnnnnnnnnnnnnnnnnnnnnnnnnnnnnnnnnnnnnnnnnnnnnnnnnnnnnnnnnnnnnnnnnnnnnnnntgggcatgagctgctgtgcccagcctccatgttttaatatcaactctcactcctgaattcagttgctttgcccaagataggagttctctgatgcagaaattattgggctcttttagggtaagaagtttgtgtctttgtctggccacatcttgactaggtattgtctactctgaagacctttaatggcttccctctttcatctcctgagtatgtaacttgcaatgggcagctatccagtgacttgttctgagtaagtgtgttcattaatgtttatttagctctgaagcaagagtgatatactccaggacttagaatagtgcctaaagtgctgcagccaaagacagagcggaactatgaaaagtgggcttggagatggcaggagagcttgtcattgagcctggcaatttagcaaactgatgctgaggatgattgaggtgggtctacctcatctctgaaaattctggaaggaatggaggagtctcaacatgtgtttctgacacaagatccgtggtttgtactcaaagcccagaatccccaagtgcctgcttttgatgatgtctacagaaaatgctggctgagctgaacacatttgcccaattccaggtgtgcacagaaaaccgagaatattcaaaattccaaatttttttcttaggagcaagaagaaaatgtgggccctaaagggggttagttgaagggtaagggggtaaatgaaggatcttgaatttgggatcctcttttttatttaaaatgtggaatttccaacttttttgaccaatccaaaggaaaagaacattttgtttggaaataaccttttaactggtttcccccaagtggggtttttggaaa

SEQ ID NO: 69495 - DNA, 652 bp, Homo Sapiens
  misc_feature (409)..(417): n is a, c, g, or t
agtggctgcaagagagcctactgtaaccctcatggccaccccctgatgagtgttacctggggaaagggctagcaagaggtgaagcctcctggtcatatgatgctgggggtgcctaattccttaaaggccaaggtcttctgaaataataatggtgaaggacagaaaagtctttatgagaaatcacataggatatattaagataatgataaagatacctcagcaagaacatacctaatatatacacttcttttaatctgatgacttaatgatttctgttatcaagaagtatttatgacttgagataagtcaggattaactgttatcacctctcctgtacacctccctcctttttctcctttgtacccacatgtgcagattttttcagaggtgacaatttagcatttaatgnnnnnnnnnctgcttcaagttcttaggtccctttggaggatattgatgggggtggaggtggggatagaacatctttcacactgtttggtacagagatgctcaaagcttttcccagggaaaggaactctctaaaatagtaatctgatttgatgaaagataaaattttaatatagcttcagttaaccttcaggatactttaaatgctacattgtatataaaagtaataaagtacaaatgaacacga

SEQ ID NO: 69496 - DNA, 776 bp, Homo Sapiens
  misc_feature (19)..(19): n is a, c, g, or t
  misc_feature (47)..(48): n is a, c, g, or t
tagggatcctcagatactntgctagatgaccatctacagtatgatcnncaagccaaacagcacatgtggcgagcaattcgaactgcatttaaaaacagaaagcgggctgctattctgaccactcactatatggaggaggcagaggctgtctgtgatcgagtagctatcatggtgtctgggcagttaagatgtatcggaacagtacaacatctaaagagtaaatttggaaaaggctactttttggaaattaaattgaaggactggatagaaaacctagaagtagaccgccttcaaagagaaattcagtatattttcccaaatgcaagccgtcaggaaagtttttcttctattttggcttataaaattcctaaggaagatgttcagtccctttcacaatctttttttaagctggaagaagctaaacatgcttttgccattgaagaatatagcttttctcaagcaacattggaacaggtttttgtagaactcactaaagaacaagaggaggaagataatagttgtggaactttaaacagcacactttggtgggaacgaacacaagaagatagagtagtattttgaatttgtattgttcggtctgcttactgggacttctttctttttcacttaattttaactttggtttaaaaagttttttattggaatggtaactggagaaccaagaacgcacttgaaatttttctaagctccttaattgaaatgctgtggttgtgtgttttgcttttctttaaataaaacgtatgtataattaagtg

SEQ ID NO: 69497 - DNA, 730 bp, Homo Sapiens
  misc_feature (560)..(568): n is a, c, g, or t
ggcttggacatggaagataagactttagcttttgaacgtggatatgagttcctgggggttgcttttagaggacttccaaaggtctgcttatacccagcagtttctgctgtatatggcaacacagaagtgactttggtttaccttggaaaacctttggacggatgacagtggctttcttgtgatgacagacagaatggaggagagatctgcttatgggaagtagaaccatgaagtgactgtcacacatgcatgtccaagaaacatcctgaaaacacatgaagtcgtaaactggagaagcagctctacagcagagattatcttcgtgtttcctctttctactgggccagaaaaatcctcagggttgcagttggttgagtgggcagttgacatatgcatgttgcacccgatgttgtctctaagttagcaatgtgttatttccagctttaaaggtgagattgtagagatgctgtcaaagggataaggaaatagcaagatttttaagtagtgtgtttgtgaagactgatccccattttacaactgcctgttctttctccagtccnnnnnnnnncagccagcttgactattagaaaagtatgaaactggttgggttttatttaatatttttaatatattgagaagcatggtctgcctggactgcacttctctaaaagtgagatataaaattgtgcagctattttaaaagttgtatataatatgtgtgtaaaaaaaa

SEQ ID NO: 69498 - DNA, 685 bp, Homo Sapiens
  misc_feature (80)..(80): n is a, c, g, or t
ggtggtttctgtgagaattgccatccttgaggacacagccaggacggcagaggcctcctggcctcagggcatgccctgcntaccttctgaaatgtttaccccattgaccaaacttggctccagccattgcggtggtttctagatagccaggcccaccaagagatattgccccttgatgagagtcaaacaccctgcctacaaggagatgttttgaaatggagaggaaaattggcacctcatcttttaaaggcagtaatggaattgattttcagtaactgaatttgtgcacaaaacattctaaacactagtgaagcctgtttcgttgaactaattctggctctggaaatgtttttgttttatagttatttacgatttcgtttgtttggattcaagcttagtttgttaatatgtataatttagcatctattacactcatgtaaatatggagtaagtattgtaaactatttcattgcggggattgtgggtgttatacatacatttaggactgcaattttttggtattttttgtattgtaaaataacagctaatttaagcaggaacaagagaactaagggaggtctgtgcattttaaacacaaatgtgaagaacttgtatataaacaaaagtaaatactataatacaaacttccttctgaaataaaagtagatctggtaaaaatgtgaaa

SEQ ID NO: 69499 - DNA, 1606 bp, Homo Sapiens
  misc_feature (1212)..(1339): n is a, c, g, or t
  misc_feature (1343)..(1400): n is a, c, g, or t
  misc_feature (1480)..(1480): n is a, c, g, or t
  misc_feature (1516)..(1516): n is a, c, g, or t
tattagatatggcagaaaaaccatttccactatgcaaagttcttttagacgtcatgaaaatcaactctcatacctcatggtctctctttaattgaccaaaaccttccatttttctctaaatacaaagcgatctgtgttctgagcaacctttccccgaacacacagcttcagtgcagcacgctgacctgagtatccaccatgtgccaggcacagtgctgggcacacgaggcaccaaggtccgggccacctgcccgcaagcaaggcccagctgaggtggtggagggaacccctgaggtcaggggccgtttcggttcagggtggcaggtgtccagcactggggtatggcgtcgaggcttccatggggtgggggaggccagcttccttctgacaggatgggcgcatacagtgcctggtgtgatttgtgcacaacccgtgttccaggtgcacatcctcccaaggagacacccagacccttccagcacgggccggccaagttgctgcggcggaggcagcatttcagctgtgaggaaggtcattggattcatgtgttttatctgtaaaaatggttgtcttaacttcttaacctcatattggtaagtgattgataaaaattggttggtgtttcatgacatgtggacttcttttgaaatagcaagtcaaatgtagtgaccaaattgtggaagagatttctgtcaaataggaaatgtgtaagttcgtctaaaagctgatggttatgtaagttgctcaggcactcagatgacagcagattctgggttctgggagtgttctgtgcctcttacatgccctggaggcctcatggtctcagtgctgaggcggcacacctgtagcacacctgcgtaatgtgcggtctgggccagtcacaaggaattgtgttgtctaagccaaagggggaagctgactgtgatttaccaaaaaaaattctgtaattcaaaccaaaatgtctgcggaatcaccagtttgatactctctgtaatcagaacagtgggcagtgcctgggtgaacgtgtctagcagccactgtgcgggatcgctgtaacaggagtggaatgtacatatttatttacttttctaactgctccaacagccaaatgccttttttatgaccattgtattcagttcattaccaaagaaatgtttgcactttgtaatgatgcctttcagttcaaataaatgggtcacattttcaaatggnnnnnnnnnnnnnnnnnnnnnnnnnnnnnnnnnnnnnnnnnnnnnnnnnnnnnnnnnnnnnnnnnnnnnnnnnnnnnnnnnnnnnnnnnnnnnnnnnnnnnnnnnnnnnnnnnnnnnnnnnnnnnnnnggannnnnnnnnnnnnnnnnnnnnnnnnnnnnnnnnnnnnnnnnnnnnnnnnnnnnnnnnnacgggcgaagggcgaaacgggggaaaaacacggcaccccagggaaacaccccggggcccggaacaaaagcgttagtgaanatccaaacccaacaaaagaacgcccccggcggggcnacccgagggggggttctctcaaacacaacccccccagtggcggttttcaggggcccttttatttgggtcgctgtcccaagggcgggcccc

SEQ ID NO: 69500 - DNA, 967 bp, Homo Sapiens
  misc_feature (87)..(87): n is a, c, g, or t
  misc_feature (124)..(602): n is a, c, g, or t
  misc_feature (832)..(842): n is a, c, g, or t
cccgcttccgagggagaagcggacagtatccgtagccgcaggtcgaacagagagccacgaggagctccaggggaacgcctgtatttnatagtctgtcggtttcgccactctgactgagctcgannnnnnnnnnnnnnnnnnnnnnnnnnnnnnnnnnnnnnnnnnnnnnnnnnnnnnnnnnnnnnnnnnnnnnnnnnnnnnnnnnnnnnnnnnnnnnnnnnnnnnnnnnnnnnnnnnnnnnnnnnnnnnnnnnnnnnnnnnnnnnnnnnnnnnnnnnnnnnnnnnnnnnnnnnnnnnnnnnnnnnnnnnnnnnnnnnnnnnnnnnnnnnnnnnnnnnnnnnnnnnnnnnnnnnnnnnnnnnnnnnnnnnnnnnnnnnnnnnnnnnnnnnnnnnnnnnnnnnnnnnnnnnnnnnnnnnnnnnnnnnnnnnnnnnnnnnnnnnnnnnnnnnnnnnnnnnnnnnnnnnnnnnnnnnnnnnnnnnnnnnnnnnnnnnnnnnnnnnnnnnnnnnnnnnnnnnnnnnnnnnnnnnnnnnnnnnnnnnnnnnnnnnnnnnnnnnnnnnnnnnnnnnnnnnnnnnnnnnnnnnnnnnnnnnnnnnnnnnnaagaattcggaacgaggaaaaaacccaaactgaaattctatatacgttgtgtctgttacaaatgtcgtagaagaaatcatgcagctaaacgatgaagaagcccaactggagtgttgctttgaagatgacgccttcttatattttcatagcaaatgggtggtatcaaaatcagacattgcttcttgctgataaaaagcctgaaggaaataagtgaaactacatctatgggnnnnnnnnnnncattgagaagtgcaaatgttcgcatccttttgtttttaaaagatatgatgtcagaataaaatgtggaaaacatacggaaaactagtctagactttaaagaattgtgatcaggtcacattgttaat

SEQ ID NO: 69501 - DNA, 1394 bp, Homo Sapiens
cagtcgacggtaccggacatatgcccgggaattcggccattacggccgggggggcttctgtgaaacatggcggtaggctgggaccataacacaagcatgactatatgaaggaagaggaaggttttcctgaagatgaggcgactgaatcggaaaaaaactttaagtttggtaaaagagttggatgcctttccgaaggttcctgagagctatgtagagacttcagccagtggaggtacagtttctctaatagcatttacaactatggctttattaaccataatggaattctcagtatatcaagatacatggatgaagtatgaatacgaagtagacaaggatttttctagcaaattaagaattaatatagatattactgttgccatgaagtgtcaatatgttggagcggatgtattggatttagcagaaacaatggttgcatctgcagatggtttagtttatgaaccaacagtatttgatctttcaccacagcagaaagagtggcagaggatgctgcagctgattcagagtaggctacaagaagagcattcacttcaagatgtgatatttaaaagtgcttttaaaagtacatcaacagctcttccaccaagagaagatgattcatcacagtctccaaatgcatgcagaattcatggccatctatatgtcaataaagtagcagggaattttcacataacagtgggcaaggcaattccacatcctcgtggtcatgcacatttggcagcacttgtcaaccatgaatcttacaaattttctcatagaatagatcatttgtcttttggagagcttgttccagcaattattaatcctttagatggaactgaaaaaattgctatagatcacaaccagatgttccaatattttattacagttgtgccaacaaaactacatacatataaaatatcagcagacacccatcagttttctgtgacagaaagggaacgtatcattaaccatgctgcaggcagccatggagtctctgggatatttatgaaatatgatctcagttctcttatggtgacagttactgaggagcacatgccattctggcagttttttgtaagactctgtggtattgttggaggaatcttttcaacaacaggcatgttacatggaattggaaaatttatagttgaaataatttgctgtcgtttcagacttggatcctataaacctgtcaattctgttccttttgaggatggccacacagacaaccacttacctcttttagaaaataatacacattaacacctcccgattgaaggagaaaaactttttgcctgagacataaaacctttttttaataataaaatattgtgcaatatattcaaagaaaagaaaacacaaataagcagaaaacatacttattttaaaaa

SEQ ID NO: 69502 - DNA, 1382 bp, Homo Sapiens
  misc_feature (834)..(861): n is a, c, g, or t
tttcgtctaaggaaaaaaacatggaagaatcctggcactgtctttttggattatcatatgtatgaagaagatattaatatttccagcaactgggaggttttccttgaagttcttgatggggtagagaagatgaagtccatgtcacagcttgcagttttgtcaagacggtggaagccttcagagatgaagttggatcccttccaggaggttgtattggaaagcagtagtgtggacgaattgcgagagaagcttagtgaaatcagtgggattcctttggatgatattgaatttgctaagggtagaggaacatttccctgtgatatttctgtccttgatattcatcaagatttagactggaatcctaaagtttctaccctgaatgtctggcctctttatatctgtgatgatggtgcggtcatattttatagggataaaacagaagaattaatggaattgacagatgagcaaagaaatgaactgatgaaaaaagaaagcagtcgactccagaagactggacatcgtgtaacatactcacctcgtaaagagaaagcactaaaaatatatctggatggagcaccaaataaagatctgactcaagactgactctgatagtgtagcattttccctgggggagttttggttttaattagatggttcactaccactgggtagtgccattttggccggacatggttggggtaacccagtgacaccagcactgattggactgccctacaccaatcagaagctcagtgcccaatgggccactgttttgactcggaatcatgttgtgcactatagtcaaatgtactgtaaagtgaaaagggatgtgcnnnnnnnnnnnnnnnnnnnnnnnnnnnngctaaccttctattagaaaaggggacaggggaatgagtaaacttcttttattgcggacaaatgtgcacatagccgctagtaaaactagcctcaaacaggatgctcatagcttaataataaaagctgtgcaaaggccatgaatgaatgaattttctgtttatttcactgatgcacacattacctcattgacaattcagaagtaaatccaacgtgtgttgactcttggaaagcagcaaaaacaggagctgaagaaaagaaattcttggaaccagccgtaacccagtaaggaattgtgaagttgtgtttttattttgtttcattttttgcagagtattaagaacattattctggaacatcagaacgtttcccttagaccgatcccagcaggtggcagctcagattgctgcagtgttgtaattataactgattgtacttaagttatggatgtagagaatatgtttcattcatttattcagcatgtaaataaaattgatcctgttgagttatcataattgcagttc

SEQ ID NO: 69503 - DNA, 1260 bp, Homo Sapiens
  misc_feature (337)..(349): n is a, c, g, or t
  misc_feature (663)..(671): n is a, c, g, or t
  misc_feature (846)..(857): n is a, c, g, or t
aaggaaacgattgacaataccctttaacatctgtgactactaaggaaacctatttctttcatagagagaaaaatctccaatgcttttgaagacactaataccgtgctatttcagatatgggtgaggaagcagagctctcggtaccgaaggccgggcttcttgagctgtgttggttgtcatggctactgtttcatgaaccacaagcagctcaacagactggtctgttgccttctgaaaccctttgcacttcaatttgcaccaggtgaaaacagggccagcagactccatggcccaattcggtttcttcggtggtgatgtgaaaggagagaattacacnnnnnnnnnnnnnaagtggcgtggaggcctttgcttccacatttgtttttaacccagaatttctgaaatagagaatttaagaacacatcaagtaataaatatacagagaatatacttttttataaagcacatgcatctgctattgtgttgggttggtttcctctcttttccacggacagtgttgtgtttctggcatagggaaactccaaacaacttgcacacctctactccggagctgagatttcttttacatagatgacctcgcttcaaatacgttaccttactgatgataggatcttttcttgtagcactataccttgtgggaannnnnnnnnaaatgtacacctgatttgagaagctgaagaaaacaaaattttgaagcactcactttgaggagtacaggtaatgttttaaaaaattgcacaaaagaaaaatgaatgtcgaaatgattcattcagtgtttgaaagatatggctctgttgaaacaatgagtttcatactttgtttgtnnnnnnnnnnnngcagagaagggttgaaagttacatgtttttttgtatatagaaatttgtcatgtctaaatgatcagatttgtatggttatggcctggaagaattactacgtaaaaggctcttaaactatacctatgcttattgttatttttgttacatatagccctcgtctgagggaggggaactcggtattctgcgatttgagaatactgttcattcctatgctgaaagtacttctctgagctcccttcttagtctaaactcttaagccattgcaacttctttttcttcagagatgatgtttgacattttcagcacttcctgttcctataaacccaaagaatataatcttgaacacgaagtgtttgtaacaagggatccaggctaccaatcaaacaggactcattatggggac

SEQ ID NO: 69504 - DNA, 581 bp, Homo Sapiens
gcgagggatgagcctgaggtgtcagcatcttcacaggtcttttgagcctgcatgcacaaaagggtctactgtccctggctgcttgataatctctgggatcctgcatctgcacttaccatgtcagctggtccacccagcttcctatcacacttcagttccataaatggctgcctacagaggaaagcttcacatgtgcctaaaaactcccttcagatcgtcatcagcccgtattcagccacaaggaggagatttcatcagaggtgcctgaaaagcacctcagccgaaggcctcacatagagagacctaagaatgaaggcacctggactaggaatgtgaatatgtgaaagaacatgaccggccaggggccctgagttattgaatgcaacccccttcagacactgcaacgcacaggttgtgcaccaagcctagtatgggaaggacagctttttttcatgaggcctgccaggtaaagccagctttgaaacaggaagttgaccttcaccagacactgaacctactggcaccttgatcttggacttcccagccttacaaactgtaagaaataaatgtctgttgttctt

SEQ ID NO: 69505 - DNA, 767 bp, Homo Sapiens
  misc_feature (87)..(121): n is a, c, g, or t
ggttaagggagaagtgatggaggcgattcgaagctgtctttcctaccctcttcagtacctcttccagtgatgtgaagttaaaaccannnnnnnnnnnnnnnnnnnnnnnnnnnnnnnnnnntgagagcttcagttttaaataataaattgttctcgtctttctaaatttcaatcaaaacacaggatgtattctaaaagggaaaaactgtgaggtaaaagaatagggtgaggggaggaaagaaataacttcatagagaaaaattcaatgaacccttggaagaaaatatatggaagtatggttactgacttgggaaagaagagaaaggtacaatgtaactgcacatagaagccagtcctgaaaagaagcaagccggctgaagttatctgcaactcagaagcacttggtaccacccaaggggagataagaggagatctcatcagaggtgcctgaaaagcacctcagccgaaggcctcacatagagagacctaagaatgaaggcacctggactaggaatgtgaatatgtgaaagaacatgaccggccaggggccctgagttattgaatgcaacccccttcagacactgcaacgcacaggctgtgcaccaagcctagtatgggaaggacagcttttcttcatgaggcctgccaggtaaagccagctatgaaacaggaagttgaccttcaccagaccactgaacctactggcaccttgatcttggacttcccagccttacaaactgtaagaaataaatgtctgttgttcataa

SEQ ID NO: 69506 - DNA, 785 bp, Homo Sapiens
tgcggccgctgcctccccgggacgggccgtaccacgcggacggggaggacggggccaggggactgcagggcggctgcaccgcccgggggcggggtgctgagcgctcgggggccctcagcatcggggaccgcctgaccgccatcaacgggaccagcctggtggggctgcccctggctgcgtgccaggccgctgtccgcgagacgaagtcgcagacgtcggtgacactcagcatcgtccactgccctcccgtcaccaccgccatcatccaccggccccacgcccgcgagcagctgggcttctgcgtggaggacggcatcatctgcagcctcctccgtggtggcatcgccgagcgtgggggcatccgcgtcggccaccgcatcattgagatcaatgggcagagtgtggtggccacgccacacgcccgcatcatcgagctgctcaccgaggcctatggcgaggtgcatatcaagacgatgccagctgccacatatcgcctccttacaggccaggagcagcccgtgtacctgtgaccacctcatcccttgcctgccactgtgccttcgcctccatggccccggagccccatcctgggcctgccctggctggccaggaccccagcggttcttggtcctgtatgatttcctaatataaaaacagtaaaagcttatgcatttggcaaagtcttggatcagggtttacgggaccgaggaccttgtccttcctggaagccactagaagccggtgctgtgaaaatactctgtttattaaagaccaggcgggggggg

SEQ ID NO: 69507 - DNA, 580 bp, Homo Sapiens
  misc_feature (461)..(461): n is a, c, g, or t
  misc_feature (491)..(491): n is a, c, g, or t
  misc_feature (520)..(520): n is a, c, g, or t
  misc_feature (544)..(544): n is a, c, g, or t
  misc_feature (561)..(561): n is a, c, g, or t
ccgtcagaggaatgaggccacagtccgtgcagcctcttacagatgtttgcagcctgcctggagagcccggctgtcggcttggcttttggccataaggaagcgatatggctcgggtcagacagcttcgaccccatgcccaccgggcccgagtctgttctctatcacatctgagggggtcttccagaattgagcccctggactccaggtctctggtttatgagagggtaaactgaggcccagagggggctacaacctgccaggctgtccggcagctgagtgaggccaacggcccccgccccacaggagacgaagtcgcagacgtcggtgacactcagcatcgtccactgccctcccgtcaccaccgccatcatccaccggccccacgcccgcgagcagctgggcttctgcgtggaggacggcatcgtgaggccccggcccctggccccggggtgggggggttntaacctcttttcacatcattaacttcttcntggttgacatcagcactatcctcttaaanattcaaatgtgaactaacagcatnatttattgaaggcatantatgttaaaattagtgatt

SEQ ID NO: 69508 - DNA, 1366 bp, Homo Sapiens
  misc_feature (1271)..(1279): n is a, c, g, or t
attgtaaactgccttcattttggctctttgtttatgttcaggtttagtttacaaacccatttaagtatggaatgatttatatggggtcaggtgctccacaaaatagacctatgagaccaaaaatgacctaggctatttagacgacagcatgaaacttccacgttagttctcagtctataaaggcacttaccggtctctggtgtggtatgaccaatagaaacaccttatagtttgctttggacctcattgtggaaaaataatctgcctttctaattgttctgcataggttaaaatgataaatttacattctttgaacctataccagattgtggtgtccgagtgaccggcacactgtctgacacacagtcagtgtgcacgtatttgtctgagtgaatgaggagacctgagaaaccggtgacgtggcacagggaagccagctggcccaggattccgtacatggccgcaagcagactaacgcgttgacgctaatttaatgtattttacctcacactaaggtcatgcttgataaagacgttaaactcaacttgtaaaatggtagcccagtgctatgcacagagtgggtgctcattagtgttgaatgaacacatttgtaatactacatgtaattccatctgactgctttgttaaattttcagttagaacgtagatactgtaaagtccacacacacattaaatcttgttttcctgaaagtatggcatcaaaaatacttgtagaaaaaccttgtcacaactgatgtgaatgttcctattttctttgactttgatattggcttgtaatgtctcttttcatcatatgtaatatcagtggaacaggcagcgctactcaagtcctaaggattcctcagtgatcagtgatccagggccgttcatgaaccactgggctggatttgactgttgagtgtggcagttaatgcccctcaagaaatcaaaggatgtcttataagtgtcttccaaaaaaaagcaaatgctgaaatcctattggcaaagtaaactgaaattggctgctatattttatataatcatttctgcaaatcccattttttgaatactaatatttgacatggttaattcttattaatttgttggaattgtttattgttaataatgcaaatagataatttttaattatccacaagtaacatttcactgttaatggtttgaaataggtgataagcaaaccaatttgaaataaaatataaacatgtgccattgtattataacactatacactttcttgacagttaaatttnnnnnnnnnttttttttggtagcatgtattgtatatgtttatagtatatgtagtaaataaaaatatggccaaatgtttggcttggtgatcttttgc

SEQ ID NO: 69509 - DNA, 498 bp, Homo Sapiens
aacgaactgaatggcgatgtattttaaacgctcatattttgtttctcctctcacacttctccctttgcgtgttccttttccacaattctaatgctactgtccatcaaaccctggcacctgcggccacgatgtttcagagacaatcgtacggagaagccacttcacagtcagtcacaggaaggccagagccggcaacaggacacaacagagcaaggctttaaaaattactcgaaagggaagaaaacccttgaaagcctcaggcccaccctcctgccccgagggaagacacccccattgcggcggtttcctcccaagcctcgccgccgtcacaggagccctctcctctgccatcgtctgtcctggcgtttctcggacgaagctttcacctcaatctctagaagcagaaacgaaacagtcccagccctccccccgccatatccaagtatacatgagggataaaattacatttgtacaaaaatagattttttttcctcgttc

SEQ ID NO: 69510 - DNA, 570 bp, Homo Sapiens
gcacgaggagcaaggattcaaaaggcaaaggtaaaggcaaggataagaggagaggcaagaagaagtgaccaagttctcttttgtgttttctgctggtattctggaggtgggaaggacttggagagagttaagaaacacctggtacctcaaagatgactcatctacaggttgtttcctattgagactttcccagggaagcctgatttcactttgcctgttaatttcactctgcctgttaggtgggttttcaaaccctgatttaggattacaccattgacttagggcttcctcataccttgctgggaagaagtttctagtagtcctgtgaagattcattcttcttgctctttctcagcagaacaaaggagttcactggcttagctacagtgacgcattgaaacttgagtaattcctgtaatgtcagattttgattttacccaatttgtctgtagtgaaaaaactcttatgagcaaaagtattcagtaggaattacaatatgatgttattagctgtccagcataatatatacacagcaaagttttaataaatgttggttcctgcctgcctttt

SEQ ID NO: 69511 - DNA, 1212 bp, Homo Sapiens
  misc_feature (37)..(37): n is a, c, g, or t
  misc_feature (40)..(40): n is a, c, g, or t
  misc_feature (63)..(63): n is a, c, g, or t
  misc_feature (89)..(89): n is a, c, g, or t
  misc_feature (712)..(723): n is a, c, g, or t
  misc_feature (779)..(814): n is a, c, g, or t
ggaggagttgtgaaaattaggaaagtttttatatatnttntgaagtgggcatggttggctctntgaagacctataaagagatccagtgngaagagtaagggttgttcatcatcacaagaaataaaaaacatagtgatttttctcttaatgtgtagaggtggttttactggcaataattaataatagatttctatttcagtatgtaagcatattaactaaaatatgaattacacttccaaagttagatttctgcttcagtaggtttgtttgctgtgaagattacttctcaaaagacagatgttcatattagcttaattttcggtttaaatatgtttgtaaatgatgtaatatatttcttttgactaaatgtggaaaagtaatgtgtgttatacattgagaagtttttactggctttgactggaggtggtttttgcagagatggtattttatatgattccagtatttggaaaagaattagtcaaaaggaattcacatagtttaaatactgagaaattaatatccaaatatgtacttgtctgatttctaaataagctgggggaggagggaggggtgggaattgaaatgtgcaaatgagtagtgaatgctacactcattttcaactctttaacatgaaactgttcaatcttaacacattgttactttaatatatgtataaagaagtattactgtttgtaaagctgctgtttgcttnnnnnnnnnnnncacccttgtcatgtattttctgtatgttgggccaacaggttagaacatcaactcannnnnnnnnnnnnnnnnnnnnnnnnnnnnnnnnnnntctgtgaaataatttatttacagacatcttcctcctccctcatcccttccaacctttacatacatcacagaatcaaccaaactgtttgcctaatctgaaatctgaatcctaatgagaaaaatttaaattttgttggcacatcacaccttgaaagtatttgtattattttataatttaatttctaaatataccacataagtttataatttaatgtcttaattgtaatgctctaataaaaaactagcaaaattagtgtgagttataacatgaagggattttcatcttttgctgtatgaaggataattgttatatcacatttggggggtaataacagcttttttgcactatgtaaatactagtggggattcttctgtactaataaaatgattattgaaatg

SEQ ID NO: 69512 - DNA, 1043 bp, Homo Sapiens
  misc_feature (69)..(70): n is a, c, g, or t
  misc_feature (188)..(188): n is a, c, g, or t
  misc_feature (199)..(199): n is a, c, g, or t
  misc_feature (249)..(250): n is a, c, g, or t
  misc_feature (253)..(371): n is a, c, g, or t
  misc_feature (410)..(410): n is a, c, g, or t
agtcttactcagtatccctgtgcttgaaacgctataccaccttgagggagtgtaccgtcccgcaccaannaccggacccacgagtcctagtagagagaagagggacgcccaaaccaaacccctctccacacggttgccagatcattaatgcagtgacacagacaggttcgcagactggaaagccgacngtgagcgcaangcaactcaatgtgacttagctccctccttagccaccacaagccttagcanntcnnnnnnnnnnnnnnnnnnnnnnnnnnnnnnnnnnnnnnnnnnnnnnnnnnnnnnnnnnnnnnnnnnnnnnnnnnnnnnnnnnnnnnnnnnnnnnnnnnnnnnnnnnnnnnnnnnnnnnnaagaattcggcacgagccttttctgctttttttctaaanaaaagaataactttttttgcctctttagattacatagaagcattgtagtcttggtagaaccagtatttctgttgtttatttataaggtaattgtgtgtggggaaaagtgcagtatttacctgttgaattcagcatcttgagagcacaagggaaaaaataagaacctacgaatatttttgaggcagataatgatctagtttgactttctagttagtggtgttttgaagagggtattttattgttttttaaaaaaaggttcttaaacattatttgaaatagttaatataaatacataattgcatttgctctgtttattgtaatgtattctaaattaatgcagaaccatatggaaaatttcattaaaatctatccccaaatgtgctttctgtatccttccttctacctattattctgatttttaaaaatgcagttaatgtaccatttatttgcttgatgaagggagctctattttctttaccagaaatgttgctaagtaattcccaatagaaagctgcttattttcattaatgaaaaataaccatggtttgtatactagaagtcttcttcagaaactggtgagcctttctgttcaattgcatttgtaaataaacttgctgatgcatttaacgaaaa

SEQ ID NO: 69513 - DNA, 1375 bp, Homo Sapiens
  misc_feature (65)..(99): n is a, c, g, or t
  misc_feature (916)..(955): n is a, c, g, or t
aataggggctagctcgagaagccgaacgacgagcgcagcgagtcggtgagcgaggaagcggccgnnnnnnnnnnnnnnnnnnnnnnnnnnnnnnnnnnncagtcgacggtaccggacatatgcccgggaattcggccattacggtccgggggtaccatcaggagcagaatggagaggcaacaaatccttcaggaaatgaggaagagaacaccccttcacaatgacaacagctggatccgacagcgcagtgccagtgtcaacaaagagcctgttagtcttcctgggatcatgagaagaggcgaatctttagataacctggactccccccgatccaattcttggagacagcctccttggctcaatcagcccacaggattctatgcttcttcctctggggcaagattttagtcgcccaccactcagctggtgtccacatcaaaccgtgcctacatgcggaacccctcctccagcgtgcccccaccttcagctggctccgtgaagacctccaccacaggtgtggccaccgacacagtcccccaccccgagaagccattccccttcagcttcacagtcaggctctcagctgcgtaacaggtcagtcagtgggaagcgcatatgctcctactgcaataacattctgggcaaaggagccgccatgatcatcgagtccctgggtctttgttatcatttgcattgttttaagtgtgttgcctgtgagtgtgacctcggaggctcttcctcaggagctgaagtcaggatcagaaaccaccaactgtactgcaacgactgctatctcagattcaaatctggacggccaaccgccatgtgatgtaagcctccatacgaaagcactgttgcagatagaagaagaggtggttgctgctcatgtagatctataaatatgtgttgtatgtcnnnnnnnnnnnnnnnnnnnnnnnnnnnnnnnnnnnnnnnngcctctttagattacatagaagcattgtagtcttggtagaaccagtattttggttgtttatttataaggtaattgtgtgtggggaaaagtgcagtatttacctgttgaattcagcatcttgagagcacaagggaaaaaataagaacctacgaatatttttgaggcagataatgatctagtttgactttctagttagtggtgttttgaagagggtatttactgttttttaaaaaaaggttcttaaaccattatttgacatagttaatatacatacctaattggcttttgctctgtgtatcgtcactgtattctaaattaatgcagaaccatattggacactttcctttaaaatctatcccaaatgtgctttctggatccttccttctactattattctgaatttaaaatggggtaatggcc

SEQ ID NO: 69514 - DNA, 775 bp, Homo Sapiens
  misc_feature (19)..(19): n is a, c, g, or t
gaattcggcacgagatcanaccacgagataaacaagggaaggggacttttgtataaatcatcgactgactgcttgattcaggctgttcaaggtgaaggattcatgagtctatataaaggctttttaccatcttggctgagaatgaccccttggtcaatggtgttctggcttacttatgaaaaaatcagagagatgagtggagtcagtccattgtaaacccctaaagatgcaacccttaaagatacagtgttcagtattattgaaatatgggcatctgcaacacataccccctattatttctacctctttaggaagacacctattccacagagactgatttatagggggcagcactttatttttttctggaaacccaagttctctttgactcctctttttgtccaaaagtgatctggtcggatctcacaaggccatccaatgagaccccgcacagcattttctaaagaagaatcgaagcctgaccactttcaccttgggcaagaaggtttggcctttgagttgctattctatgctgaagagcctgcttagaggaggagtaccaggagggagccagcatttcagatctgaagtagacgataggaatgtggaagaacacatacatagtgcttaagaaatacatttaacctgttatgtcagtatttatcaatgaagtttgataattcacttttctgtcattgttaaagcgtacatactgtaaattaaagggaggtgaatggaaattaatgaataaacattttgagtttccctagtgttg

SEQ ID NO: 69515 - DNA, 724 bp, Homo Sapiens
  misc_feature (544)..(602): n is a, c, g, or t
  misc_feature (646)..(675): n is a, c, g, or t
actgccagcggcctgactcttactcagtttagcaaaaattcttgcctaaaaagtgataagtaaaaatctgtttatggtatacagttatgtctcgaatctttgaatcaaatccatgttcttattttagaaaggtaagagttcttcaaattcagctacataccaccggctctcccaacctcagacggtgggcatttctggatggatggctgcggttatggataaaggctgtaactgttaacacagaaaaacatgaaaagctcaggcccaagaaaggccttggagccagccaaacagaatttgttctaatggacatggatgatgttggacagaaaaaagtttacaagtgctttgtggttgcactaatgtatactcactgccattttaagagggggaagtacattttaaaatatatttgaatgtcatgtactgatatgcagtagcttattgtttttctagttgcagagaatgtgaagtttaatctcttaaaatatttagatggtctactttttcattgaatttgtcaatatgtaattgcgttgtaaannnnnnnnnnnnnnnnnnnnnnnnnnnnnnnnnnnnnnnnnnnnnnnnnnnnnnnnnnngcttaacttcccaagtgttctgcattgaaccacttagggaaaannnnnnnnnnnnnnnnnnnnnnnnnnnnnnaaaattaagtaaagactggatcaaaataattgcatccaacctggaccgt

SEQ ID NO: 69516 - DNA, 2408 bp, Homo Sapiens
cagtcgacggtaccggacatatgcccgggaattcggccattacgggccgggggctcttatcggttcccatcccagttgttgatcttatgcaagacgctgcacgaccccgcgcccgcttgtcgccacggcacttgaggcagccggagatactctgagttactcggagcccgacgcctgagggtgagatgaacgcgctggcctccctaaccgtccggacctgtgatcgcttctggcagaccgaaccggcgctcctgcccccggggtgacgcgcagctcccagccgcccagacacatggccccaggccaagcaccccatcaggctaccccgtggagggatgcccaccctttcttcctcctgtccccagtgatgggcctcctcagccgcgcctggagccgcctgaggggcctgggacctctagagccctggctggtggaagcagtaaaaggagcagctctggtagaagctggcctggagggagaagctaggactcctctggcaatcccccataccccttggggcagacgccctgaagaggaggctgaagacagtggaggccctggagaggacagagaaacactggggctgaaaaccagcagttcccttcctgaagcctggggacttttggatgatgatgatggcatgtatggtgagcgagaggcaaccagtgtccctagagggcagggaagtcaatttgcagatggccagcgtgctcccctgtctcccagccttctgataaggacactgcaaggttctgataagaacccaggggaggagaaagccgaggaagagggagttgctgaagaggagggagttaacaagttctcttatccaccatcacaccgggagtgttgtccagccgtggaggaggaggacgatgaagaagctgtaaagaaagaagctcacagaacctctacttctgccttgtctccaggatccaagcccagcacttgggtgtcttgcccaggggaggaagagaatcaagccacggaggataaaagaacagaaagaagtaaaggagccaggaagacctccgtgtccccccgatcttcaggctccgaccccaggtcctgggagtatcgttcaggagaggcgtccgaggagaaggaggaaaaggcacacaaagaaactgggaaaggagaagctgccccagggccgcaatcctcagccccagcccagaggccccagctcaagtcctggtggtgccaacccagtgatgaagaggagggtgaggtcaagcctttgggggcagctgagaaggatggagaagctgagtgtcctccctgcatccccccaccaagtgccttcctgaaggcctgggtgtattggccaggagaggacacagaggaagaggaagatgaggaagaagatgaggacagtgactctggatcagatgaggaagagggagaagctgaggcttcctcttccactcctgctacaggtgtcttcttgaagtcctgggtctatcagccaggagaggacacagaggaggaggaagatgaggacagtgatacaggatcagccgaggatgaaagagaagctgagacttctgcttccacaccccctgcaagtgctttcttgaaggcctgggtgtatcggccaggagaggacacggaggaggaggaagatgaggatgtggatagtgaggataaggaagatgattcagaagcagccttaggagaagctgagtcagacccacatccctcccacccggaccagagggcccacttcaggggctggggatatcgacctggaaaagagacagaggaagaggaagctgctgaggactggggagaagctgagccctgccccttccgagtggccatctatgtacctggagagaagccaccgcctccctgggctcctcctaggctgcccctccgactgcaaaggcggctcaagcgcccagaaacccctactcatgatccggaccctgagactcccctaaaggccagaaaggtgcgcttctccgagaaggtcactgtccatttcctggctgtctgggcagggccggcccaggccgcccgccagggcccctgggagcagcttgctcgggatcgcagccgcttcgcacgccgcatcacccaggcccaggaggagctgagcccctgcctcacccctgctgcccgggccagagcctgggcacgcctcaggaacccacctttagcccccatccctgccctcacccagaccttgccttcctcctctgtcccttcgtccccagtccagaccacgcccttgagccaagctgtggccacaccttcccgctcgtctgctgctgcagcggctgccctggacctcagtgggaggcgtggctgagaccaactggtttgcctataatttattaactatttattttttctaagtgtgggtttatataaggaataaagccttttgatttgtagcgaaa

SEQ ID NO: 69517 - DNA, 984 bp, Homo Sapiens
  misc_feature (86)..(86): n is a, c, g, or t
  misc_feature (102)..(102): n is a, c, g, or t
  misc_feature (136)..(136): n is a, c, g, or t
acaatgtctcatgactgagttgacttttactcagtgatttgtattaggatgctgccagtcaaagttctacccgagagctaccatcnaaccagagccagtccnatagagagtgacatgattatcttaccctctcatntaggttgttgatcattatgaaaatcctagaaacgtggggtcccttgacaagacatctaaaaatgttggaactggactggtgggggctccagcatgtggtgacgtaatgaaattacagattcaagtggatgaaaaggggaagattgtggatgctaggtttaaaacatttggctgtggttccgcaattgcctccagctcattagccactgaatgggtgaaaggaaagacggtggaggaagccttgactatcaaaaacacagatatcgccaaggagctctgccttcctcccgtgaaactgcactgctccatgctggctgaagatgcaatcaaggccgccctggctgattacaaattgaaacaagaacccaaaaaaggagaggcagagaagaaatgagccctccctcggcgaagcctccagcaggccacaccagctgtttcccacctgctgtgcagtcaccttagatgttcagaagccgcttcctctccactgaagagctatgagatacgcacaatacttgctgttcacgttatgactctcatgcaagcaaaatacacagtttcattgttctgaatcctgtggtttctttcagcccacttttatcgccttaacctagttaatgtatattttgaattgtgtgtatgacctcagaactgaaattgataatgaagttgcaagttttgatagcccgtgaagtgcataagtatctaattttacctgaattgatttggggggaaattaccagtagaatgccttggtctgaatatttgatagaaccaattgttgtacataaaacagatctgcgcatatatagacacgaatatccattaatcaaataatggaagatgaaa

SEQ ID NO: 69518 - DNA, 1067 bp, Homo Sapiens
  misc_feature (874)..(874): n is a, c, g, or t
  misc_feature (993)..(993): n is a, c, g, or t
  misc_feature (995)..(995): n is a, c, g, or t
cagctctctcagtttttattttccccatagcctcactttgaatattgactcctaaataaaagtggtcaaactctcgatcactagagggtgatgtggcaaatgccatcccatcaacagattgacatgatcttttttccaaagggcatgtcaacttttttatcatgacaagattttgtccaaagctagactttgatggggagcaggcaagaagtaacatttcctgtggtccctactatgtggcaagacatcttctgtaagtccccaaactatcctggcaagaaaagcatgattatcccagttctatagaagagaaagtagggtcaaagaggctaaggaactagcctgggatcacagatttttaaccgtagtctgtctccaggatcacccgcaggagtaactcagctcaggaagcagctgctgacgtgcccagcaactcctcaccccagctttctggcttggttactccattagtccccaccagcaccacttcctcccaggctcttaaagattctattcccaagtccatttctttcacatctagaaacttaggcttctttccttccgttacttccagtgctggctgaagatgcaatcaaggccgccctggctgattacaaattgaaacaagaacccaaaaaaggagaggcagagaagaaatgagccctccctcggcgaagcctccagcaggccacaccagctgtttcccacctgctgtgcagtcaccttagatgttcagaagccgctccctctccactgaagagctatgagatacgcacaatacttgctgttcacgttatgactctcatgcaagcaaaatacacagtttcactggttctgatcctgtgggttctttcagccacctttatcgccgtancctagttaaggacattttgaattgtgtgtagactcagactgaattgatatgaattgcacgtttggagccgttgagtgacactatccacttacctgaatgatttgggggaaatacattanangccttggcggaaattggtaaaacaattgtggaaacacaaattgggcaaataaatagtataaaagacgatgag

SEQ ID NO: 69519 - DNA, 424 bp, Homo Sapiens
ctttccagtttggtctctgtattaaatctaatgctttttccatcatttcttaaccttctcagggaaagaaggaatgagaaacattagccttaatgcatcgatggaggtttactaaccaaattagttaaaaatcagcagagagtcaggcctcttgccaagtgctggctgaagatgcaatcaaggccgccctggctgattacaaattgaaacaagaacccaaaaaaggagaggcagagaagaaatgagccctccctcggcgaagcctccagcaggccacaccagctgtttcccacctgctgtgcagtcaccttagatgttcagaagccgcttcctctccactgaagagctatgagatacgcacaatacttgctgttcacgttatgactctcatgcaagcaaaatacacagtttcattgttctgaaa

SEQ ID NO: 69520 - DNA, 1047 bp, Homo Sapiens
ggtccggaattcccgggatcgcgctcccagctcggagccgactcgcagacgcgccccgcccctcggcgtcgctctggactggcgcaggcgcaagccggcaagatggcggcggctggggctggccgtctgaggcgggcggcatcggctctgctgctgcggagcccccgcctgcccgcccgggagctgtcggccccggcccgactctatcacaagaaggttgttgatcattatgaaaatcctagaaacgtggggtcccttgacaagacatctaaaaatgttggaactggactggtgggggctccagcatgtggtgacgtaatgaaattacagattcaagtggatgaaaaggggaagattgtggatgctaggtttaaaacatttggctgtggttccgcaattgcctccagctcattagccactgaatgggtgaaaggaaagacggtggaggaagccttgactatcaaaaacacagatatcgccaaggagctctgccttcctcccgtgaaactgcactgctccatgctggctgaagatgcaatcaaggccgccctggctgattacaaattgaaacaagaacccaaaaaaggagaggcagagaagaaatgagccctccctcggcgaagcctccagcaggccacaccagctgtttcccacctgctgtgcagtcaccttagatgttcagaagccgcttcctctccactgaagagctatgagatacgcacaatacttgctgttcacgttatgactctcatgcaagcaaaatacacagtttcattgttctgaatcctgtggtttctttcagcccacttttatcgcccttaacctagttaaagaatattttggaattgtggggatgacctcaggaactgaaatttgataatgaagttgccagtttttgatagccccggggaagtgcataaagtatctaatttttaccctgaaatggatttggggggggaaattaaccccttaaaaatgccttgggcctggaaaattttgataaaaacccatggtttggaaataaaaaccgaacctgggccattatat

SEQ ID NO: 69521 - DNA, 775 bp, Homo Sapiens
tttttgtatagaaacagatccatttcttggtaatcaaagcacatttgtttggtcttcctccaaccctttgcatttgatttctaaacattccttcatatgcctttaatgaaagccagcaattatcccatgggccctacttgaatttatctgaggcagctacagattgccctgcaagatgagtttttggagataaatgaaataactggacacacactcacacaagtaacaccacagcagacctcggagtactgctaagtgtacctgtgtcaaatccgcacaggactcaatatagcaatttattcttgatgtatgcaattgcacattgtaattatattaacagagcacactaataatttgtatagattatatatattagatcttgggtatggtttttaccttctcccatggggaacttcttccttcctgatgtggaattgtacatttaaagcttggtcggtgacctttgcataccatcaacgagcacagctaagaacagagtgagagaggcccatggctgattttaccatgtgcccagattaatgtatatagttgattggaatgaggttttatgaatattcatgtttttgaaggcctttaatttctgtctgcatattagcttttaatgtgtgattttaagagagaatactttgacacctgtaaaaatcaaaatactactctttataagacatttcacaaatattcacttacattacaggctggaagtattttattcatatgtatatttataccaataaaatgattttacaagtggaaa

SEQ ID NO: 69522 - DNA, 919 bp, Homo Sapiens
  misc_feature (625)..(788): n is a, c, g, or t
catgattcgtctttgagtacctccaggctgaaagactgttgtaccagtaaaaacttaaaggcacaaattctccttgaagaccttctcccttttatgtggccccatattttatgttgctttatctttgaaattttgcatgaaaaggaaatgaatggattcgaatgaaattgtcctttagagcatgattacttgttcccatggacaaatatttttctccccttgctcttcctggcctgaaacacgggaaaccagagtcaaaagttatctccctctccctgtgatgccttgagatttttttctgcgttgtttaatgcctgaaatccaagtcttcctccatgggaaaatactgttataccaaataattctagatgagtaacaaagatctttttaggccttcattttatgttttttcttaactgttatattatgattgtgacatagattatactactactaatttttggatgtttcaaaaggtcaagaagtaaaagatgttagaaagcaatgagtgagtccttttgatttttaacttattccccatgtccctatacttcgtgtgcttttccttttcttttttggagacggaggctcactccgtcacctaggctagagtacaggggcacgnnnnnnnnnnnnnnnnnnnnnnnnnnnnnnnnnnnnnnnnnnnnnnnnnnnnnnnnnnnnnnnnnnnnnnnnnnnnnnnnnnnnnnnnnnnnnnnnnnnnnnnnnnnnnnnnnnnnnnnnnnnnnnnnnnnnnnnnnnnnnnnnnnnnnnnnnnnnnnnnnnnntcaggtgatccgccgctctgccttccaaagtgctgggatcacaggcgtgagccatctgccgattatttctacatgtaatggtcgaaaacgtcctgtgaccgcgattgcattcttgtgagtgctgggaaatt

SEQ ID NO: 69523 - DNA, 555 bp, Homo Sapiens
agaattcggcacgaggggatgacaagaccaccatcatccgcgtggggaagagcctcctcattctgacccctctgctagggctcacctggggctttggaataggaacaatagtggacagccagaatctggcttggcatgttatttttgctttactcaatgcattccagggattttttatcttatgctttggaatactcttggacagtaagctgcgacaacttctgttcaacaagttgtctgccttaagttcttggaagcaaacagaaaagcaaaactcatcagatttatctgccaaacccaaattctcaaagcctttcaacccactgcaaaacaaaggccattatgcattttctcatactggagattcctccgacaacatcatgctaactcagtttgtctcaaatgaataaggcaaggaatcataaaatcaagaaaaaatttccagaacaacttgacatttagagacaaatgtcaatgaagaaattatgctcagtattcgatcgggttttctgatttaggggtctgggaataaaacaagaatgtctcagtggcttc

SEQ ID NO: 69524 - DNA, 730 bp, Homo Sapiens
gaattcggcacgagggttgagaatcatttttagtcagagcactgtttttcctccattttcctccatgggttctcttccagtaacaaatgtgatccaaagaaatgtaagcatagacatgaaaagggataatgccgcctttaaaactgttttctagtttgttgttagaagttataaaaatacacaggaacacagcattcacttgaaaataaatttttaggcattttaaatagattaaagcagaagaaagagtgagaaagtaaccattctaaattcttaaaaagagaatagcacctatgaaaatgaaataaagaatcatgaataacatcaggaagtcaggaaatgcagaccaacagtaaaagaatgctattaatgtccaaatgacttatttttattttgtgcagcaaaactcatcagatttatctgccaaacccaaattctcaaagcctttcaacccactgcaaaacaaaggccattatgcattttctcatactggagattcctccgacaacatcatgctaactcagtttgtctcaaatgaataaggcaaggaatcataaaatcaagaaaaaatttccagaacaacttgacatttagagacaaatgtcaatgaagaaattatgctcagtattcgatcgggttttctgatttaggggtctgggaataaaacaagaatgtctcagtggcttcattactgctcccttttgtcttcaattaaatgaaaagaagattt

SEQ ID NO: 69525 - DNA, 660 bp, Homo Sapiens
cctttggtgtcagaaacttggggcttccacattttcagtttatcttcatcttttgactctttttcactcaggtctacatcatcataaataataacttcctgagacttaagttctaaatcaggcagcaaaatggaaaatgcacttaagttttctttcgacttggttttctttattttaaatctatccttttctttcttgaagaattgctgcagtcttttgagtgcttcttttccatctaaatctatctttgggtagttgttctttgttttgtagacatcttcatacagttctctattttcttcactacttgaggcaagtgagctagagtagttcagcttcggtacctctttcctggagtactcgacatcatcatatatctcctccgagatggaacttgtcttagagacccctaggtctggagtttctttagttgactccaaaacctccagatgcccacagtggccttgggagtgcctggccagctttgggccctcagggcagggatttgtctggatgatgtcaatcatggcctcttgctttccagccaacatgttccttctacctgtgtggacgttggtcatctgaattttttcaggtgtcccttcacaggcatctaccttgaaaacatggtttgaatatggttccttttctgtgttttta

SEQ ID NO: 69526 - DNA, 380 bp, Homo Sapiens
  misc_feature (176)..(176): n is a, c, g, or t
  misc_feature (287)..(303): n is a, c, g, or t
  misc_feature (309)..(309): n is a, c, g, or t
caaaaaatgtagaattcattttgtagtaaagtagtttattttttttaatttcaagtgatgtaattaaaaacctaagttgtgtttcaaaacagcaacaaaactgtattgtattttttttgctgtaattaactgtataatgtaaacctaattattttatcatggtttaaattttttgncatatttgctttatcttatgctgctgatttttttaactgaatttgtaagattttgttaatcaaagcaaccaattatgtggtgacttgcctatatcatgaattatttaagannnnnnnnnnnnnnnnnaattanaatttatttcaaatgttttgttcatgatactatccttcagggttatgtgcttatcaatgaaataaccccat

SEQ ID NO: 69527 - DNA, 2116 bp, Homo Sapiens
  misc_feature (1875)..(1875): n is a, c, g, or t
  misc_feature (1960)..(2020): n is a, c, g, or t
gggcagggggaagcgtagaagtgcggagaatggggggagttggctggcacgtacgcgaactcggggtctctcgtctcgcgttacacgccggcaatgtgggcagggtgtatgcgatctgtttcatagcttgggcaatcccaatacgtaggagacatgtaggcgccggcttcatctgatgggccatagcagaaagcggggaaagataggaacaggggtggccaagaggtctgaggggaggtggggagattacgagggcgctttggggaaatatgaattgagagaacaccgaacgagtgtgacagaagtgtggtgcgcaagagatagaggagcgccaagagatgtgttgggtgttgtaggtttcgagaggtgggttttggtagggattgctacatgcgccttacacggaagatttagcggccccctttgttggggggtaggaaaaacgggcgttgattaaaagaagggccgggagagagggcggaaaattcgaggaaatcttaaggcgcctaggagacggcgcgactgggtgatatcaaaaagatgggctgaaaaaagggtgagagaggggaggtgcttaggatatggcgccattagccagtgacgtaaaagtgtctccattcaggaagtaattgtgcggtgggtagtatgagtgaaatgccaaggaaattttcggggcgaatgcatgtgagcacgcacaagtcttggctcgtgttggtcacaaattcgaaggggctttgtgcgtagaacgttgttgcgtatgtgagtatgcatttcctagttcattacatgggatccctcttgttccagagataatttaaaagggtgcctgggtctattacaggcagcgtatttcagaaataacgagacttcgaagacattttacttaggaaaagttcagtaatagagaaataattctgcagatagaaaatgtaaacagttaacatacacttgtcaggagcagcaccattcttaacactactcgacatccacattgcgtgttatgttgaaaatcaggtataaaaaaataaaagacttagactaaataaccaccatttatgcctgctctgctcaatgtgaagaaacagtccttagcaaaagtgatatcctatatatggctgtgtgctactattttcagatgagacggtatattgctcaatttgatacatcacctacacaaatctaggtagggtttggaacctcccaatagctcgtataaatgattatgctacaagtagaatcaaatgaaacaccagaacaactggtgctcaagctgacagacactcccaagtgaataggaaacaggaaaggtccaaggacccgaagctgcaggaaagggaaagaccagactctagaacattgctgggacctacagcctgagtagattaactcagtgtatacaaaaacaggctcatagctagtagaagtgaaccatctgtttatttgcattgaaatgtattattcatgaagtatcctcttgcctttatgtgatcataaactttgagcatgccacaaatttgtagaatacaccatattctttttacttatttttgttgggtagggtggggacataaggtggtggtagacgcccagcatcttcaaagacatgctctgagttattctgccatttagatgacggggcttttgccaaaattaagtaggattgcctaccaattcttgtaactaaattaggattggcaagtagcaaatattggaggtctcctaacacgttcatcatttacagtaagttattcctgaatataactggctacacgttattttccctcactcctctggggttatttcattgataagcacataaccctgaaggatagtatcatgaacaaaacatctgaaataaattctaattaaaaaaanctataaaaatcttaaataattcatgatataggcaagtcaccacataatagttgctttgataaacaaaatcttacaaattcagttnnnnnnnnnnnnnnnnnnnnnnnnnnnnnnnnnnnnnnnnnnnnnnnnnnnnnnnnnnnnnttaggtttacattatacagttaattacagcaaaaaaaatacaatacagttttgttgctgttttgaaacacaacttaggttttaaattacatcactt

SEQ ID NO: 69528 - DNA, 864 bp, Homo Sapiens
ttcaaaatccatcttgagctgtgtcagacacaggtcagatgggggggaaggagcagcaccaaatccaagatggcggccagcaggaggctgatgaaggagcttgaagaaatccgcaaatgtgggatgaaaaacttccgtaacatccaggttgatgaagctaatttattgacttggcaagggcttattgttcctgacaaccctccatatgataagggagccttcagaatcgaaatcaactttccagcagagtacccattcaaaccaccgaagatcacatttaaaacaaagatctatcacccaaacatcgacgaaaaggggcaggtctgtctgccagtaattagtgccgaaaactggaagccagcaaccaaaaccgaccaagtaatccagtccctcatagcactggtgaatgacccccagcctgagcacccgcttcgggctgacctagctgaagaatactctaaggaccgtaaaaaattctgtaagaatgctgaagagtttacaaagaaatatggggaaaagcgacctgtggactaaaatctgccacgattggttccagcaagtgtgagcagagaccccgtgcagtgcattcagacaccccgcaaagcaggactctgtggaaattgacacgtgccaccgcctggcgttcgcttgtggcagttactaactttctacagttttcttaatcaaaagtggtctaggtaacctgtaaagaaaggattaaaaatttaagatgttctagttctgctctctttgttttaaaaatcactgcttcaatctacttcaaaagaatggtgtttcttttcttgtccaattttatccaaaatcttcaagttacatttaacccataaggtttaaaaaaaagga

SEQ ID NO: 69529 - DNA, 1900 bp, Homo Sapiens
  misc_feature (1646)..(1826): n is a, c, g, or t
  misc_feature (1830)..(1831): n is a, c, g, or t
  misc_feature (1833)..(1849): n is a, c, g, or t
cgccgctcgcgaggacctcaggtggatcgccgcggcccctcctcccagagcggcagccttttcccgcgcgtgctgccttcgccgctcgggccgcccgggggaaaacatggcgtctgccctggagcagttcgtgaacagtgtccgacagctctcagctcaagggcaaatgacacagctttgtgaactgatcaacaagagtggggaactccttgcgaagaacttatcccatctggacactgtgctcggggctctggatgtacaagaacactccttgggcgtccttgctgttttgtttgtgaagttttctatgcccagtgttcctgacttcgaaacgctattctcacaggttcagctcttcatcagcacttgtaatggggagcacattcgatatgcaacagacacttttgctgggctttgccatcagctaacaaatgcacttgtggaaagaaaacagcccctgcgaggaattggcatccttaagcaagccatagacaagatgcagatgaatacaaaccagctgacctcaatacatgctgatctctgccagctttgtttgctagcaaaatgctttaagcctgcccttccatatcttgacgtggatatgatggatatctgtaaagagaatggagcctatgatgcaaaacactttttatgttactattattatggagggatgatctatactgggctgaagaactttgaaagagctctctacttttatgaacaggctataactactcctgccatggcggtcagtcatatcatgttggaatcatataaacaagtatattttagtgtctttgatattacttggcaaagtacaacagctaccaaaatatacatctcaaattgtgggtagattcattaagcctcttagcaatgcataccacgagttagcacaagtgtattcaaccaacaacccctcagaactccgaaacctggtgaataagcacagtgaaaccttcactcgcgataacaacatggggctggtgaagcaatgcttgtcatctctttataagaagaatattcagaggctaacaaagacctttttaactctatcattacaagatatggcaagtcgtgtgcagttgtctggacctcaggaggcagagaaatacgttctgcacatgatagaagatggtgagatttttgcaagtattaaccagaaggacggtatggtcagtttccatgataaccctgaaaaatataataacccagccatgcttcataacattgatcaggagatgctgaagtgcattgagctggatgagcggctgaaagccatggaccaggagatcacagtgaaccctcagtttgtacaaaagagtatgggctcacaagaagatgattcaggaaacaaaccatccagttattcttgaaactaacatccatcctgagctaaacaagagaaactaccatcttggccagtgacaagtgttcggagggcagcagagaggaccaagcctgtgtcacctggagactaagaaattaagttttgttttgacatcttcagtcctgtgtgctttcagaaaaccattttctctgcaaagaaaggaaacagatttgcaaactttaaagtctgtcgtggatttatttatcctcagattattgttactgcattaaatctacctttttgttttaaaaannnnnnnnnnnnnnnnnnnnnnnnnnnnnnnnnnnnnnnnnnnnnnnnnnnnnnnnnnnnnnnnnnnnnnnnnnnnnnnnnnnnnnnnnnnnnnnnnnnnnnnnnnnnnnnnnnnnnnnnnnnnnnnnnnnnnnnnnnnnnnnnnnnnnnnnnnnnnnnnnnnnnnnnnnnnnnnnnnnnntggnngnnnnnnnnnnnnnnnnnaaaaaaatttctaacaaactcttccttggggcgcgcgcgccgccccccaag

SEQ ID NO: 69530 - DNA, 1097 bp, Homo Sapiens
aaggtagcgaggcctgggtggcgaattcggcacgaggctcccagagcggcagccttttcccgcgcgtgctgccttcgccgctcgggccgcccgggggaaaacatggcgtctgccctggagcagttcgtgaacagtgtccgacagctctcagctcaagggcaaatgacacagctttgtgaactgatcaacaagagtggggaactccttgcgaagaacttatcccatctggacactgtgctcggggctctggatgtacaagaacactccttgggcgtccttgctgttttgtttgtgaagttttctatgcccagtgttcctgacttcgaaacgctattctcacaggttcagctcttcatcagcacttgtaatggggagcacattcgatatgcaacagacacttttgctgggctttgccatcagctaacaaatgcacttgtggaaagaaaacagcccctgcgaggaattggcatccttaagcaagccatagacaagatgcagatgaatacaaaccagctgacctcaatacatgctgatctctgccagctttgtttgctagcaaaatgctttaagcctgcccttccatatcttgacgtggatatgatggatatctgtaaagagaatggagcctatgatgcaaaacactttttatgttactattattatgggagggatgatctatactggggctgaagaactttgaaagagctctctacttttatgaacagggctataactactcctgccatggccggtcagtcatatcatgttggaatcatataaaaagtatatttttaagggcctttgatattaccttgggcaaagtacaacaagctacccaaaatataacatcctccaaattgtgggggaaaatttctttaaagccttcttagccaatggcatacccccgaaagttaacccccaagggggattttcaaaccaaacaaaccccctctagaaacctccgaaaaacctggttggaataacgcccaggggggaaaaccttttccttcgcggataaaaaaacattggggcttggttggaaaacacaggccttggccaacccccctttttaaagaaaaaatatttcccgaaggggt

SEQ ID NO: 69531 - DNA, 1317 bp, Homo Sapiens
  misc_feature (912)..(933): n is a, c, g, or t
  misc_feature (953)..(1134): n is a, c, g, or t
  misc_feature (1268)..(1268): n is a, c, g, or t
gaccacgtggtctcagatttctcagagcatggaagtttaaaatatcttcatgagaacctccctattcctcagagaaacaccagctgaaaagagccaggaaaacccgggaattttccaaaaggtcttcacgttaaacttgtcttatctcaggagagagcccgctcttgtctcccagttcctggtacggtctgcctgttggaaagtgtacctggatgcttctgggctccgtttggcaatagcagtcttggctgatgtgcacagtctggctcccagctcaccctttttttgtaaagtaagaaaatagttgctaccgatagggactttgccaagtccaattatcttctaggattgaaaggtgcattttccccataaaaaaggcgaggaaaacccatggctgctttgtgtcacctcagtgacttacagtcccccttggcatttagttggtactagagccagtcatccttaacaaatcttttcacattttatttctttcacatgcagtcatcttcaaaaaggaaagatttggaattttagaaaaggggcaactcttctttttagcattctcatcagaaagtcacaaaaatcgatggaatcatttccactgggaagattgaccttttgtatttatttgtggggtaaattaataagcattccagatgcttgcagcttcctgcatccaggagatgctgtgttccccgtgatgcagctggaacccaagctgcagcaggagatgcaagtttcaggatgttccccactgagctggaggaatatctacagcagtgatgtttgaaatttttgtatgaattattttgtcgtcctacccttttcctccaaaacaaaaattagaggattattttaatactttggattcttcccccttttttgagaaataaagttttttatgaaaagaannnnnnnnnnnnnnnnnnnnnnaacctcgtgccgaattcttnnnnnnnnnnnnnnnnnnnnnnnnnnnnnnnnnnnnnnnnnnnnnnnnnnnnnnnnnnnnnnnnnnnnnnnnnnnnnnnnnnnnnnnnnnnnnnnnnnnnnnnnnnnnnnnnnnnnnnnnnnnnnnnnnnnnnnnnnnnnnnnnnnnnnnnnnnnnnnnnnnnnnnnnnnnnnnnnnnnnnngctttcagtcgggaaactgtcgtgcagctgcattatgaatcggcaacgcgcgggaaaggggttgccgtatggcgctctcgcttctcgctcatgatcgctggctcgtcttcgctgggggagcgtacactcatcanaggcgtataggtatcacagacagggaacgcagaaaacaggacaaagcaa

SEQ ID NO: 69532 - DNA, 1618 bp, Homo Sapiens
  misc_feature (730)..(745): n is a, c, g, or t
  misc_feature (908)..(916): n is a, c, g, or t
  misc_feature (945)..(945): n is a, c, g, or t
  misc_feature (1051)..(1060): n is a, c, g, or t
  misc_feature (1258)..(1258): n is a, c, g, or t
  misc_feature (1483)..(1483): n is a, c, g, or t
cttagagtatttctgatacaaaatgagggcctctgctcttgatttaattataaaatgtctacgtctttctccagtttttgagccctatgcacattggcttgtgggcttgttcttcctgccaaatgatcagagaggaacattccatttatttgtagtggatttcctctggagggcatgtacccacactaaataccaactgctcttcctcagctgtagtccccaacatcagacttggcacgtggtggacactaacacacaggcactcaatgaatgagtgaaggaaataaaagtcaccccgttggtgagaggtgctatccctgagtctcagtgcaggaccagtggatgaaaggcaaggtaaagaggcccaagataggctggcttcccccgttcaaggtatagtctgcctttaagggagttttagaaccaacatgcaagacattgaaagaaatcttgcaagagccattattgacttagatccaaaacagcctctctcatgtctaaaaaggcacagaattttgcagatctgaggaagagggatgcattacctttttgcttcttttcaattgcttagtgtttctaatcatacttaatccacactaatgtgcgcaattataataaatggtaagatatccccaggccaacgacatcgtggccaatttggcccccctaatctaacccccccatacgggacctcattccccatatctccggcaatcgttcctgggttggnnnnnnnnnnnnnnnntcacaaagaggtttttccaaaaccctctcctgttgtgggccgcccgtgcccccccttcacgggggaacgcggccaattcggcccgccgttatccgtgttcctttcgaaaagaacagcccgcgccgccaattacaacaaagggggcggtggggggtttctcttnnnnnnnnnaacaaaaaaaacgtacccgcgcgcggggngggaaaaaccatagtgagctgtttctctttgtaccacaaacactctcctcaccatatgggggcgggtctctcctccccgaggcggcgcgctgtatatacgctgttnnnnnnnnnntcgctctcttctctaccacagccgagggagaagtgaggctctctcctgatacgcgacgagacgcccgcgctcctagcctcgctctcaacaaccgcgtttctcgcgccgccgtttgcccgcgcacccgactattgtgcggttaacgcccccacacactctcacggcagaaataagacacacccgcgcgccgtgtgcttnttacgcgctctccccccccatatatataacagcgcgcctacttttgctttcgccgaacaaaaccgcaggggcgcgtgtgtatcgcccccgctccgctccaccatagccaatgttaggcagcgcgggcgggaggtcgcgaatatcctcctcgttgatatatatgtcggccggtacatacaggcgtgttttgagtatgagacacacgacctgtcgtgggcctcgcgnaaatttctcgtgtgcccgcggacataacaaataatatatatttctgtgttcgccccaccccgcgcgcgcgacgcaatcgagggcgtcgggtgttttcgacccaccacaagcatgtgcgctctctcccgcccatct

SEQ ID NO: 69533 - DNA, 2862 bp, Homo Sapiens
  misc_feature (2568)..(2568): n is a, c, g, or t
  misc_feature (2581)..(2790): n is a, c, g, or t
ggaattgcatttccactactttgcactcattttatgagttgcacgcatgaactatgtccagaagagcgacatcatattggagatcgcagtctttccttatgtaatatgttcctagatgaaatggccaaacaagctcgaaatctcatcactgatattggcacagaacagtgtacccttagtgaccagtggctacccaagcattgtgccaaaactatcagtcaagcagtgaataagaaatcaaaaaagcagactggtaagaaaggggaacctgaaagggagaaaccaggtgttgagagcatgaggaaaaacaggctggttgtgaccaaccttgataaattgcacactgcactttctgagttatgcttctctataaattatgtaccaaacatggtggtatgggaacatacctttaccccacgagaatatttgacttctcatctggaaatacgctttaccaagtcaattgtggggatgactatgtataatcaagccacacaggaaattgcaaaaccttcagaacttctaacaagtgtaagagcatacatgaccgtactccagtcaatagaaaactatgtgcagattgatattacaagagtatttaataatgtgcttcttcaacaaacacaacatttagacagtcatggagagccaaccattacaagtctatacacaaattggtatttggaaactttgttacgacaagtcagcaatggccatatagcatattttcctgcaatgaaagcgtttgtgaacttacctacagaaaatgaattaacattcaatgcagaggaatattctgacatatcagaaatgaggtcattatcagaactactaggcccatatggtatgaagtttctaagtgaaagcctcatgtggcatatttcatcacaagttgctgaacttaagaaacttgtggtggagaatgttgatgtgttaacacaaatgaggaccagctttgacaaaccagaccagatggctgcactgtttaaaagattatcatctgttgacagtgtcttgaagaggatgacaataattggtgtaattttatccttccgatcattggcacaagaagcacttagagatgtgttatcctaccacattccttttcttgtaagttcaattgaagattttaaggatcacattccaagggaaactgatatgaaggttgcaatgaatgtgtatgagttatcatcagctgccggattaccttgtgagattgatcctgcattggtcgtagctctttcttcacaaaaatcggaaaacattagtccagaagaagagtataaaattgcctgccttctcatggtgtttgtggcagtttctttgccaacactggccagtaatgtgatgtctcagtacagccctgctatagaagggcattgcaacaacatacattgcttggccaaagccatcaaccagattgctgcagctttgtttacaattcacaaaggaagcattgaagaccgtcttaaagaatttctggcgcttgcatcctccagtctactgaaaattggccaggagacagataaaactacaacaagaaatagagaatctgtttatttactgctagatatgattgtacaagaatctccattccttacaatggatcttttggaatcttgttttccttatgtcttgctgagaaatgcataccatgctgtctacaaacaaagtgttacatcttctgcataaaattacctacttaatcaagataagcacgcatttttgttgccttggttttacctgtagactgtggaactattttaccttaagacctgaaaaagttttgtggattataaatttctttcatacggttgtattttctgatcattggtttcttaatatggttgtactacagtatacttggttgatttaggttgcacattcactgaattcactgagattattcctataattttaaagtatcatttatttgaaaaacatacattatcaacatgtttttgatatttgataatgaaaaaaatctttgcttgtttatttctgaaaaagaactgtatttagtgattattttagatagtgatattatagcattcatctgtgtgtaaattatttcatatagggaagagttctgatctgtacctatggttcttattgaaaacaacattggatgtgcatttctgtgatgttatgaatacatttctactttattttgaaacatttgccaaactaaatactgtaacactgtataacatttaaaaatgttaaagaactgcttagtattagaagcagatcatttcccaaaattctaagagcagcagcatatgttgttgcttgtataaagcctagcgataatttttagactaacttccatggtgccctgttggcattagcactaccattgtaccctgctgtataataaacaatcttagacatttatcaactgttgatacaaatgttagtccctaaccactttttatatatgttttaaatttttgaaattcaagtgtaccttccataacataaaataaacactagactgtatcacacttcgattgatttctttaagatccttggatattcgttcaataataataaagttcctcgtgnccgaatcttgggnnnnnnnnnnnnnnnnnnnnnnnnnnnnnnnnnnnnnnnnnnnnnnnnnnnnnnnnnnnnnnnnnnnnnnnnnnnnnnnnnnnnnnnnnnnnnnnnnnnnnnnnnnnnnnnnnnnnnnnnnnnnnnnnnnnnnnnnnnnnnnnnnnnnnnnnnnnnnnnnnnnnnnnnnnnnnnnnnnnnnnnnnnnnnnnnnnnnnnnnnnnnnnnnnncattatgaatcggcaccgcggggaaagcggttgcgtatggcgctctccgctctcgctcatgatcgctggctg

SEQ ID NO: 69534 - DNA, 420 bp, Homo Sapiens
gtgacctttttgccagcacatagctgatttgactgctttgtggagtacaccaagcaggttgtcaaactggtggtccctttactgaaattttatttccacaatggtgttggaggggcagcagcagaatccgtgccttttcttctggagtgtgtgagagtccgtggtcctgagtatctcacacagatgtggcaatttatgtgatgttctgattaagaccattggtacagaaacagtttcagatgtcctcagaaataatgcattgtttagcaaagtgcattgaagttatgggagatggatgccttaataatgaacactttgaagaacacctttgccacatgtcctcaggaccttctgagggctgtgtcatggggcatggtcactcatatttgactcaataaatttcttcaaatattttaaaaa

SEQ ID NO: 69535 - DNA, 4224 bp, Homo Sapiens
ggggcctagcgcaatggcggcggccgcggcggagcagcaacagttctacctgctcctgggaaacctgctcagccccgacaatgtggtccggaaacaggcagaggaaacctatgagaatatcccaggccagtcaaagatcacattcctcttacaagccatcagaaatacaacagctgctgaagaggctagacaaatggccgccgttctcctaagacgtctcttgtcctctgcatttgatgaagtctatccagcacttccctctgatgttcagactgccatcaagagtgagctactcatgattattcagatggaaacacaatctagcatgaggaaaaaagtttgtgatattgcggcagaactggccaggaatttaatagatgaggatggcaataaccagtggcccgaaggtttgaagttcctttttgattcagtcagctctcaaaatgtgggactgcgggaagctgcccttcacattttctggaactttcctggaatttttgggaaccagcaacaacactatttagatgtcatcaaacgaatgttagttcagtgtatgcaagatcaggaacacccgtcgatcaggacgttatctgctagagctacagctgcatttatacttgcaaatgagcataatgttgctctgttcaaacattttgcagacttgctaccgggattcctacaggcggtaaatgactcgtgctaccagaatgatgattctgtcctaaaatccctcgttgagattgcagatactgttccaaagtatttgcgtcctcacttggaagcaactctacagctaagtctaaagttgtgtggagacactagcctcaacaatatgcaacgccagcttgcccttgaagtgatcgtcaccctctctgagactgcagctgctatgttaagaaaacataccaatattgttgcacagactattcctcagatgttagcaatgatggttgatttggaagaagatgaggactgggcaaatgcagatgaactagaagatgatgattttgacagcaatgcagttgcaggcgagagtgctctagatcgaatggcttgcggacttggtggaaagctcgttctgccgatgatcaaggaacacattatgcaaatgcttcaaaatcctgactggaaataccggcatgcaggattgatggccttatctgccattggtgaagggtgccaccagcaaatggaaggaattctaaatgagatcgtaaattttgttttactttttctccaggatcctcatccaagagtaaggtatgcagcctgtaatgccgtgggacagatggctacagattttgcacctggtttccaaaagaaatttcatgagaaggtgattgcagctctgctgcagaccatggaagaccaaggcaatcaacgtgtgcaggcccatgcagctgctgccctcattaactttactgaagactgtcccaagtcactacttattccatacttggataatttggtgaaacatctgcattccattatggtactgaagctttcaagagctgattcagaaaggcaccaagttagttttggaacaagttgtgacatccattgcatcagttgccgatactgcagaagaaaaatttgtcccctactatgatttatttatgccatcactgaagcacatcgttgagaatgcggttcaaaaagaactgagacttctgagaggaaaaactattgaatgcattagcctcattggtctggctgttgggaaggaaaaattcatgcaggatgcatcagatgtgatgcagcttttgttaaagacccagacagacttcaatgatatggaagatgatgatcctcagatctcttacatgatctcagcatgggccagaatgtgcaaaatccttggaaaagaatttcagcaataccttccagtggttatggggcctttaatgaagacggctttcaattaaccccgaagtagcccttttagatacccaagacatggagaatatgagtgatgatgatggttgggaatttgtgaaccttggagatcagcaaagctttggtattaaaactgcaggactagaagaaaaatcaactgcttgccagatgttgggtttgctatgctaaggagttaaaggaaggctttgtgggagtacaccgaacagggttgtcaaactgatggtccctttactgaaattttatttccacgatggtgttcgagtggcagcagcggaatccatgcctcttctcctggagtgtgcaagagtccgtggtcctgagtatctcacacagatgtggcattttatgtgtgatgctctaattaaggccattggtacagaaccagattcagacgtcctctcagaaataatgcattcttttgcaaagtgcattgaagtaatgggagatggatgccttaataatgaacactttgaagaactgggaggtatattgaaagcaaagcttgaagaacattttaaaaatcaagaattacgacaagttaaaagacaagatgaagactatgatgaacaggtcgaagagtcactacaagatgaggatgataatgatgtttatattctgaccaaagtgtcagatattttacactcaatattcagtagctacaaagaaaaggtgttaccatggtttgaacagctgcttccattaattgtcaacctcatttgtccacatagaccatggccagacagacaatggggattatgcatctttgatgatgtcatagaacactgtagtccagcctcatttaaatacgcagaatatttcttaagaccaatgctccaatatgtatgtgacaacagcccagaagtcaggcaagcagctgcatatggcctgggagtcatggcacagtacggtggagataattatcgccctttttgtacagaagcacttcccctgctggtaagagttattcagtctgcggattctaagaccaaagaaaatgtcaatgctacagagaactgcatctcagcagtagggaaaatcatgaagttcaagcctgactgtgtaaacgttgaagaggtccttccacactggttgtcttggcttccactacatgaagataaagaagaagctgttcagactttcaattatctgtgtgacctgattgaaagtaatcatccaattgttcttggcccaaacaataccaatctgcccaaaatatttagtataattgcggaaggagaaatgcacgaggcaattaaacatgaagatccttgtgccaaacgtctggccaatgtcgttcgccaagtacagacttctggaggactgtggactgagtgcatagcacagctcagtcctgagcagcaggccgccattcaggagctcctgaactctgcgtgaagggccttaatgtcacccaccagaaaactaactccaaataaacgcttaccctttcctttaggtttctttgttttgtttttgagcaaaagagatcggtagtgttgtgtgtaggccattcttctggagagccacaagcaggaagagcagcgctgtgttgcagaatggagtttccatggatttctaccagaccactgaaggagttcctggaagccctgcggtagctagcactgaagactatttttctattggtataacccgcccacctgaaggggaaagggaaatcaaattaatttttctcgttagacataaggaaatttaaggaaaaacagctttaagaacagttactcagcgtagatgtgtgttcacacaaattgctctgcattcagtgttcattgtgaattgggagtgtgagtctttctgtagggtagaaagaagcctcctacccagcaaaccagtagacccaaaagttgaaaaaaactgatgacagacaacaagcatgaagatggcatatttgatgtcactttggttctttttcccagaaggcttatacagtgactcagtcgggaagctttccagcttccagcccttgaatgtgaagtgtcattggcatgtctggcagtagtctctcattcactcctcaataaacaacattgaatacaaaagaggcttgtgtaaaaactcagtactgtctgggcttggattcatttcatgtttttaatataagaatgatctaatatttttttaaagtaatagctaatcagtaaatagctgagtgtttttccccttaatattttcccttgtgccaattcagacttaagccatcgagttttttaacatcttccaactttaaagctaagttatgatacctattccattcacaatggggtcctttaaaggttgcaatttcagcaa

SEQ ID NO: 69536 - DNA, 1414 bp, Homo Sapiens
  misc_feature (420)..(436): n is a, c, g, or t
  misc_feature (1281)..(1304): n is a, c, g, or t
gcggccgcctgccccgcccctgcccccgccccctgtcctgagcaccgttgctaacccccagtcctgtcacagtgaccgtgtctaccagggctgcctgacgcccgcccgcctggagccgcagcccacggaggtcggagcctgcccacccgccttgtcctccaggatcggagtcaccctgaggaagccccgcggcgacgcgaagaagtgccggaaggtgtatggcatggagcgccgggacctctggtgcacagcctgccgctggaagaaagcctgccagcggttcctggactaagtccggctcgttcaagaacataagctaccaccttctccctccccaccccctccaggcccggggctgaaacagcccgaggacagccccaggggctggccttcaccagctgcagggtctgcttttacttnnnnnnnnnnnnnnnnnctgaccctgaaccctcccccccgccaggtcggggaggggtcccaccactcaaagtgcctctaaagaaaccagctttttgcactaaagccaaaccacaccgctgtccccttagccccaagggccctgggggcagccaccctcccgcctgtcggcccgtagatttatcaagggtgttatgggcccagctttggggggccagtcccgatgcactttgaggggtgttggagaggggactcccccactcgcacttaactcaacggctctcgggccctggggctgtttttaccatgtttgtttttgaagctcaggtgtctcacgtctgggctgcaccaggcgaagagagaaattaaagatttgaggtttttccagaagctttgtctgcctctcgggaggaaggccgtggggctgggaccctgtggtgggcaagtgggtggagtctggcagctgcccacagagggccgagggtcacccgtcggccgccgccaccccaggcgaggccggaggaaggatcatctgagacgcaggaggatctgctggagcagcaatttcccaatttattgaaagtgatcgctttgcaaggatgtctaagctaatcccgtcacagaaaggaaacgcacaggcgcctaggcagaaacttggagactcaccgcagaggccacgtgaacccacggccacagagaggcaggacggcagagccatgatttcccaccgagcgattacgagaacctcttcccccaatagtagacacatctccaatacaaacacaggtttataataagtaataggaagtcaatataatatagattatccccagaaaaaaatcaacaatcttcaaacactgcccnnnnnnnnnnnnnnnnnnnnnnnntgacaggttgaaagcatgttgaaaaaaataaatatttaagaaaagcacacacagcaccctcactacaagtagttctaaaagggctgcatacaaaacacaatataagatct

SEQ ID NO: 69537 - DNA, 403 bp, Homo Sapiens
ccgggcctggagggggtggggagggagaaggtatatcattatgttcttgaacgagccagacttagtccaggaaccgctgggagtattttttccagcggcagtcagtacaccagaggtcccggcgctccatgacatacactttccggcacttccttgcgtcgccgcggggcttcctcagggtgactccgatcctggaggacaaggcgggtgggcaggctccgacctccgtgggctgcggctccaggcgggcgggcgtcaggcagccctacagggagacacagccagggcttcactccactccagagagccctgagacccgccccagctaccacccgtggcctcacccacctggtagacacggtcactgtgacaggactgggagttagcaacggtgctcaggaca

SEQ ID NO: 69538 - DNA, 662 bp, Homo Sapiens
gttgttgttgttgttgaatcagattagagttgctcctctattgcttgtcaattcagctgttataagcatttttatagaagggacagagaacaagtgaatgggttagaaatccaggaaaatggttgtaaaagaggctgaaaggcaggtcagaacacaatttgcttggtattaggtggttagtaatggggagcatatgtataatcttagcctttgtgttttatactttccacttgctgtcaatagctagtactgctacatccatagataaatgcatggcaaatacttctctctcatatgaaatgctgtcaagaagtttgccaggatccttctttaaaaattcccaggtaatcatacagtttaaaaagtccttctggtaccttgcccagtgttactcaacctggaattagataggtatttacccactcccctttcccccaccttgcacgtgctgcctttccaactcccaccgtttgtgattcattgccatcgtaaaccactgcttctaatgggaaacatgttgtctcctttggattgtagcagaaaaattattgagaacctcttatctagcctactttctaaccttcaaactcatttctactgataattaagccagtatccctgcttacttgctttatttatttaataaaaggtatcttttgcct

SEQ ID NO: 69539 - DNA, 1520 bp, Homo Sapiens
cagtcgacggtaccggacatatgcccgggaattcggccattacggccggggggtttgaccgggtcgtggcagccggagtcgtcttcgggacgcgcctgctcttcgcctttcgctgcagtccgtcgatttctttctccaggaagaaaaatggcatccgttgcagttgatccacaaccgagtgtggtgactcgggtggtcaacctgcccttggtgagctccacgtatgacctcatgtcctcagcctatctcagtacaaaggaccagtatccctacctgaagtctgtgtgtgagatggcagagaacggtgtgaagaccatcacctccgtggccatgaccagtgctctgcccatcatccagaagctagagccgcaaattgcagttgccaatacctatgcctgtaaggggctagacaggattgaggagagactgcctattctgaatcagccatcaactcagattgttgccaatgccaaaggcgctgtgactggggcaaaagatgctgtgacgactactgtgactggggccaaggattctgtggccagcacgatcacaggggtgatggacaagaccaaaggggcagtgactggcagtgtggagaagaccaagtctgtggtcagtggcagcattaacacagtcttggggagtcggatgatgcagctcgtgagcagtggcgtagaaaatgcactcaccaaatcagagctgttggtagaacagtacctccctctcactgaggaagaactagaaaaagaagcaaaaaaagttgaaggatttgatctggttcagaagccaagttattatgttagactgggatccctgtctaccaagcttcactcccgtgcctaccagcaggctctcagcagggttaaagaaagctaagcaaaaaagccaacagaccatttctcagctccattctactgttcacctgattgaatttgccaggaagaatgtgtatagtgccaatcagaaaattcaggatgctcaggataagctctacctctcatgggtagagtggaaaaggagcattggatatgatgatactgatgagtcccactgtgctgagcacattgagtcacgtactcttgcaattgcccgcaacctgactcagcagctccagaccacgtgccacaccctcctgtccaacatccaaggtgtaccacagaacatccaagatcaagccaagcacatgggggtgatggcaggcgacatctactcagtgttccgcaatgctgcctcctttaaagaagtgtctgacagcctcctcacttctagcaaggggcagctgcaggaaaatgaaggaatctttagatgacgtgatggattatcttgttaacaacacgcccctcaactggctggtgtttgatttcaccaccatagacttgacatctgagactgatgaaattccagatattatagctttggaagaggagaacggatcaaataattcacatgctaatggccctgtcctctcagggcaagatgttgaataactaacaacaataaaataccccttttggttgaat

SEQ ID NO: 69540 - DNA, 987 bp, Homo Sapiens
ccgaaaattcagatgtccagataagtctacctccatgggtagagtggaaaacggccatggatatgttgatactgatgagtcccactgtgctgagcacattgggtcagtactcttgccaatgccgccaacttgactcagcagctccagacccacgtgccacaccctcctgtccaacatcccaagtgtcccacagaacacccaagatcaagccaagcacatgggggtgatgccaggcgacatctactcaagtgttccgcaatgctgcctcctttaaagaagtgtctgacagcctcctcacttctagcaaggggcagctgcagaaaatgaaggaatctttagatgacgtgatggattatcttgttaacaacacgcccctcaactggctggtaggtcccttttatcctcagctgactgagtctcagaatgctcaggaccaaggtgcagagatggacaagagcagccaggagacccagcgatctgagcataaaactcattaaacctgcccctatcactagtgcatgctgtggccagacagatgacaccttttgttatgttgaaattaacttgctaggcaaccctaaattgggaagcaagtagctagtataaaggccctcaattgtagttgtttccagctgaattaagagctttaaagtttctggcattagcagatgatttctgttcacctggtaagaaaagaatgataggcttgtcagagcctatagccagaactcagaaaaaattcaaatgcacttatgttctcattctatggccattgtgttgcctctgttactgtttgtattgaataaaaacatcttcatgtgggctggggtagaaactggtgtctgctctggtgtgatctgaaaaggcgtcttcactgctttatctcatgatgcttgcttgtaaaacttgattttagtttttcatttctcaaataggaatactacctttgaattcaataaaattcactgcaggatagaccagttaaaa

SEQ ID NO: 69541 - DNA, 513 bp, Homo Sapiens
agcagatttttaaaatgttagcagaggtactaggaggaatcaattgtgtaaaagcctcggttcttacgccttattaccacaaagtagattttgagtgtatcttggataaaagaaaaaaacctcttccgtatggaagccataatataacattgggacaactaccagaaatgccctgggaatcaaatatcgaaatagttggatcaaggctgccaccaggggctgaaaggattgctttggaatttttggattcaaaagcactttgtagaaatatccctcacatgaaaggaaaatctgctatgaaaaaacgacatttggaaattctggggtatcgtgtaattcagatttcccagtttgaatggaactctatggcactgtcaacaaaggatgctcggatggactacctgagagaatgtatatttggagaagtcaagtcatgtttgtagtttttatttaaaatgaatgttatcgtgtgttacatttggacctattttaataaagtggcctgtttcactt

SEQ ID NO: 69542 - DNA, 1578 bp, Homo Sapiens
  misc_feature (93)..(102): n is a, c, g, or t
cggtccggaattcccgggatatcgtcgacccacgcgtccgaatagggcacttttcagacccattttttaaagtgctagaaaatgctttttttnnnnnnnnnntacaagttttaaaatgaccacttactctttaattatttactaattgctagtgtactcagtgtggaaaagactacagattacacactcttttcattcacacttgtacatatagacagcaatgttattaggagcattaaattaaaaaactgaacagcctaatttaaatgtggcttgggcctggtagaagtttgaccaaatggaatggaggctgtgagcaatgtgaggattctatttatttatttacgtttgataaaacttactggaactagtactaccatgcgtattccctgtccaaagcatcactgctttggtatagtataagttcatgaaattctggtgggtagaaagaaatttttatttctatcagcagtactaaaatgtatcagccaaccagagaacatcagtgactttaacttctgcagagtttgccccagaattcagagttctatttagaggaagttaaaacaacaacaaaaaacaaccatttgaaaaatttttgtcaccagcaaaacttttcactaattagtgatatgaaatgtgatttttgtgttgttaaacttcagctttggaaaactcagtctctttcattatcatccattccaatttgaaggagttgggcagctaatttggttaaaggcagtcttgagggttagaagtattacttccttttcggggtccagacctagcttgtgactgaaagttttagaaaaaggaagtacatctatagccgaaattgataaggttattactgtggttttgcacaaagtatattagcaaaagtatttgctggaattattggtagatggcagtcccactcctacacctgctttgtcagatacagctgggttcactggctgactctgtaccgtacttacactacttacttaatagaaacacaaacttggaaattgtgccagtggtccagctggagcacaacgtatggtgaatatgctgtttcctcagttcagagaggtagcaactaggtaaactccttataaaaagcaaatacctggatttacaaaagtgaaagtagttgttcacaaaagaattcgccatggaattctttcagttaccaagctctcctggtaatgtttgtggttatatcatttacacaaaacttttcaggaacttctgtgttgtttaagcaagatgtatctgtactgatgtctcagtgaatcagtctgtttattaagcacttatcagggcttccacacacttatttattttgccctagttaatcctgttgtttgctgccattggcatgaaatggccaactgtggctgttacagttctttcattcaattataacttgtaaaccagtgactcctaatctttttcaagttaagacaccttaccattgcttatttggttttatgagacttgttcctttttttctccctaaggaaaaagaaagctttatgacatatttatttttttaataaaactaagcaaaaataaaacttatggtaattcttt

SEQ ID NO: 69543 - DNA, 811 bp, Homo Sapiens
gggtcctccaagatggcggcgcagaggaggagcttgctgcagagtatctgtgactttggcctggcccgtgttgcagatccagaccatgatcacacagggttcctgacagaatatgtggccacacgttggtacagggctccagaaattatgttgaattccaagggctacaccaagtccattgatatttggtctgtaggctgcattctggcagaaatgctttctaacaggcccatctttccagggaagcattatcttgaccagctgaaccacattttgggtattcttggatccccatcacaagaagacctgaattgtataataaatttaaaagctaggaactatttgctttctcttccacacaaaaataaagtgccatggaacaggctggtcccaaatgctgactccaaagctctggacttattggacaaaatgttgacattcaacccacacaagaggattgaagtagaacaggctctggcccacccatatctggagcagtattacgacccgagtgacaagcccatcgccgaagcaccattcaagttcgacatggaattggatgacttgcctaaggaaaagctcaaagaactaatttttgaagagactgctagattccagccaggatacagatcttaaatttgtcaggtacctggagtttaatacagtgagctctagcaagggaggcgctgccttttgtttctagaatattatgttcctcaaggtccattattttgtattcttttccaagctccttattggaaggtatttttttaaatttagaattaaaaattatttagaaagttacataaaa

SEQ ID NO: 69544 - DNA, 2066 bp, Homo Sapiens
  misc_feature (1165)..(1165): n is a, c, g, or t
caggctggtacgcgtcggagttcccgggatatcgtcgaccacggcgtcgattcttggatccccatcacaagaagacctgaattgtataataaatttaaaagctaggaactattgctttctcttccacacaaaaataaggtgccatggaacaggctgttcccaaatgctgactccaaagctctggacttatggacaaaatgttgacattcaacccacacaagaggattgaagtagaacaggctctggcccacccatatctggagcagtattacgacccgagtgacgagcccatcgccgaagcaccattcaagttcgacatggaattggatgacttgcctaaggaaaagctcaaagaactaatttttgaagagactgctagattccagccaggatacagatcttaaattgtcaggacaagggctcagaggactggacgtgctcagacatcggtgttcttcttcccagttcttgacccctggtcctgtctccagcccgtcttggcttatccactttgactcctttgagccgtttggaggggcggtttctggtagttgtggcttttatgctttcaaagaatttcttcagtccagagaattcctcctggcagccctgtgtgtgtcacccattggtgacctgcggcagtatgtacttcagtgcacctactgcttactgttgctttagtcactaattgctttctggtttgaaagatgcagtggttcctccctctcctgaatccttttctacatgatgccctgctgaccatgcagccgcaccagagagagattcttccccaattggctctagtcactggcatctcactttatgatagggaaggctactacctagggcactttaagtcagtgacagccccttatttgcacttcaccttttgaccataactgtttccccagagcaggagcttgtggaaataccttggctgatgttgcagcctgcagcaagtgcttccgtctccggaatccttggggagcacttgtccacgtcttttctcatatcatggtagtcactaacatatataaggtatgtgctattggcccagcttttagaaaatgcagtcatttttctaaataaaaaggaagtactgcacccagcagtgtcactctgtagttactgtggtcacttgtaccatatagaggtgtaacacttngtcaagaagcgttatgtgcagtacttaatgtttgtaagacttacaaaaaaagatttaaagtggcagcttcactcgacattttggtgagagaagtacaaaaggttgcagtgctgagctgtgggcggtttctggggatgtcccagggtggaactccacatgctggtgcatatacgcccttgagctacttcaaatgtgggtgtttcagtaaccacgttccatgcctgaggatttagcagagaggaacactgcgtctttaaatgagaaagtatacaattctttttccttctacagcatgtcagcatctcaagttcatttttcaacctacagtataacaatttgtaataaagcctccaggagctcatgacgtgaagcactgttctgtcctcaagtactcaaatatttctgatactgctgagtcagactgtcagaaaaagctagcactaactcgtgtttggagctctatccatattttactgatctctttaagtatttgttcctgccactgtgtactgtggagttgactcggtgttctgtcccagtgcggtgcctcctcttgacttccccactgctctctgtggtgagaaatttgccttgttcaataattactgtaccctcgcatgactgttacagctttctgtgcagagatgactgtccaagtgccacatgcctacgattgaaatgaaaactctattgttacctctgagttgtgttccacggaaaatgctatccagcagatcatttaggaaaaataattctatttttagcttttcatttctcagctgtccttttttcttgtttgatttttgacagcaatggagaatgggttatataaagactgcctgctaatatgaacagaaatgcatttgtaattcatgaaaataaatgtacatcttctatcttc

SEQ ID NO: 69545 - DNA, 1156 bp, Homo Sapiens
  misc_feature (78)..(112): n is a, c, g, or t
ttgcaactacatcatataggggtcgcgctagtagccgaacgaccgagcgcagcgaagtagtgagcgaggaagcggcgnnnnnnnnnnnnnnnnnnnnnnnnnnnnnnnnnnncagtcgacggtaccggacatatgcccgggaattcggccattacggccgggggctgcgctgcagatggcggaaatggatccggtagccgagttcccccagcctcccggtgctgcgcgctgggctgaggcccttctgcgatgttttacctggctgcggctgtgtcagatttctatgttcctgtctctgaaatgcctgaacacaagatccagtcatctgggggcccactgcagataacaatgaagatggtgccaaaactgctttctcctttggttaaagattgggctcccaaagcatttataatttcctttaagttggagactgaccccgccattgtaattaatcgagctcggaaggctttggaaatttatcagcatcaagtggtggtggctaatatccttgagtcacgacagtcctttgtgtttattgtaaccaaagactcggaaaccaagttattgctatcagaggaagaaatagaaaaaggcgtagagatagaagagaagatagtggataatcttcagtctcgacacacagcttttataggtgacagaaactgaagtaaaaagcccttataggatcaaaaattgttcagggctcttagagatggtgaaaactacaaaaaaaaccatggctttcatatggacagataaaatgaaagaaagggaaaaggcagtggtgtgtaggcaaatatggtttggcatttgtcttttaatgacacctgatatgatgtcattttgattttgaaattgaacactagaactgttaatcacctttaaaaagaagagcttattgggaattatatattccttaaaatatacatgggggcctgaatgtcagccatctttatactatagaaaaaggattatggatgcatgaatggtcatgctttggagatcaaatattggttgaatgcctatgtatgtcaggccctgtgctgagccatgaggattaaaaagatgaataaacatatcttgtttaggaaatggatgtataaaaaaatcaagtgcaataaagtgtgtgtccaaaagctgacacaatggaaaaaaa

SEQ ID NO: 69546 - DNA, 1082 bp, Homo Sapiens
aaagccaagcccaaccctatttgcctaccccccccggccttttcccttttttcatttattctgtccaaaggaaacccaggtttttttggagtttcccccttctttagaaccccggacaatttttgatcctaaaagggtttttatttcagtttctgtcacctattaaaagctggtttcgagactgaagatattccactatcttctcttcaatctcaacgcctttttctatttcttcctcggaaagcaataactgggtttccgagtcttggttacaataaacacaaagggctgtcgtgactcaaggatattagccaccaccacttgatcgctgataaattgccaaagccttccgagctcgattaattacaatggcggggtcagtctccaacttaaaggaaattataaatgctttgggagcccaatctttaaccaaaggagaaagcagttttggcaccatcttcattgttatctgcagtgggcccccagatgactggatcttgtgttcaggcatttcagagacaggaacatagaaatctgacacagccgcagccagggtaaaacatcgcagaagggcctagcggattgagtgcctgggccgcagcctgcaacagatgcaaatagtccgccaaagtggtgaactctactgccaggaaggtgcctgcagccgcagcctcctggtagctcctcagagcctcagcaaaacccggaagtgcattctcctcggcctccaggctcagcaagcccgaaagggctgggcccgaaggccgcagagcggacagccaagtctggggtgggaagcggtgggcataggggaaggcagagcgagcgcgatacaagaacaggaccccgtagccggcggctaggaaggcctcggccgaggttgcaccgcgccgcccgctgctgaagttgtccaggaagcgcaccggccgcgcttccagtgggaccttggtgccgcctgacgtaaccaacaccacccgccggccctgcgcgcccagcctggccgcgaagcgagccataacctcagcccagcgcgcagcaccgggaggctgggggaactcggctaccagatccatttccgcccc

SEQ ID NO: 69547 - DNA, 1591 bp, Homo Sapiens
tttttttcctcaatagtaatccagctttaattgtagagcattaattcgccttacaaacaaattacagtcactacgatttatcagtaagtactgtactggttttgtgttttcttttggcaaactttgaacaaatcagagaagaaaacataactattcatcatcatgtagaaaaagaaaagaaaatgaacctcaagtatctacctatgtgtcaagtgattcatcctgccagtaaaactaaaatctacacttacagcggagttttaaacatccttagtgcaagaaacataaccaattaatacagatcaacactaattaatgaatatggaaaattttcctatacagaggtagaatccagggcacaggctaaaacagtattcagtagtctaaacaagacttgagtctggttttatggaatccactttaaattttaggtatcagactgtatgtacatacatacaataaatagactatacaatttttttaaagtagtttaataaactccacaaaataatagcagatgcattgaaatatttacataattcgattttcaaatctctcattcaaataaaagggataaaaataaaatttctgcctttacggcagcagaacctctttcctgaaatggattggtaaaataagatacttcactggagaggaactaatttatgtttaagaggtattcatattcagctaagaaaatacaaccctttttcagctatatagattagggaatataaaatgatattttctacattttttgacctgtattcaaagttctaaattcaactttgacttgaagagagaaggtgattttggtacccatacagagtagatcatcacaattacaatggaaagataattaacgttttatatgctgtttatttgcttttgaaagtttgggtcagaaaggctgtgataataattctggcccaaacaggtatgcttatacctgacacaaatttcactaaaacctaacacttttggcttggagttcttgggatttcgactttctgagtcccttccatttccaaagcatgtttcattgagagcaggcaatgtttggggatcaggtgtatgattcaagactaattaagatgccaaagttttccaagctcacatgggaagaaggtgaaacacagacctgctgctgccactggcctcccagagacttgaaaagggaaacaactcagaaacctgtcactgtgacctaagaaaatatgcaaaaacccaaagcattacatatgcaagtgactcacactcttagatttcatatcaaattcactatttgatattctatcatcaactttcattttacttgatataaaagattcttattgagtccataaggaaatcagggatcgtcagaaaatgaaaaagtatggtcataattaatgaagcataaaccttcacagtttgaattttgtagaacttctctaagcacccacaatgaaaatgcaagttgagttttttttaattcaatcattctgtgaaaaatacctcagtaaatagtaacatttttcccttcaatgatcttcccactgcccggccgtaatggccgaattcccgggcatatgtccggtaccgtcgactg

SEQ ID NO: 69548 - DNA, 651 bp, Homo Sapiens
cgtaaattctcactgttaagttgcattgagagacaattagaaatgttgtaattgtcatatctttacatgtggattatgaacaaatgaaagtttgctgtgtgattgcagttttaaattataacatttcataaatatgtcaattttagaaactcaaactctttcccatcttttgtatggataaagtttatggtttcatttctgagaatagagttggtctgctgtgctaacttcatgtttcttattccaaaggcttgattatatttttttctccagtgattaaaaatgcagcgaaaatccaatctacaagttcatatattggtatttctagacatagtctagttctaaaagaatgtacttggtgtgcatttttaagtgtttcatgtagacagattaatatatttttgtacaacattgtatttctacatttatttcaagactgtacttttcagtgactttttcaagtgcatgtgttaacagaagattgtttggaacgagagtgcagtggcttctttactagcaaagagaagtgtaatacaagtgatcatagaaggtgagaatgtgtttatactgtatatggaaacctaatgcctcttttctaaagctttgtacatttttttcgtgaaatagattaaatattttctctctaaaaaa

SEQ ID NO: 69549 - DNA, 836 bp, Homo Sapiens
aagttccacagatttttctgttgggcagccaaggattataaaccacttccctaaaggcaacattaatgcaaaagtccccagatggcaatacaaagtatcccctggtaccacatatattcatttgtgagtttggatatagagcacattatctaaaccattttgtagttccaaaaacccatctaaatttcttgagttcctgaattttgaacaggattacctggagcctggagccactttaagttgtacttctgactaaactggaattatgagtgaggaagagtgtttactaaataaatgactggggcaagcaaaattgaggaggaaattagaaactgtttgacaaactttaagagctacttgaaataacagaagtcttgattaatatgcaaataatggctagaaagtatggtttaactggaccctattatgccttttaaaaataatttcagtaacccataaatacatgttgtaaaaaattcaaatatacagaatggaataaaaaaatgatctccctttattaccctcccaaaggttaccagcgtttgaatttaataatgtatattctttcatgcttttttctgtgcacttacctaagtgtgaatatgtaaagggtttgttttgtatacaaatgggattatactaaaataagtaatgcctatttttaaggataggttaaatttgtgaatgatcatttcaaatatattgaataaaataagcaaaagctattgttatttactgatcctggattgtcttaaagaaagtacttgtgatataagagcacagttctacttactgctaatgacagaatatgtattaaacgtattttcatgtaaatg

SEQ ID NO: 69550 - DNA, 743 bp, Homo Sapiens
  misc_feature (56)..(74): n is a, c, g, or t
tgtgcatgtgagctgccgcccctgtgtcctcccgccctctctgggtggggtcgggnnnnnnnnnnnnnnnnnnnaccagtgtcgctggctgggagctcaaaatggtgtcagcttctcaggtgtcaccttggtgtcctcgtggccaactggctgcctgtggtttggcacacagtgcctgcgctggctcaacactgaagcccgagcttcctggggcggctctgtccccacgcctgcgccacagtgaggttgaacttgactgtcttttggtccccagagctagagccggtgcaggccacgcagaacaagacagggaagtatgtgccgccgagcctgcgcgacggggccagccgccgcggggagtccatgcagcccaaccgcagagccgacgacaacgccaccatccgtgtcaccaacttgtcagaggacacgcgtgagaccgacctgcaggagctcttccggcctttcggctccatctcccgcatctacctggctaaggacaagaccactggccaatccaagggcttcgccttcatcagcttccaccgccgcgaggatgctgcgcgtgccattgccggggtgtccggctttggctacgaccacctcatcctcaacgtcgagtgggccaagccgtccaccaactaagccagctgccaccgtgtactcggtccgggacccttggcgacagaagacagcctccgagagcgcgggctccaagggcaataaagcagctccactctctctaa

SEQ ID NO: 69551 - DNA, 923 bp, Homo Sapiens
  misc_feature (29)..(29): n is a, c, g, or t
  misc_feature (77)..(111): n is a, c, g, or t
aatgtatagatcactataggcgctattgncgcagcgaacgacgagcgcagcgatgtagtgagcgaggaagcggccgnnnnnnnnnnnnnnnnnnnnnnnnnnnnnnnnnnncagtcgacggtaccggacatatgcccgggaattcggccattacggccggggcgctctctggccgggcttgggctgcgtggagaatactttttgcgatgcctactggagactttgattcgaagcccagttgggccgaccaggtggaggaggagggggaggacgacaaatgtgtcaccagcgagctcctcaaggggatccctctggccacaggtgacaccagcccagagccagagctactgccgggagctccactgccgcctcccaaggaggtcatcaacggaaacataaagacagtgacagagtacaagatagatgaggatggcaagaagttcaagattgtccgcaccttcaggattgagacccggaaggcttcaaaggctgtcgcaaggaggaagaactggaagaagttcgggaactcagagtttgacccccccggacccaatgtggccaccaccactgtcagtgacgatgtctctatgacgttcatcaccagcaaagaggacctgaactgccaggaggaggaggaccctatgaacaaactcaagggccagaagatcgtgtcctgccgcatctgcaagggcgaccactggaccacccgctgcccctacaaggatacgctggggcccatgcagaaggagctggccgagcagctgggcctgtctactgagctagagccggtgcaggccacgcagaacaagacagggaagtatgttgccgccgagcctgcgcgacggggccagccgccgcggggagtccatgcagcccaacgcagagccgacgacaacgccccatccgtgtcacacttgtcagag

SEQ ID NO: 69552 - DNA, 984 bp, Homo Sapiens
aacttactggctaggtacgaggctgggttgtaaatcggcacgagggggccgggcttgggctgcgtggagaatactttttgcgatgcctactggagactttgattcgaagcccagttgggccgaccaggtggaggaggagggggaggacgacaaatgtgtcaccagcgagctcctcaaggggatccctctggccacaggtgacaccagcccagagccagagctactgccgggagctccactgccgcctcccaaggaggtcatcaacggaaacataaagacagtgacagagtacaagatagatgaggatggcaagaagttcaagattgtccgcaccttcaggattgagacccggaaggcttcaaaggctgtcgcaaggaggaagaactggaagaagttcgggaactcagagtttgacccccccggacccaatgtggccaccaccactgtcagtgacgatgtctctatgacgttcatcaccagcaaagaggacctgaactgccaggaggaggaggaccctatgaacaaactcaagggccagaagatcgtgtcctgccgcatctgcaagggcgaccactggaccacccgctgcccctacaaggatacgctggggcccatgcagaaggagctggccgagcagctgggcctgtctactggcgagaaagagaagctgccgggagagctagagccggtgcaggccacgcagaacaagacaggggaagtatgtgccgcccgagcctgcgcgacggggccagcccgccgcgggggagtccatgcagccccaaccgcagagccgacgaccacggccaccatcccgtgtcaccaaccttggcagagggacacgcgtgaggaccgacctgcagggagctctttccgggcctttcgggttccatctccccgcatctaacctgggtaagggacagaccactgggccaaggccaaggggctttgctttcatcaactttccacccccccaaggatctgcgg

SEQ ID NO: 69553 - DNA, 1114 bp, Homo Sapiens
  misc_feature (89)..(98): n is a, c, g, or t
  misc_feature (129)..(141): n is a, c, g, or t
  misc_feature (241)..(241): n is a, c, g, or t
tcgtcgttgtggcgagtggcttggtcgcgctatttgattggtcgttgtagtggttggagtgggtttgttgtagctagaaagggggggannnnnnnnnnggccaaattggcaacggggcagcatctcttnnnnnnnnnnnnnaagcttgatgagggccaaaggcctttggattggcccagtggtcttggtccttagccaggttagatgcgggagatggagccgaaaaggccggaagagctcntgcaggttcgtctcaacgcgtgtcctcctgacaagtttggtgacacggatggtggcgttgtcgtcgcctctgcggttggcctgcatggactccccggcggcggctggccccgtcgcgcaggctcggcggcacatacttccctgtcttgttctgcgtggcctgcaccggctctagctctcccggcagcttctccttctcgccagtagacaggcccagctgctcggccagctccttctgcatgggccccagcgtatccttgtaggggcagcgggtggtccagtggtcgcccttgcagatgcggcaggacacgatcttctggcccttgagtttgttcatagggtcctcctcctcctggcagttcaggtcctctttgctggtgatgaacgtcatagagacatcgtcactgacagtggtggtggccacattgggtccgggggggtcaaactctgagttcccgaacttcttccagttcttcctccttgcgacagcctttgaagccttccgggtctcaatcctgaaggtgcggacaatcttgaacttcttgccatcctcatctatcttgtactctgtcactgtctttatgtttccgttgatgacctccttgggaggcggcagtggagctcccggcagtagctctggctctgggctggtgtcacctgtggccagagggatccccttgaggagctcgctggtgacacatttgtcgtcctccccctcctcctccacctggtcggcccaactgggcttcgaatcaaagtctccacctcgtgccgaattcgccacccaggcctcgctaccttaggaccgtatagtactggccgtacgtttttaacaaaacctgcgggggttttgtacaaaacttgaggcctagtt

SEQ ID NO: 69554 - DNA, 1268 bp, Homo Sapiens
aggaagcgaggcctgggtggcgaattcggcacgagggctgcgtggagaatactttttgcgatgcctactggagactttgattcgaagcccagttgggccgaccaggtggaggaggagggggaggacgacaaatgtgtcaccagcgagctcctcaaggggatccctctggccacaggtgacaccagcccagagccagagctactgccgggagctccactgccgcctcccaaggaggtcatcaacggaaacataaagacagtgacagagtacaagatagatgaggatggcaagaagttcaagattgtccgcaccttcaggattgagacccggaaggcttcaaaggctgtcgcaaggaggaagaactggaagaagttcgggaactcagagtttgacccccccggacccaatgtggccaccaccactgtcagtgacgatgtctctatgacgttcatcaccagcaaagaggacctgaactgccaggaggaggaggaccctatgaacaaactcaagggccagaagatcgtgtcctgccgcatctgcaagggcgaccactggaccacccgctgcccctacaaggatacgctggggcccatgcagaaggagctggccgagcagctgggcctgtctactggcgagaaggagaagctgccgggagagctagagccggtgcaggccacgcagaacaagacagggaagtatgtgccgccgagcctgcgcgacggggccagccgccgcggggagtccatgcagcccaaccgcagagccgacgacaacgccaccatccgtgtcaccaacttgtcagaggacacgcgtgagaccgacctgcaggagctcttccggcctttcggctccatctcccgcatctacctggctaaggacaagaccactggccaatccaagggcttcgccttcatcagcttccaccgccgcgaggatgctgcgcgtgccattgccggggtgtccggctttggctacgaccacctcatcctcaacgtcgagtgggccaagccgtccaccaactaagccagctgccactgtgtactcggtccgggacccttggcgacagaagacagcctccgagagcgcgggctccaagggcaataaagcagctccactctggaaaaaacaggaaagggaagacgaccaaaaccgggctccgccgccccccgctccccaaaaaagctttcataaccacttggtttgggacccgcgggccacaataagaaaattgcaacggggccaacaccgtggtctcccacagaaaaatt

SEQ ID NO: 69555 - DNA, 1053 bp, Homo Sapiens
gcgaggcctgggtggcgaattcggcacgagggggctgcgtggagaatactttttgcgatgcctactggagactttgattcgaagcccagttgggccgaccaggtggaggaggagggggaggacgacaaatgtgtcaccagcgagctcctcaaggggatccctctggccacaggtgacaccagcccagagccagagctactgccgggagctccactgccgcctcccaaggaggtcatcaacggaaacataaagacagtgacagagtacaagatagatgaggatggcaagaagttcaagattgtccgcaccttcaggattgagacccggaaggcttcaaaggctgtcgcaaggaggaagaactggaagaagttcgggaactcagagtttgacccccccggacccaatgtggccaccaccactgtcagtgacgatgtctctatgacgttcatcaccagcaaagaggacctgaactgccaggaggaggaggaccctatgaacaaactcaagggccagaagatcgtgtcctgccgcatctgcaagggcgaccactggaccacccgctgcccctacaaggatacgctggggcccatgcagaaggagctggccgagcagctgggcctgtctactggcgagaaagagaagctgccgggagagctagagccggtgcacgccacgcagaacaagacagggaagtatgtgccggccgagcctggcgcgaccgggccagccgccggggggagtccatggcgccccaaccgcagagccgacaacaaccgccaccatcccggggcaccaaacttgtcaagaaggacacccgtggaaaccgaacctgcaaggagctccttcccgggcctttcggggtccattctcccggattctacccgggctaaagggaaaaaaccacttggggcaatccaaggggctttgcccttactcaacctttcaccccccccaaaagaaaggctcgccgtgcccccactgcgcgggggggcttcacagcggcgcggctggaccggccctccgcgtccggagggggccgtccgcgggaaggcg

SEQ ID NO: 69556 - DNA, 1753 bp, Homo Sapiens
  misc_feature (1619)..(1627): n is a, c, g, or t
tacaggttgaggaacaggttagcaccactgagagagtgtttcaggatagacaatatcagattgatgctgctatcgtcagaataatgaagatgagaaagactcttggtcataatcttctagtttccgaattatataatcagctgaaatttccagtaaagcctggaatttgaaaaagagaattgaatctctgatagacagagactatatggagagagacaaagacaatccgaatcagtaccactacgtggcctgacgcatctgcagacggttccccttcatgaaacactagaatgtaccctcagagcaggaagcacacctgtgccatttctgggactctgattgatccagctgtggacattggaaggcgaaggaagggaggtggctcctgggtcatctttcacaaggctcaagacttcaacctgcagatgtatctttttccctccagtttttcctctagttcttttaggcatttaaattgtttctgttactctgtgcaaaataactttgagattggacaagaagatgttactaaagagaagttcctttaaaaggtcttgttcttgtgtcaaaaagctgcaagtttggtttgttctcgtgtgtgatcatgagtgcacaatgaagaagaccctagatgctgcattttttagctctgaagattccttaggtatccctgaagacagctcgctcagatgatcagcatttagagtgaaaacaagggcccttcatgggtgaacattagaaagagccagggttcaaagctggcgaatggatgacgcaccctagccactggcccctctctgtttcatgtatttccaaaagttgtaaactttgatggctgatttttcgtaagtcaggtttctaagtgagctccctgaggtgccaaggccatggtgtccgccctgctgcgtctgttcgtcagctgagttccttgtgaatctctgttttagggtttggggctagtgtgtttgtgtttccattctaagattgagtctggcagtccctgtttttttgcattggggtaactgctctttgattttttttaattgcagtatttgtgtgattgcaataataaagtttggtttggtttttacagtcatgcgcagggacgatccttgttctctgctgtaaactgtaaaaagtttatggagacttaaagtcttgatgttgtgaagcagaggttattttgtggaaagattaaaaggattttgttggtacctggttttgtgttgtgtatatatacatgaggttgaacagtgaaaggaaagttcagtagtgatgttagaagggtaactatgacaaagatacttttgagataacatttaaaagtactttatattttacataatagcatgtttcattttgattaaaagctaccaaaggaattttgatcatggcataagtgtttaaagcaatattttctggaatataccaagtttatataatttgattttgtgctaaattattaagagtctctttttgaaacatgcgggtttgaaatatgacaccttgtgggtttccatattaaaatcctcactctttaattgtcatttctatctttgaaaattttcatttatgagttccatgatatgtggtctaagaaagaccaaacagatttctannnnnnnnncttataagttcgttgtgtctagagattgttaatattgtaatttaatgtagacttactttgaataaaattagtttaattggccttaaaattacattaataaaactttgtgatatgcaaatgaaaaaa

SEQ ID NO: 69557 - DNA, 1615 bp, Homo Sapiens
  misc_feature (79)..(113): n is a, c, g, or t
  misc_feature (655)..(664): n is a, c, g, or t
  misc_feature (1282)..(1290): n is a, c, g, or t
  misc_feature (1472)..(1472): n is a, c, g, or t
tgatcatccactatagggcgctagctctcgcagcgaacgaaccgagcgcagcgaagtcagtgagcgaggaagcggccgnnnnnnnnnnnnnnnnnnnnnnnnnnnnnnnnnnncagtcgacggtaccggacatatgcccgggaattcggccattacggccgggcactgccaatgatgataacgttactcaggtgcgggcattctatgtgaacgtgctgaatgaggaacagaggaaacgtctgtgtgagaacattgccggccacctgaaggatgcacaaattttcatccagaagaaagcggtcaagaacttcactgaggtccaccctgactacgggagccacatccaggctcttctggacaagtacaatgctgagaagcctaagaatgcgattcacacctttgtgcagtccggatctcacttggcggcaagggagaaggcaaatctgtgaggccggggccctgcacctgtgcagcgaagcttagcgttcatccgtgtaacccgctcatcactggatgaagattctcctgtgctagatgtgcaaatgcaagctagtggcttcaaaatagagaatcccactttctatagcagattgtgtaacaattttaatgctatttccccaggggaaaatgaaggttaggatttaacagtcatttnnnnnnnnnntttgttttgacggatgattggattattcatttaaaatgattagaaggcaagtttctagctagaaatatgattttatttgacaaaatttgttgaaattatgtatgtttacatatcacctcatggcctattatattaaaatatggctataaatatataaaaagaaaagataaagatgatctactcagaaatttttatttttctaaggttctcataggaaaagtacatttaatacagcagtgtcatcagaagataacttgagcaccgtcatggcttaatgtttattcctgataataattgatcaaattcatttttttcactggagttacattaatgttaattcagcactgatttcacaacagatcaatttgtaattgcttacatttttacaataaataatctgtacgtaagagtaccaaacaccccattaacccctcccttccgctgttttccgtcaacaatccaattactcttggaaaactccccaatacaccgtatgcgcctcgaacaccccccccgtctgcccctttttcctctcttgtttggctgccctccgccccctccgcaaaatgtttggcaccccccttccccctttaaaaaaatttattcccaacacactcnnnnnnnnnggcggcgggggtccccccttcatcagcaacaacaaaacgtggtgccacacatgcagttcctcccccaaggaataccccggcccctattaaacaacgggggtgtttggtgttcttccccaaagataaaaaaacaaccccgcccgcgcaaaacagtcttgtcttttatcaccacaataccccanaaggtgggcctctgcgggggggtctattaggtggggctttcacaacacacgagagttctccccccaccgtgcctttaaacaataacatttaatcctcccccgccccccgttttcgccttctcaagataatcatgcgccgtgta

SEQ ID NO: 69558 - DNA, 1778 bp, Homo Sapiens
  misc_feature (39)..(40): n is a, c, g, or t
  misc_feature (96)..(96): n is a, c, g, or t
  misc_feature (115)..(115): n is a, c, g, or t
  misc_feature (233)..(233): n is a, c, g, or t
  misc_feature (1287)..(1718): n is a, c, g, or t
gcatgtatcttacagctgtgttgacgcagtacgtcagcnngtgtaagtcgacgaaattgatggtttcataaatagttgacatccgtgatcagaatntagtcgagtatgtgctttncccgagcagagtggagatctgtgaccagctgcataaagcactgtgatggaaaagaaatggttaccatgaaggagctggagttctcaaaagacaaaattctaatgggccctgaaagaangaagtgtggaaattgataaaaaaaacaaaaccatcacagcatatcatgaatctggtcatgccattattgcatataacacaaaagatgcaatgcctatcaacaaagctacaatcatgccacgggggccaacacttggacatgtgtccctgttacctgagaatgacagatggaatgaaactagagcccagctgcttgcacaaatggatgttagtatgggaggaagagtggcagaggagcttatatttggaaccgaccatattacaacaggtgcttccagtgattttgataatgccactaaaatagcaaagcggatggttaccaaatttggaatgagtgaaaagcttggagttatgacctacagtgatacagggaaactaagtccagaaacccaatctgccatcgaacaagaaataagaatccttctaagggactcatatgaacgagcaaaacatatcttgaaaactcatgcaaaggagcataagaatctcgcagaagctttattgacctatgagactttggatgccaaagagattcaaattgttcttgaggggaaaaagttggaagtgagatgataactctcttgatatggatgcttgctggttttattgcaagaatataagtagcattgcagtagtctacttttacaacgctttcccctcattcttgatgtggtgtaattgaagggtgtgaaatgctttgtcaatcatttgtcacatttatccagtttgggttattctcattatgacacctattgcaaattagcatcccatggcaaatatattttgaaaaaataaagaactatcaggattgaaaacagctcttttgaggaatgtcaattagttattaagttgaaagtaattaatgattttatgtttggttactctactagatttgataaaaattgtgcctttagccttctatatacatcagtggaaacttaagatgcagtaattatgttccagattgaccatgaataaaatattttttaatctaaatgtagagaagttgggattaaaagcagtctcggaaacacagagccaggaatatagccttnnnnnnnnnnnnnnnnnnnnnnnnnnnnnnnnnnnnnnnnnnnnnnnnnnnnnnnnnnnnnnnnnnnnnnnnnnnnnnnnnnnnnnnnnnnnnnnnnnnnnnnnnnnnnnnnnnnnnnnnnnnnnnnnnnnnnnnnnnnnnnnnnnnnnnnnnnnnnnnnnnnnnnnnnnnnnnnnnnnnnnnnnnnnnnnnnnnnnnnnnnnnnnnnnnnnnnnnnnnnnnnnnnnnnnnnnnnnnnnnnnnnnnnnnnnnnnnnnnnnnnnnnnnnnnnnnnnnnnnnnnnnnnnnnnnnnnnnnnnnnnnnnnnnnnnnnnnnnnnnnnnnnnnnnnnnnnnnnnnnnnnnnnnnnnnnnnnnnnnnnnnnnnnnnnnnnnnnnnnnnnnnnnnnnnnnnnnnnnnnnnnnnnnnnnnnnnnnnnnnnnnnnnnnnnnntttacacttattttatttccaaacaaatacgcaggtgtggggtgcattgctgggatccga

SEQ ID NO: 69559 - DNA, 1468 bp, Homo Sapiens
  misc_feature (1086)..(1146): n is a, c, g, or t
cagttatttaacctgtaaaatgtcaatagcaaatgaaggatgaagtatatctctagatgcaaatacattgagtttaagagtgcctcaaaataattgagatcacatttcaggacatgtggaaatcaggtcgatttgtggtaactgtagtcatattaaatttcaaaccatttaccatatgaaagttttgatttgaatgtaaaacaggaaattggaattcctttgtccaggagaaacctcacaaaccttctttaaggcatagttttgttgtttgtttgcttgtttgttgcaggctgtaaggcatggctgcttgtttacaaagcatctcattcatattacctgtggagttgcatatccaaaccttagtgagttttgaagctttaagcaaattcttttaaaaaattcttgtatttctagcattactagatattaaaagttaagcaaatagattaatgacgtatacataggcatcatttcacaaggtcagtaatgctgcaggaaaagcaaaattgcaatctacgtatctatggtactaaggaagtcctgtttttcaaaaatggaagcccacttctcagatttttctgaagggcatacaatgaaaagtgaaggggaaacacacacacacaaaaaaacaagtatttggcttgtcacaggaatctgattgcattaagtgaaaggattatttagaatatgttaatgcaaagctaaaataaaattttccttggcaattaaaaatgctgtgcgctaataccctgctttctatcgtgactcaattcaacaatgtggggaatgtttactacatttccaacttgatgtcaagcaatggggaatacaagttccagttctgcaaagattcgtcaactttcttagctcaagagagaggctgagaaatgcagagaagaataagacataaaatagctccgacctccatgatccgagagtgggaaaaggcccgattattacccataaggcacactctctaaggccttttaaggggcctacaaaaagtgttttattttataatcagaagaaaaggaaatgaacattggggattgaaaatcatattggtatttgcaccaacatagtcannnnnnnnnnnnnnnnnnnnnnnnnnnnnnnnnnnnnnnnnnnnnnnnnnnnnnnnnnnnngttttgcctttgtggcccatgaaagtcttactgggccctggggaaggtatcctaccctggtgaagcagctgctttgctctacaaatacctggggcagaaatttgatttgaaaagtattattctctcttctctttgtgtcaactgggattcctttggaaaaccaaactagtatcagaacaaacccgaaacagtaagaaattggagtgagaagggcatggattagcgactaggatcgggtctcatgcgaacgaagctattctcttaaaatgacaaaagtgtcctaaagagctgctgaaagtgcgtggcataggaggccaatgcg

SEQ ID NO: 69560 - DNA, 1213 bp, Homo Sapiens
  misc_feature (953)..(961): n is a, c, g, or t
acccaagaagagctagaaagagtatctgcactgaagagtgaagttgatgaaatgaaaggacgaacattggatgatatgtctgaaatggtgaaaaaactgtattcattggtatctgaaaagaagtcagctcttgcctcagttataaaagagctacgacagttgcgtcaaaaatatcaagaactgacccaggagtgtgatgaaaagaaatcccagtatgatagctgtgcagcaggcctcgaaagcaatcggtccaaattagaactggaagttagaagactccgtgaagaatgtcttcaagaagaaagtagataccattatacaaattgtatgattaagaacctagaagttcaacttcgtcgtgctactgatgagatgaaggcatatatctcttctgatcaacaagaaaaaagaaaggcaattagggaacagtataccaaaaatactgctgaacaagaaaaccttggaaagaaacttcgggaaaaacaaaaagttatacgagaaagtcatggtccaaatatgaaacaagcaaaaatgtggcgtgatttggaacaattaatggaatgtaagaaacagtgctttctgaaacaacaaagccaaacttccattggtcaggtaattcaggagggtggggaggaccggctaatactgtgaattcttgtgtcatcgtttggggttttacttgataccactagctataagcctaatctcataatgtatttcttttttgaaactgatttgtatagcattttgttttcagaagagccattctttattaagttttcatagaaaataatgttaaggtagatttagtttgaatgttttttcatatgaaaaagaggcttttattcttttccatagtttagacatcactggcgtcttctgagttttatgagacaggaaactaagtttactatctgtaaatgtaaacatatgtccattaagaaacatgtagnnnnnnnnnagaatgtaataacccagtggcttactgtttttcttaatctcttttaaaaaaactttagaagaatcttttaggaactaatatctcttgttctgaagaaacatttatctgacgttcagcagttcctacagttttacttcagtttatttttcttctgtaaaatgcaagaaaatttaatattttgactaacatgtcttttctgtttgtatcatttaaaggcaaataaacttggtacgtatttcatatctatttaaa

SEQ ID NO: 69561 - DNA, 748 bp, Homo Sapiens
  misc_feature (381)..(402): n is a, c, g, or t
ttttaaaactaataaatttttaattagaatttcggcctttttttaacaggacaagtaacagattacatcaaacttcagaacttctcaaatacctagttattatacacattcccatctgtcttgcagggagggatcttggtcggcttaacagtttcaggtaaaataagctgcataatagtatatattacaataataaatgtacaatgtttacatgaaatatgttttagaagcaagaaaaagatgcatctgcatcaaaggcgaccttttaaaatgccacaactattttttacattcactcttgcaacaggttacaagatgggggtcactaagctcagataaatcactatgatgcacataaaatacaggaagactggttacttnnnnnnnnnnnnnnnnnnnnnntttcacacgttagcatctgagacataaactgagaatttaaaatttattctcttcagataacaaatcattttttattcttcataaacaaggtgcccacaaaagcacacaggtaaggcacaatagggctttctgttacagaatagtgtgcatcatgtttacttaaccagaaaacgtgcattatctgtgcaagttcatgctgcaaacccaacgcatacaataaaacaaaaaggaaactgagctttaaatacaaccaaaatttgtacaattccagctgtttcacatattcatttggactgacaattatatatcaacaggttatttttaaaaagcctacagccgcggccgc

SEQ ID NO: 69562 - DNA, 723 bp, Homo Sapiens
agatgctctaactgaaccaagtcatctatcaagatatctgcattaaagtgtgactccaaacttccagcaattgaccaaacatcagtcaagcagaaacataaaagtaccatgactgtaaggaaagcagagaaagtggaccccagcgaaccctctccaggtggcagcagcaagcaccccctgttctgtgttgaatacaccccttactgctccgtcttcgctttctcccctgtcctgcagcccaataccaattactgctgcctcctcctgccactagtgccacctgcctccccagtggcccaggaacctcctgactgtcctctccctctggttaccgttccctccttcacaagcaccgcttccacctccccggaccccgtgcccgagtcccccgccgtgctgtgctacttccccatctcctgccccactccggctgagacccctgtgctgtgccttcagggccccagaaggcccagtaggatttacctcatgtggtaagtcactcttgcaaggcacacagcacagcgcagtcggggagaggggacttcgggcttccggaaggcaggtggacaggagaggggccagaggccacaccaagaacaataccaggcggcgtggtgttcgggggagcaggaagatgggacagcgtggccactgcactggggctgcaccttctagcgccaaaggagcgagcgaccaataaaatcccatcctctctggaaaaaa

SEQ ID NO: 69563 - DNA, 1093 bp, Homo Sapiens
cagtcgacggtaccggacatatgcccgggaattcggccattacggccggggccaaaactcagaatagaacttagacgtatgtctgagtccctgagatcacatgctaaagtcgatgaaaagtaaccactgccactgtcttgtgtcagaacttttacagtacagaaaataacagaatagccttctgtaatgaggcgtttgttagagttttgcatgagattctaatacttcagtaggaccctacctacgtggttcatctacaatggttaccataaaaaatctggcaggattttaaaactcaatcagtctttcctttgagctagtgacttgaaaagaaagagagaaggaaaagagaccatattaagtccatgccagttgcttggctagaatatgatcaacgacttgtagtagactcaagtttttaaaaaacactattttacttaaactgtttcttatctaaattcttgcagagtgtcaatgttatcattgattatagaagacagggataatacctttatctctggccactcaaaaatgcagtgccaggagtgctaaacctagaggccaatactgatgacctggaaggtgatccatatgattgtcaccacaaagtgcttttacacaaaaacttgaaaatttgaaaaacatgatttttttaagtttctcatctcaccagtcttggtgtttatattgcaaatctatcaaagtaagaaataatttgtgctgtatacaaattacatggggaacataaaggagtgagatccttctgtgataaaatgaattcaccactctggttacccaactacagaacctcctttgatcaggccagtaggttgtgatgcaggctggagcccccgaatgccccacacacactgcagcattgaccagaccatccgaaacctgcgtccctggtgatgttctcaagcctcggaagtggcaaatggaaatgatatggccggttgcggttgtaggagagttgtgacttaggcaggagtcgacctcctcaagtaatggaacgatttcaaaggcaggctgccctgaccaaaaatatctgccatgaataaaggtgcctgaaatcctgctatgaaaaaacaca

SEQ ID NO: 69564 - DNA, 932 bp, Homo Sapiens
  misc_feature (83)..(117): n is a, c, g, or t
aagaatgtatagactcactatagggcgctagcgcgtcataccgaacgacgagcgcagcgaagtagtgagcgaggaagcggcgnnnnnnnnnnnnnnnnnnnnnnnnnnnnnnnnnnncagtcgacggtaccggacatatgcccgggaattcggccattacggccggggaaacggaagtgtaggttacggtctgagacatcaccgccaagctgggcatcggggagatggccgagactgaccccaagaccgtgcaggacctcacctcggtggtgcagacactcctgcagcagatgcaagataaatttcagaccatgtctgaccagatcattgggagaattgatgatatgagtagtcgcattgatgatctggaaaagaatatcgcggacctcatgacacaggctggggtggaagaactggaaagtgaaaacaagatacctgccacgcaaaagagttgaaggttgctaataatttatactggaatctggcatttttccaagccaagagaagatcgaatggctttttgcagctaactactatgtgtagacaggttttatattataaagtatgcattcttatcacctagtatatagttagtttgtagagtgatttccccccagtttcttgaacatggtatcttcacatcttggaccttggtcagttgtgctattcattattaaacactaaaactttggcggttcttgcataaccattgtcagattctaacagtgtacttctgtgaagtcatttcctcccttgtcattccttccgtagtagttgctgtttggataaagttgatgtgtgattttttattaaacaaatagtaaacccttcaattatagttagtcttggtgaaagtaagatgtttgtagacctttgaaggttctttaattctttgccacaccgggactggttgagctaacacccaattaatt

SEQ ID NO: 69565 - DNA, 886 bp, Homo Sapiens
  misc_feature (78)..(112): n is a, c, g, or t
  misc_feature (765)..(774): n is a, c, g, or t
  misc_feature (776)..(781): n is a, c, g, or t
  misc_feature (786)..(790): n is a, c, g, or t
  misc_feature (792)..(792): n is a, c, g, or t
  misc_feature (796)..(796): n is a, c, g, or t
  misc_feature (798)..(799): n is a, c, g, or t
  misc_feature (801)..(801): n is a, c, g, or t
  misc_feature (805)..(805): n is a, c, g, or t
caaatgatgatcactatggggctagctcgtcgagcgaacgaacgagcgcagcgcagtagtgagcgaggaagcggccgnnnnnnnnnnnnnnnnnnnnnnnnnnnnnnnnnnncagtcgacggtaccggacatatgcccgggaattcggccattacggccgggggaagtgtaggttacggtctgagacatcaccgccaagctgggcatcggggagatggccgagactgaccccaagaccgtgcaggacctcacctcggtggtgcagacactcctgcagcagatgcaagataaatttcagaccatgtctgaccagatcattgggagaattgatgatatgagtagtcgcattgatgatctggaaaagaatatcgcggacctcatgacacaggctggggtggaagaactggaaagtgaaaacaagatacctgccacgcaaaagagttgaaggttgctaataatttatactggaatctggcatttttccaagccaagagaagatcgaatggctttttgcagctaactactatgtgtagacaggttttatattataaagtatgcattcttatcacctagtatatagttagtttgtagagtgatttccccccagtttcttgaacatggtatcttcacatcttggaccttggtcagttgtgctattcattattaaacactaaaactttggcggttcttgcaaaacattgtcagattgagagtgtattctgtgaaggtcataggatacttgtagatccttgagaagagaagtannnnnnnnnnannnnnnttttnnnnnanaaanannanccanaaaaaaacatttggtgggcccgcctctggcccctccaaaaaaacttcttaaaaccttttcctttggggccccgggcccccc

SEQ ID NO: 69566 - DNA, 1369 bp, Homo Sapiens
  misc_feature (1301)..(1301): n is a, c, g, or t
cagtcgacggtaccggacatatgcccgggaattcggccattacggccggggagtctcgtcgcgagaagcagcggcccggggcgactgagcggacaaacggaagtgtaggttacggtctgagacatcaccgccaagctgggcatcggggagatggccgagactgaccccaagaccgtgcaggacctcacctcggtggtgcagacactcctgcagcagatgcaagataaatttcagaccatgtctgaccagatcattgggagaattgatgatatgagtagtcgcattgatgatctggaaaagaatatcgcggacctcatgacacaggctggggtggaagaactggaaagtgaaaacaagatacctgccacgcaaaagagttgaaggttgctaataatttatactggaatctggcatttttccaagccaagagaagatcgaatggctttttgcagctaactactatgtgtagacaggttttatattataaagtatgcattcttatcacctagtatatagttagtttgtagagtgatttccccccagtttcttgaacatggtatcttcacatcttggaccttggtcagttgtgctattcattattaaacactaaaactttggcggttcttgcataacattgtcagattttttagtgtatttctgtgaagtcattttttttcttgtcattccttttgtagtagttgctgtttggataaaagttgatgtgtgattttttattaaacaaatagtaaacccttcaattatagttagtcttggtgaagtaagatgtttgtagactttagagttctttaattcttggcacaacgtgactgttgagctaacaccaaatagtgtgttggcaatacttttcaaatggctgaaaacacctaaaaattgttcattcagaaatatctgtcactgctctgttgccaaaactcagaatagaacttagacgtatgtctgagtccctgagatcacatgctaaagtcgatgaaaagtaaccactgccactgtcttgtgtcagaacttttacagtacagaaaataacaaaatagccttctgtaatggaggcgtttgttagagttttgcatgagattctaatacttcagtaggaccctaccaaacgcctcattacagaaggctattctgttattttctgtactgaggcgtttgttagagttttgcatgagattctaatacttcagtaggaccctacctacgtggttcatctacaatggttaccataaaaaatctggcaggattttaaaactcaatcagtctttcctttgagctagtgacttganaagaaagagagaaggaaaagagaccatattaagtccatgccagttgcttggctagaatatgatcaacg

SEQ ID NO: 69567 - DNA, 902 bp, Homo Sapiens
  misc_feature (557)..(568): n is a, c, g, or t
  misc_feature (570)..(571): n is a, c, g, or t
  misc_feature (573)..(573): n is a, c, g, or t
  misc_feature (576)..(578): n is a, c, g, or t
  misc_feature (594)..(594): n is a, c, g, or t
  misc_feature (608)..(617): n is a, c, g, or t
  misc_feature (619)..(636): n is a, c, g, or t
ggggcgactgagcggacaaacggaagtgtaggttacggtctgagacatcaccgccaagctgggcatcggggagatggccgagactgaccccaagaccgtgcaggacctcacctcggtggtgcagacactcctgcagcagatgcaagataaatttcagaccatgtctgaccagatcattgggagaattgatgatatgagtagtcgcattgatgatctggaaaagaatatcgcggacctcatgacacaggctggggtggaagaactggaaagtgaaaacaagatacctgccacgcaaaagagttgaaggttgctaataatttatactggaatctggcatttttccaagccaagagaagatcgaatggctttttgcagctaactactatgtgtagacaggttttatattataaagtatgcattcttatcacctagtatatagttagtttgtagagtgatttccccccagtttcttgaacatggtatcttcacatcttggaccttggtcagttgtgctattcattattaaacactaaaactttggcggttcttgtaaaaannnnnnnnnnnnannanaannnaaaacatgtccggccngcctcgggcccttnnnnnnnnnnannnnnnnnnnnnnnnnnnccttgtcgggccgcctcgggccctcgaaaaaagttttctaaaaccttttcgttgggcggcgcggccccccgtagggaaggggaacatgggccttagcgtggttccctagggagatcccggggcatggaactaagggcttgggattccccaccacataaaaaaacgcccgcggggggaacccggagggtttttgaacaaattcccaagagggggagttctggaggggcctttacgggggttctttctcacgggggagtccccaggcg

SEQ ID NO: 69568 - DNA, 1072 bp, Homo Sapiens
  misc_feature (47)..(47): n is a, c, g, or t
  misc_feature (63)..(452): n is a, c, g, or t
ggacttatgaaaacgccagcacgcgccttttacgttctgccctttgntgcctttgctcactgnnnnnnnnnnnnnnnnnnnnnnnnnnnnnnnnnnnnnnnnnnnnnnnnnnnnnnnnnnnnnnnnnnnnnnnnnnnnnnnnnnnnnnnnnnnnnnnnnnnnnnnnnnnnnnnnnnnnnnnnnnnnnnnnnnnnnnnnnnnnnnnnnnnnnnnnnnnnnnnnnnnnnnnnnnnnnnnnnnnnnnnnnnnnnnnnnnnnnnnnnnnnnnnnnnnnnnnnnnnnnnnnnnnnnnnnnnnnnnnnnnnnnnnnnnnnnnnnnnnnnnnnnnnnnnnnnnnnnnnnnnnnnnnnnnnnnnnnnnnnnnnnnnnnnnnnnnnnnnnnnnnnnnnnnnnnnnnnnnnnnnnnnnnnnnnnnnnnnnnnnnnnnnnnnnnnnnnnnnnnnnnnnnnnnnaagaattcggcacgagggaggttgtcataaggattaaataagacaatgcatataaaagaactggcagacaataaatatagagtcccccactcctgcttggtgctctctttctctctccttctctacatagagaagtgccagagcatccgtcagtagaagttacttaaggttggctgtgtcttccacatcttttgtttacccatgaagaactgtgaccatcttgttctgtgtcttgtcataaagatgggacgtgacttctttctgctcttgcttccatctggtgctgttttctgcacagcctccttgagaccttccagaaccttcttttttcctacttcgtatcacttaaccagtagctatctgggatggttccagaggctgaagtttgcagttgaataacattttaaatagtgttaagcgacttgggatctctggccctttgcgtttcagtatttgtcctttttatgcctgatgtttaacctgccacatgtttgtactgcaacatgaatcttggaaattttaatgttatgcatttcaaatgtttttggttatctgtaaactaaatgtgcccttattggctcacttgtcaataaagatgtttgtatatgtattgtcagaaa

SEQ ID NO: 69569 - DNA, 1087 bp, Homo Sapiens
  misc_feature (138)..(138): n is a, c, g, or t
  misc_feature (240)..(288): n is a, c, g, or t
  misc_feature (933)..(1023): n is a, c, g, or t
agctacacaaagcatacagagagtagtgctctttatgactacacagcgatcgatcagatgaactaaccatccatcgcggagacatatccgagttttttcaaagataatgaagactggtgtatggcagcataggaaagngacaggaaggtattttccagctaatcatgtggctagtgaaacactgtatcaagaactgcctcctgagataaaggagcgatcccctcctttaagccctgaggnnnnnnnnnnnnnnnnnnnnnnnnnnnnnnnnnnnnnnnnnnnnnnnnncaaaacagctcacagagacacctccttcttccccctgcttctgcctccatgagtaactacctatatgacgtgctgctgctgagaccaaggaatgagtgagtaaaggtgtttggaagtcaaatattggtcctagttaagtaagtgtccttttcaagtaagtggtaaactttgtaatgtggacccccttctaacttaggattcatataatttgaacacaggctaagctgcctctgcatcattaaaaaggatttgggtatgccagtgataggaatacacagtagaaaagatggcagggaccatgtttaacatacctaagacaaactttctgaggatatcacagcatccatttcacatgaacagacttagcagaattggcaagacctgcacatggcaacatattattcatttttcagggtaacaaaaaataattaaaagtaacattggcttaacactggtatatagttcagtatgacttctctcccctcaacctctggaataggttcaaattgatgagaatttctgattagagcccttaatgttgagttttttgaaaagttttatcaagtttcatatatacctatattgatggtaagttgctggtcttgccatgggcaaagagagaaaaatgatactgagaccttgtannnnnnnnnnnnnnnnnnnnnnnnnnnnnnnnnnnnnnnnnnnnnnnnnnnnnnnnnnnnnnnnnnnnnnnnnnnnnnnnnnnnnnnnnnntgcagtgagctacgatcatgccactgtcctcccgcctgagcaacaaagcatgacaaaatatctt

SEQ ID NO: 69570 - DNA, 946 bp, Homo Sapiens
  misc_feature (97)..(138): n is a, c, g, or t
  misc_feature (907)..(907): n is a, c, g, or t
caattttaatacatttattaaggcggcatgttcaaagtcttcaatggacagcaacaaaacagaaagccaaaaaatgactagggcttctaataagtgnnnnnnnnnnnnnnnnnnnnnnnnnnnnnnnnnnnnnnnnnnaaaggatttgattttcagtgcacaggttcaagccatagatttaaattggtaatagaggcagaataggacagtctaagatttgggccaagcccaagctcttgaaagtggagaaataaagtgcctacagaaacccccaactccaggaatgagtaacacggagtttctttaataagctaccagtctccaggtcaataactaagttatcaacaattcatttgtttatacacttttgtttcaaacacccacatttcaaccccctcccccataaatccctccacattttcagtgtggttgattaatctcccagctgttgatgggttcaggcaaaacagaccgtgagaaaacgcagcatgtaagcaacatgtgtgtggggcgggttgatttaagaacctggctcttaacagcaaaggcttggaagttccaatgacaacgcgatgtttcttcataggtttgctccctaccttccctcgccccttcctccgctaaatctcagctgcggcggcggagtgtggggactatggctggtttctggccccaagctcagcgcggagcagggcgtcccggccgcggccagggctgcgcagctcctggatgcgattcgtcctacgctcataaatcaaacgctttctatgaatgagaatgtcatcaaagagatcaattgcaggaacacatgcacaaataaaaatcctcttacgttatttgccggggatccccgtccgaaagcattaagttagaaggcgtttagtcataatcatttttattgctcttnttaaacaacagcttggctgagccgcggatgccatgaaca

SEQ ID NO: 69571 - DNA, 1194 bp, Homo Sapiens
  misc_feature (559)..(559): n is a, c, g, or t
gcggccgcccttctccgcttactgttcccggctccccgcaggccgggtgctcgcagccgggctggctatgcctcgcctggcagcccagagcgccgctccctgggaacagcacacaaaggcagcctcccctggcctctagcccttaggcttctgtagctcagttctttccccacacccctcccccaagaaattctgggggccgttccaccgagtaggagatccttggccctctaggcaagtaggtcagcgccccaagactggagctggtctctttcaacgccttgggagactgggtgaaaggcgagcttggttacgcttaaaatgatcgcctacaagcggttctcttggctcaaaacgcctctttcagggctcttatgctagaaaggaaaggaataaggaggagataaaatgacgccgaggccctgaactgttcatggcatccgcggctcagccaagctgttgtttaaaaagagcaataaaaatgaattatgactaaacgccttctaacttaatgtttcggacggggatccccggcaaataacgtaagaggatttttatntgtgcatgtgttcctgcaattgatctctttgatgacattctcattcatagaaagcgtttgatttatgagcgtaggacgaatcgcatccaggagctgcgcacccctggccgcggccggcacgccctgctccgcgctgagcttggggccagaaaccagccatagtccccacactccgccgccgcagctaagatttagcggaggaaggggcgagggaaggtagggagcaaacctatgaagaaacatcgcgttgtcattggaacttccaagcctttgctgttaagagccaggttcttaaatcaacccgccccacacacatgttgcttacatgctgcgttttctcacggtaagtaagtaggcatcagaagagagctcagaaagggaaaaataaacatggggagacctaacaagggaggggggaaaagcaacaacccagtgacacaccctagatcacattttattgatatttcatttaaagtgcttttctctctctctagaacctgcgttaatttataacctagggtgtagaaacacaccattttaaatctcaacttgctaacctgacttcgaagcattaacgatctattattagcaatgtaaacaggtttaagaatgaaatattgatttttctgaccctg

SEQ ID NO: 69572 - DNA, 1854 bp, Homo Sapiens
ggagtgagaatcctttaataactatatttatttccagagaacaataaatacagaaattgcaagcagtatatgtaacagtaatattttctttaaatacagaatcacctacttttatacaacttaacaggcaaacatgttattttgttgttgttgtttggaaattagcattgggaaaagctatataacagaggaaattccaagtaaaatcaaacagtgttcactcttaactctaaacacagtgctcccactactggttctgcattgaggcggaggggaaggccagaggcaggcttagcttcgggcggcagcggtctggggctgctcggactggagctgcttgccaaggtattcccagttgtgcaccatgagcttctgcacggcatgtggttcatgaccagctgcttcccaccgagctgctcgatgacccgtttgcctcgtggataatgccgcacatattctccaacatcgtgagcagcaacagctaagacttggggattcatctgacacttccaaaaagtttgtcaaagattttcaagagtttcataattcttctcatttaacctcacaggcattctctcttccaaaatttcctcagatttgtgcacaggacttccattccaacccttccagatttaagttctgaactgtattcatcaaatgaactaaggtcctggacactctctccaagttttttccaaaagaaatttgatatcttcgctgatattcttcatcatcgtacttctgctgttccaagttctccaactgtttcagaactttgcactgaatcatagccagggcatattcttggcgagtttctctttcagttgatttctctaaaaagttacggaaatgctgcaagaatgattcttgttactttctctttgacagactcctgaaggatatcagacagaactggaatgatattatagcgccgcaggtgttcacacatttgaggactgaatgccaggagccatattgaaaaaatcatttgatactggagctgaaagccacacttgttactcaacactcccattatgcaatttaccccatctgcttccacccaagcaaagcggtactcattgacccggagcatcagctgcaaacacccggccacgcactgcacatactgcgaactatcacttgaagagactgttcctgtttcaacagcaacaccgctaccacgcagtttctgtgaactcagctgagtttttatccaattgaaatagtaatttaagtcactgccttccatcagttcttttccccaagctgctaacttggcaataattcttgctgccatatgaacagtgaagggatcctggcgattcaacattggcagaaagtagggccacgcagtgttcttgctacatcttgcatagtcaaagaaaatgctaacacgctgatgattttcctgcagcatatcatccaccatagttagtatatactgaacggtctgttctttgcagatatgagtcatcagatttataaatgttttagcacactggctgccttcagtttgaagcatctcttgcttctcttcagggcttcgtttcatttcaaacctctgaataaactcacaatcttcagcagaaatcatctgtccctgaagataggattgccagttgactttgtttgcacgaacttctgcagccttggcagcaataatattggtggggacagcagcatccacagcacctcggatatccattttggtcatctaaacttcgtaatcttgaatgtctttcaacaaatctggttgaggcctggaagaaaagcaatctggcaaccgggggccgaagaacaggagaggaccaagcagcgagacaccagcacgcaccacgcaagctggagaaaact

SEQ ID NO: 69573 - DNA, 730 bp, Homo Sapiens
ggcacacctgaagagagtgtccaggaccttagttcatttgatgaatacagttcagaacttaaatctggaaggttggaatggagtcctgtgcacaaatctgagaaattttggagagagaatgctgtgaggttaaatgagaagaattatgaactcttgaaaatcttgacaaaacttttggaagtgtcagatgatccccaagtcttagctgttgctgctcacgatgttggagaatatgtgcggcattatccacgaggcaaacgggtcatcgagcagctcggtgggaagcagctggtcatgaaccacatgcatcatgaagaccagcaggtccgctataatgctctgctggccgtgcagaagctcatggtgcacaactgggaataccttggcaagcagctccagtccgagcagccccagaccgctgccgcccgaagctaagcctgcctctggccttcccctccgcctcaatgcagaaccagtagtgggagcactgtgtttagagttaagagtgaacactgtttgattttacttggaatttcctctgttatatagcttttcccaatgctaatttccaaacaacaacaacaaaataacatgtttgcctgttaagttgtataaaagtaggtgattctgtatttaaagaaaatattactgttacatatactgcttgcaatttctgtatttattgttctctggaaataaatatagttattaaaggattctcactccaaaa

SEQ ID NO: 69574 - DNA, 448 bp, Homo Sapiens
  misc_feature (1)..(1): n is a, c, g, or t
nggtaacatagataacaaacagagctaatatcctcatatactgtattagcctgttttcacactgctttcaagaacttccctgagactgggtaatttataaacaaaagaggtttaattgattcacagtctgtagggctggggaggcctcgggaaacttacaatcatggcgaaaggggaagcaaacatgctcttcttcacaaggtggcaggagagagagaagagaaagtaaagtggggaagagccccaaataaaaccaccaggtctcgtgagaactcactcattatcataagaacagcatgggggaaccgccccccgtgatccaatcacctccctccctcaacatgtgggatcacaattcgagatgagatttgaatgagggcacacagccaaaccataccacatacaaagcattcctacaaataaataaaaaggaccaccaacctatcag

SEQ ID NO: 69575 - DNA, 687 bp, Homo Sapiens
gataactagaacttctagaacatcttgtttacagttagccagaaactatacaagtggtttaacatgcattatcttactcaatccatacaaaagtcttatggaggtgttagcactctttctactgatgaagaactgaggtacttcataaaaccacttacccaaggtgtcttgagtctggtacaactggcattcaaatctaggtcagtctgcccccagagccactacccttacccctcactgaatctgcctttatattgttgagcccatgaccccaaactgctctttccaatttgaacttccagggattttattgtgaacttacatagcaacattaaaatgaagttgaattgtttttaatggcaacgccgtctgtctcctctagcttaccgcttctcacctttcaaccccatctgtggcctttgtccaggcccacagcttagccatggcttccctcctgcatccctgccgtgggttgctggcctcacacttgcagcagctggacagtgattttagaaggccaccagtccccatagctatgtgacaatgagaagcaaacttttttgtgacagattgtattggcataggcatgatagatggggattggtacgttttgaatcagcatttgcaaaaaaattgtcttgaattttaaaataaacaacaaagatttgttcattgagtgcaaaaaaa

SEQ ID NO: 69576 - DNA, 889 bp, Homo Sapiens
ggctgtgagaccttgcgccctggggagaaggccccgtaaagcagagagcaacacctccagtctcccaaggaatgcaggacctctgccagtgatgtggacgctgacaacaactgcctaggcactgaggtagcttaaactctaggcacaggccggggctgcggtgcaggcacctggccatgctggctgggcggcccaagcacagccctgactaggatgacagcagcacaaaagaccacctttctcccctgagaggagcttctgctactctgcatcactgatgacactcagcagggtgatgcacagcagtctgcctcccctatgggactcccttctaccaagcacatgagctctctaacagggtgggggctacccccagacctgctcctacactgatattgaagaacctggagaggatccttcagttctggccattccagggaccctccagaaacacagtgtttcaagagaccctaaaaaacctgcctgtcccaggaccctatggtaatgaacaccaaacatctaaacaatcatatgctaacatgccactcctggaaactccactctgaagctgccgctttggacaccaacactcccttctcccagggtcatgcagggatctgctccctcctgcttcccttaccagtcgtgcaccgctgactcccaggaagtctttcctgaagtctgaccacctttcttcttgcttcagttggggcagactctgatcccttctgccctggcagaatggcaggggtaatctgagccttcttcactcctttaccctagctgaccccttcacctctccccctcccttttcctttgttttgggattcagaaaactgcttgtcagagactgtttattttttattaaaaatataaggcttatgtatga

SEQ ID NO: 69577 - DNA, 431 bp, Homo Sapiens
aattatctgggcatagtgtcacatgcctgtagccaagatattctgaaagctgagatgggaagatggcttgagcccagaaattcaagaatgtagtgagctatagttgcaccactgctctccaacctggacaacagcaagaccatgtctcattcaaacaaaaaaattctaggcagagaagggaccacacattcaaaagacaaaaccctccaagaaatcattctaaaaaatccccatgaattaaaagacagattttcagactgagctgattcaagagtaaaacaaaacaaaaataagatacacaacataaagatgggcatggtgtcacatgagtgtagtccacattacttgagtgacatagggggaaagataacttgaaaccaggaattcacaagtctgtgcaacatagcaggagtctctttaaaaatgaaaaa

SEQ ID NO: 69578 - DNA, 1473 bp, Homo Sapiens
  misc_feature (40)..(40): n is a, c, g, or t
  misc_feature (684)..(782): n is a, c, g, or t
attcggcacgaggatcaaagtttctagagttgtgagaaanccagagagtggctctcctgattcttcactctgaggtgcgttcttcatgttctcccagctgttccaagactgggccgtagaattccatgtttcaggagcctaagaccctcccagagcccaggggcttcaccgcagaccccaagccattgagcacatcacccaaagcagtggccaacatcgcggacccctgtgccttgtcacagatgggtgctggtcctcaggcgttggggacactgctgggtcgatggggtcggattctgccagtttctgctctgcagccaaagatggtcagaagcattgtcacttcagtaacatcaagtgctcaaagacatggcaaccgttcagtggtacttaagtattcaaaatatacaactacagattctctgacagaaaccagcacggggtcttcaccttcattcaccccacaggcgacatgcgagggagaacagcatctcagtggtgatttccaaaccaagcctttgttttcggtgtggggttttgggggtttgctttaatgtttttgaaattgtaaatgttgggctttgtattttgatgtaaactgagcataatggcattttagggcctgtgaccaaaaatgaagcttgtaacgaccatggatctgaataaacatgtccttgcttctgnnnnnnnnnnnnnnnnnnnnnnnnnnnnnnnnnnnnnnnnnnnnnnnnnnnnnnnnnnnnnnnnnnnnnnnnnnnnnnnnnnnnnnnnnnnnnnnnnnncaagggggcgcgcacttcgaccactagctaccactgagcgaggcgaccgaatataccgcgagccgccgcctctgattttgaacagaaagacgggtccggcacttgattgaggagtcgcctaattgtacatatccaaaagcagtcgagagacccagtcgtactacttgtaaactagaaatttcgattctgaggatggcaaatacagcaacttgtagttatcacggtatagatactaattattagaatcaaaacacacaacaataataatggaatagaaggaacgggaacgatagaacacaatgtaaacgggcagacaagaacactcatacccacctacgaacagacaccacaaaaacaaatcaaccgcacaccagacggctaagacgcggccgacatacgacaggaaccacaacgacacacagtcaaacactggaacagcaaactgacgagttgtgaagcggaaggagtgcagttaagggagccacacaacacggcaaagacagattaaccttaacagatgagacgagacagcgcagagcggagaagccacaagaaagtagactaacggcacgcgcccgccacgccaagtcactacgtaaactaaagagataaggacaagataaaacaaaaaacatccagactggccgagcgcgtgagaccggaagcttgagtagtaaaacacagagagagg

SEQ ID NO: 69579 - DNA, 2288 bp, Homo Sapiens
  misc_feature (1514)..(1514): n is a, c, g, or t
cccccgaggaaattcattcccgggaacccccggagcccgccatttgtccctgccaaatctggggttgaatgccagacccccacccttaagagggggcgggccaaagctgggcgatctcatagctccggaaggggctgcagctcccgggtccccctggtactcaatttcaacccttgcagccccattgatgttctggtaccgcccccaggggcgtaaggatgagtccgtcctcacccccgatgcagtcggggagttgcttttttccattctcatctggggtggtgcccaaggcgagtgtgaactgcctgagctgcgcttcgctgagccggaatatctggcgcaggtactccaggggccttctccaggtattcatctgtcttccggacactgtcttgccccatctcgtccaggtcgttggctgtgtaggagccattggtgtccatggagctaaagcccagccatgagaggaaggagtggccagccgggctctccgcacactggtcggagatggacttggctgtgtgtttggcctgtgtgatgagctgagcgaggcgcaggaccagggtgcgggcctcgggcccaaacatcggggtgtacttgcagtcctggccctccaggctgtagacgtggctcttcaccttgaaggaggcatcagtgaccgctggtggccagggtgacaggaagctcccagtgaatgtgggggccgtgaagagtcggtgctggcggtgggggatgaccagctctggctccaggaatagctgctcacctttctgaatcatctcagccaggttgggctgggcaaagactttggccactcggaacaccatgagcgcgtgcttggggctgaccaggtctgtgcggagcgcgcggttcagaaagcccacaaacaacttggtgtacatcagcaggttctcctggacaaagggtgcccatttctccgacacacaccggggctgggagtcgctgcccggagcctgcttgtcaggcgcgtaccgccacggctgcaggtagctcagccacatctccaggacagctctgaacgatgcgtccaggggccagtggccaaagcaatgctgcaagaagaggtagagtttctgctggacgaacctcgggacagcagcccgtttgaactcctccagggggctggtggcgtgggagtgggcggagggtgaggcctgctctggcttcaggctgttggcaaaggcgtgcaggtgcttcagcagcaggcgcaccaccaacacatgctcctcagtaggcgtgaacgactcttggtaggcgtggagggcctggaggctgggttgggccgggcctgtagagggcgctgggagaccactgagtccggtagtgcagaacctccagctttggcatgaggggactgcattttttgatacatctccaagggaatagtgatgaagccacatttcaacaaaaacctggagcagagtttctgacctccagatctcgtggaaggcggggtctgcattcacagacgtctgatgagagatgtgtcgctntaggaggctagtgtggtggaggccataggaagcaaagggtatggctggtgtcctgggaggtggtgaggggctggtcccccctgggctggaggagagtggtgggggcacactgccttcggtgggcaggaaccatgacaggtacctgtccaccaggatgaaataggcacagtctgaagtacggacgtggagggacacaggaagtggcttctgagtgatgaggctcaaggcaaagaagaatatgtaatactcgaacggattcagggccaagttcagaccaaggcccccagtaggggtgaactggaccttgttgtggtacagaggactgtcagggaggatgcactcctggatggacgccttcacaggaccaggcaagtaggagacaggaaagtcgaacttatagtcttcagcttgaagcttataaaccaacttcatcattgggccaccagggtcgagaaattccatcacgatgctgtactccacaggattcacgcgcccctgtaagcagcggaggttccagccaacaaggacaccatctaggctgccaaaaatgctttctaccagccatgggaagatggtgtgcagctcctttgctggaaagtcctcaatgactttaaccaagtcttggcactgctgtgcaaagggcttatttatagagtcagctttcaggctagccagtagaaagctgggctgctgcaggtgagggaacgccatagcagcctccagtggagagttgaaaatggccttcttatgcaaaccactgtgggatccattaca

SEQ ID NO: 69580 - DNA, 2303 bp, Homo Sapiens
agcgaggcctgggtggcgaattcggcacgaggcagaaaggtgagcagctattcctggagccagagctggtcatcccccaccgccagcaccgactcttcacggcccccacattcactgggagcttcctgtcaccctggccaccagcggtcactgatgcctccttcaaggtgaagagccacgtctacagcctggagggccaggactgcaagtacaccccgatgtttgggcccgaggcccgcaccctggtcctgcgcctcgctcagctcatcacacaggccaaacacacagccaagtccatctccgaccagtgtgcggagagcccggctggccactccttcctctcatggctgggctttagctccatggacaccaatggctcctacacagccaacgacctggacgagatggggcaagacagtgtccggaagacagatgaatacctggagaaggccctggagtacctgcgccagatattccggctcagcgaagcgcagctcaggcagttcacactcgccttgggcaccacccaggatgagaatggaaaaaagcaactccccgactgcatcgtgggtgaggacggactcatccttacgcccctggggcggtaccagatcatcaatgggctgcgaaggtttgaaattgagtaccagggggacccggagctgcagcccatccggagctatgagatcgccagcttggtccgcacactctttaggctgtcgtctgccatcaaccacagatttgcaggacagatggcggctctgtgttcccgggatgacttcctcggcagcttctgtcgctaccacctcacagaacctgggctggccagcaggcacctgctgagccctgtggggcggaggcaggtggccggccacacccgcggccccaggctcagcctgcgcttcctgggcagttaccggacgctggtctcgctgctgctggccttcttcgtggcctctctgttctgcgtcgggcccctcccatgcacgctgctgctcaccctgggctatgtcctctacgcctctgccatgacactgctgaccgagcgggggaagctgcaccagccctgaaggtgtcagctgccttcagagcaggctggagggatttgccacacagccccacccttgggctgagaggacctgggaagcccctccaggagggaacacggtcatcctcgggcttctggagcggggttcctgcagccgcagaggcatctggaggaaacgcaaccaagaaaggaaggcaggtgggccccagcaaaggagtagctgccagggctcaacagctacgctctgtgacagcgcagagctcagcgccggcctttccctccctccgccaaggactcacggccaagccagctctcggggcctttttttccagtgcccatttggctactctgctgcaccaagcttgggagccagcctgccaacagccacctgggcctggcctccccactggctggccttgaggttggcagagtgggttgtggcgcttcctctctctgtgtgggaccaggacagtggcttaagtctccactccaggaaagaatcaaagtttctagagttgtgagaaaaccagagagtggctgtcctgattcttcactgtgaggggcgttcttcatgttctcccagctgttccaagactgggccgtagaattccatgtttcaggagcctaagaccctcccagagcccaggggcttcaccgcagaccccaagccattgagcacatcacccaaagcagtggccaacatcgcggacccctgtgccttgtcacagatgggtgctggtcctcaggcgttggggacactgctgggtcgatggggtcggattctgccagtttctgctctgcagccaaagatggtcagaagcattgtcacttcagtaacatcaagtgctcaaagacatggcaaccgttcagtggtacttaagtattcaaaatatacaactacagattctctgacagaaaccagcacggggtcttcaccttcattcaccccacaggcgacatgcgagggagaacagcatctcagtggtgatttccaaaccaagcccttgttttcggatgtggggataaggggggtagccttaactgtttttgcaattgtcaatgttgggcctcttcatttcgatgttaactggagaataattgggcttttaggcgccctgtgcccaaaatgaagcttgtaacgatcatggattctgaataaccatgtccttgccttctggaacaaaaacacatcaccaacaaaaacaccaatatgaatctaacacctacaaacgcgggggcgcccaataaaataccc

SEQ ID NO: 69581 - DNA, 1076 bp, Homo Sapiens
  misc_feature (55)..(55): n is a, c, g, or t
  misc_feature (61)..(61): n is a, c, g, or t
  misc_feature (64)..(64): n is a, c, g, or t
  misc_feature (161)..(161): n is a, c, g, or t
  misc_feature (177)..(177): n is a, c, g, or t
  misc_feature (190)..(190): n is a, c, g, or t
  misc_feature (225)..(225): n is a, c, g, or t
  misc_feature (250)..(250): n is a, c, g, or t
  misc_feature (260)..(260): n is a, c, g, or t
  misc_feature (988)..(1005): n is a, c, g, or t
cctcgagccagaatcgcacgagctgtcacgccaggagcacatgcgcgccacacanggcccntgnccagcccaggcaggaggtagctccaaccggtgccgttccccgggtggcggggcttcagcagagcgcccacccctacgcccaccgtcatcgcccgggntgcgcgcagccctcgnccaatagcaagcntgtgagaagttggggtccccccagcggggctgctntgcccccacaagtaagcacagtgcnccggactccntgaaagccaaattcagtgctcagcctcagggccacctcctgcaaaggccgaagggggcgctcctcctatacctccccgcgagcccccctcgaaggcagcccaggagctgaggactctggccacctgtgctgcggggtccaggggcgacgcggccttgcaggcccagcccggcgtggctggggcgccccccgtcctacactccatcaaacaggagccggtggccgaggggcatgagaagcgcctggacatcctcaacatctttaagacgtacattccaaaggactttgcgaccctctaccagggatggggtgtcagcggccctgggttggagcacagagggacactccggacgcaggcccggccaggagagttcgtctgcatcgagtgcggaaagagcttccaccagcccggccacctcagggcccacatgcgggcacactcaggggagagaccattctaacacaggtaccgtccagacagtgcctctgagaaagggaatctaaaggcgtgtttccgacgcaccccaggtccccgtaacggccattagcagtaccctcacgatgtcccagcagcctcccacctgtgacctggccgctccatggaagaacagccggggaactcctgagcagacacctcacatcccgagccgctgcgctggagtggaaactgaaggcagatgcctctccttgttaaacgttcagaaataaatgaagatgctatattctagnnnnnnnnnnnnnnnnnngcctacagccgcggccgcaagcttattccctttagtgaggttaattgagaatggcactggccgtcgttaaa

SEQ ID NO: 69582 - DNA, 988 bp, Homo Sapiens
gggaactactcgacccacagagccgatcgcggagcggattctgcttttaggagtacccgccaacaagcgggaccgagcaggaatccgtatctgggaacagaatgaacggagaccagaattcagatgtttatgcccaagaaaagcaggatttcgttcagcacttctcccagatcgttagggtgctgactgaggatgagatggggcacccagagataggagatgctattgcccggctcaaggaggtcctggagtacaatgccattggaggcaagtataaccggggtttgacggtggtagtagcattccgggagctggtggagccaaggaaacaggatgctgatagtctccagcgggcctggactgtgggctggtgtgtggaactgctgcaagctttcttcctggtggcagatgacatcatggattcatcccttacccgccggggacagatctgctggtatcagaagccgggcgtgggtttggatgccatcaatgatgctaacctcctggaagcatgtatctaccgcctgctgaagctctattgccgggagcagccctattacctgaacctgatcgagctcttcctgcagagttcctatcagactgagattgggcagaccctggacctcctcacagccccccagggcaatgtgggatcttgtcagattcactgaaaaagaggtaaaaatctattgtcaagtacaagacagctttctactccttctaccttcctatagctgcagccatgtacatggcaaggaattgatggcgagaaaggagcacgccaatggcaagaagatcctgctggaagatggggggagttctttccgaattcaggatgattacccttggacctctttggggggaccccagggggacccgcgcaaaattgggccctggactttccgggaacaacaaatgcacccttgggcttggggggtttaaaggggtcgggcaaaagggggcccacctctccaagaaaagttacccc

SEQ ID NO: 69583 - DNA, 836 bp, Homo Sapiens
  misc_feature (34)..(34): n is a, c, g, or t
tttcccttggccaatgttaacatggctggccagnctattaggaaggggtagaaagggagtagaaaagctgttccttgtactttgaccaatagattttgtacctcttttccagtgaatctgacaagatcccacattgccctggggggctgtgaggaggtccagggtctgcccaatctcagtctgataggaactctgcaggaagagctcgatcaggttcaggtaatagggctgctcccggcaatagagcttcagcaggcggtagatacatgcttccaggaggttagcatcattgatggcatccaaacccacgcccggcttctgataccagcagatctgtccccggcgggtaagggatgaatccatgatgtcatctgccaccaggaagaaagcttgcagcagttccacacaccagcccacagtccaggcccgctggagactatcagcatcctgtttccttggctccaccagctcccggaatgctactaccaccgtcaaaccccggttatacttgcctccaatggcattgtactccaggacctccttgagccgggcaatagcatctcctatctctgggtgccccatctcatcctcagtcagcaccctaacgatctgggagaagtgctgaacgaaatcctgcttttcttgggcataaacatctgaattctggtctccgttcattctgagggaggagcaaagggctctgttcccagatacggattcctgctcaggtcccgcttgttggcgggtactcctaaaagcagaatccgctccgcgatcggctctgtgggtcgagcctcgtgccgaattcaacacccaggcctcgctacctagcctta

SEQ ID NO: 69584 - DNA, 749 bp, Homo Sapiens
  misc_feature (85)..(85): n is a, c, g, or t
taagggtaggaagggagtagaaaagctggtccttgtacttgaccaatagattttgtacctcttttcagtgaatctgacaagatcncacattgcccgggggggctgtgaggaggtccagggtctgcccaatctcagtctgataggaactctgcaggaagagctcgatcaggttcaggtaatagggctgctcccggcaatagagcttcagcaggcggtagatacatgcttccaggaggttagcatcattgatggcatccaaacccacgcccggcttctgataccagcagatctgtccccggcgggtaagggatgaatccatgatgtcatctgccaccaggaagaaagcttgcagcagttccacacaccagcccacagtccaggcccgctggagactatcagcatcctgtttccttggctccaccagctcccggaatgctactaccaccgtcaaaccccggttatacttgcctccaatggcattgtactccaggacctccttgagccgggcaatagcatctcctatctctgggtgccccatctcatcctcagtcagcaccctaacgatctgggagaagtgctgaacgaaatcctgcttttcttgggcataaacatctgaattctggtctccgttcattctgttcccagatacggattcctgctcggtcccgcttgttggcgggtactcctaaaagcagaatccgctccgcgcctcgtgccgaattcacacacccaggcctcgctacctgacc

SEQ ID NO: 69585 - DNA, 928 bp, Homo Sapiens
aacgttacggctaaggtacgaggcctggtggttaatcggcacgagggctggttgagatctgtgggggtcttcctgctgccagccccctactgggcaccccgggagaggtggctgggttccctacggcggccctccctggtgcacgggtacccagtcctggcctggcacagtgcccgctgctggtgccaagcgtggacagaggaacctcgagccctttgctcctccctcagaatgaacggagaccagaattcagatgtttatgcccaagaaaagcaggatttcgttcagcacttctcccagatcgttagggtgctgactgaggatgagatggggcacccagagataggagatgctattgcccggctcaaggaggtcctggagtacaatgccattggaggcaagtataaccggggtttgacggtggtagtagcattccgggagctggtggagccaaggaaacaggatgctgatagtctccagcgggcctggactgtgggctggtgtgtggaactgctgcaagctttcttcctggtggcagatgacatcatggattcatcccttacccgccggggacagatctgctggtatcagaagccgggcgtgggtttggatgccatcaatgatgctaacctcctggaagcatgtatctaccgcctgctgaagctctattgccgggagcagccctattacctgaacctgatcgagctcttcctgcagagttcctatcagactgagattgggcagaccctggactcctcacagcccccaaggcaatgtggatctggtcagattcactgaaaagaggtcaatctatgtcagtcaagaagtctaatcttacttctatagtggcagtctggagatgtggaaagacgcatgcagaaacgcggggggggctccatcgggcctgcctggcccggcgcaggccgaa

SEQ ID NO: 69586 - DNA, 1010 bp, Homo Sapiens
  misc_feature (860)..(872): n is a, c, g, or t
aacaggtgtacaaaaagcaggctggtacgggtcggaatcccgggatatcgtcgacccacgcgtccggcgggaactactcgacccacagagccgatcgcggagcgggattctgcttttaggagtacccgccaacaagcgggaccgagcaggaatccgtatctgggaacagaatgaacggagaccagaattcagatgtttatgcccaagaaaagcaggatttcgttcagcacttctcccagatcgttagggtgctgactgaggatgagatggggcacccagagataggagatgctattgcccggctcaaggaggtcctggagtacaatgccattggaggcaagtataaccggggtttgacggtggtagtagcattccgggagctggtggagccaaggaaacaggatgctgatagtctccagcgggcctggactgtgggctggtgtgtggaactgctgcaagctttcttcctggtggcagatgacatcatggattcatcccttacccgccggggacagatctgctggtatcagaagccgggcgtgggtttggatgccatcaatgatgctaacctcctggaagcatgtatctaccgcctgctgaagctctattgccgggagcagcctattacctgaacctgatcgagctcttcctgcagagttcctatcagactgagattgggcagaccctggacctcctcacaggcccccaaggcaatgtggatcttgtcagattcactggaaaagaggtacaaatctattgtcaaagtacaagacaggtttctactccttctaacttcctatagtggaggcatgtacaatgggaggaatgatggggaaaagagacggcatgcaagaaatctnnnnnnnnnnnnntcttcgaatcggagttaactgggcttttgggagcccgtgcgggaatggggggatcgggaacaaggtggggggtgtgttggaggcccaaaacaactgggaaaggaaggggaaagaggggggtaaaaggaggggtttgaa

SEQ ID NO: 69587 - DNA, 907 bp, Homo Sapiens
ggctaggtgcgagggctgggtgtgaattcggcacgaggcgtatctgggaacagagccctttgctcctccctcagaatgaacggagaccagaattcagatgtttatgcccaagaaaagcaggatttcgttcagcacttctcccagatcgttagggtgctgactgaggatgagatggggcacccagagataggagatgctattgcccggctcaaggaggtcctggagtacaatgccattggaggcaagtataaccggggtttgacggtggtagtagcattccgggagctggtggagccaaggaaacaggatgctgatagtctccagcgggcctggactgtgggctggtgtgtggaactgctgcaagctttcttcctggtggcagatgacatcatggattcatcccttacccgccggggacagatctgctggtatcagaagccgggcgtgggtttggatgccatcaatgatgctaacctcctggaagcatgtatctaccgcctgctgaagctctattgccgggagcagccctattacctgaacctgatcgagctcttcctgcagagttcctatcagactgagattgggcagaccctggacctcctcacagcccccaggcaatgtggatcttgtcagattcactgaaaagaggtacaaatctattgtcaagtacaagacagctttctactccttctaccttcctatagctgcagccatgtacatggcaggaattgatggcgagaaggagcacgcaatgccaagaagatcctgctggagatgggggaagtctttcagattcaggatgattacttgactctttggggacccagggtgacgggaaaatgggtgcatccggaacaatgggtggtgggggtcctgtttgagggctccgaaagtcggtcctgaggaa

SEQ ID NO: 69588 - DNA, 1690 bp, Homo Sapiens
  misc_feature (1466)..(1476): n is a, c, g, or t
ggcagtaactctaacgggttttaaggtagcgaggcctgggtggcgaattcggcacgagggggaacagaatgaacggagaccagaattcagatgtttatgcccaagaaaagcaggatttcgttcagcacttctcccagatcgttagggtgctgactgaggatgagatggggcacccagagataggagatgctattgcccggctcaaggaggtcctggagtacaatgccattggaggcaagtataaccggggtttgacggtggtagtagcattccgggagctggtggagccaaggaaacaggatgctgatagtctccagcgggcctggactgtgggctggtgtgtggaactgctgcaagctttcttcctggtggcagatgacatcatggattcatcccttacccgccggggacagatctgctggtatcagaagccgggcgtgggtttggatgccatcaatgatgctaacctcctggaagcatgtatctaccgcctgctgaagctctattgccgggagcagccctattacctgaacctgatcgagctcttcctgcagagttcctatcagactgagattgggcagaccctggacctcctcacagccccccagggcaatgtggatcttgtcagattcactgaaaagaggtacaaatctattgtcaagtacaagacagctttctactccttctaccttcctatagctgcagccatgtacatggcaggaattgatggcgagaaggagcacgccaatgccaagaagatcctgctggagatgggggagttctttcagattcaggatgattaccttgacctctttggggaccccagtgtgaccggcaaaattggcactgacatccaggacaacaaatgcagctggctggtggttcagtgtctgcaacgggccactccagaacagtaccagatcctgaaggaaaattacgggcagaaggaggctgagaaagtggcccgggtgaaggcgctatatgaggagctggatctgccagcagtgttcttgcaatatgaggaagacagttacagccacattatggctctcattgaacagtacgcagcacccctgcccccagccgtctttctggggcttgcgcgcaaaatctacaagcggagaaagtgacctagagattgcaagggcggggagaggaggctctcaataaataatcgtgtaaccttaaaaaaaacacatataccgaaccgccgcaagtgcaaaaacctctaaaaagcccacgtaaacaatagtacaaaagaccccataaaaagggggggccgcctctaaaataatccccccagggggccaagttttacgggtccccattttttttgtgaaaagggggcccccataaggggggccggttttataaacatgggccggggccccccttttttacaaccctcggggtggggaaaaacgtgctacctggggaactcttggggaaaggaacacttttttttnnnnnnnnnnnactaattgggggcgcagtccccccccgggagatttttgccccctctcggggaactaaaaacatttttttcgcccggtaaactgctggtggaacacaaccctacgaaaccccctgtcggcgccgcacaaaattcttgtgcccgcgggggactagtgtttctttcaacgctctagcgacgcgggggggtgttgggcgtaccataacgagagacggg

SEQ ID NO: 69589 - DNA, 819 bp, Homo Sapiens
  misc_feature (19)..(19): n is a, c, g, or t
tgccgaattcggcagaggntccctcccgcgggcacattgggagttgtagtctaattatatatttccgcccttagcgtggggagagcgggaactactcgacccacagagccgatcgcggagcgaattctgcttttaggagtacccgccaacaagcgggaccgagcaggaatccgtatctgggaacagagccctttgctcctccctcagaatgaacggagaccagaattcagatgtttatgcccaagaaaagcaggatttcgttcagcacttctcccagatcgttagggtgctgactgaggatgagatggggcacccagagataggagatgctattgcccggctcaaggaggtcctggagtacaatgccattggaggcaagtataaccggggtttgacggtggtaagtaagcattccgggaagctggtggagccaaggaaacaggatgctgatagtctccagcgggcctggactgtgggctggtgtgtggaactgctgcaagctttcttcctggtggcagatgacatcatggattcatcccttacccgccggggacagatctgctggtatcagaagccgggcgtggggtttggatgccatcaatgatgctaacctcctggaagcatgtatctaccgcctgctgaagctctattgccgggagcagccctattacctgaacctgatcgagctccttcctgcagaagttcctatcagactgaagattggggcagaaccctggaacctcccttacagccccccccaggggcaaatggtgggattctttgtccaggaattccccttggaaaaagaaggggacccaa

SEQ ID NO: 69590 - DNA, 1019 bp, Homo Sapiens
  misc_feature (900)..(900): n is a, c, g, or t
  misc_feature (921)..(921): n is a, c, g, or t
cagtaactataacggttcctaaggtagcgaggcctgggtggcgaattcggcacgaggggaactactcgacccacagagccgatcgcggagcggattctgcttttaggagtacccgccaacaagcgggaccgagcaggaatccgtatctgggaacagagccctttgctcctccctcagaatgaacggagaccagaattcagatgtttatgcccaagaaaagcaggatttcgttcagcacttctcccagatcgttagggtgctgactgaggatgagatggggcacccagagataggagatgctattgcccggctcaaggaggtcctggagtacaatgccattggaggcaagtataaccggggtttgacggtggtagtagcattccgggagctggtggagccaaggaaacaggatgctgatagtctccagcgggcctggactgtgggctggtgtgtggaactgctgcaagctttcttcctggtggcagatgacatcatggattcatcccttacccgccggggacagatctgctggtatcagaagccgggcgtgggtttggatgccatcaatgatgctaacctcctggaagcatgtatctaccgcctgctgaagctctattgccgggagcagccctattacctgaacctgatcgagctcttcctgcagagttcctatcagactgagattgggcagaccctggacctcctcacagccccccagggcaatgtggatcttgtcagattcactgaaaagaggtacaaatctattgtcaagtacaagacagctttctactccttctaccttcctatagctgcagccatgtacatgggcaggaattgatggcgagaaggagcacgccaatgccaagaagatcctgctggaagatggggggagttcttttncagattcaggatgattacctnttgacctctttgggggaccccagttgtgaccgggcaaaattggcactgacatcccaggacaacaaatgccaccttgggctgggggggttccaggggcc

SEQ ID NO: 69591 - DNA, 965 bp, Homo Sapiens
  misc_feature (471)..(471): n is a, c, g, or t
  misc_feature (931)..(931): n is a, c, g, or t
aaggtagcgaggcctgggtggcgaattcggcacgaggacagaatgaacggagaccagcattcagatgtttatgcccaagaaaagcaggatttcgttcagcacttctcccagatcgttagggtgctgactgaggatgagatggggcacccagagataggagatgctattgcccggctcaaggaggtcctggagtacaatgccattggagatgacatcatggattcatcccttacccgccggggacagatctgctggtatcagaagccgggcgtgggtttggatgccatcaatgatgctaacctcctggaagcatgtatctaccgcctgctgaagctctattgccgggagcagccctattacctgaacctgatcgagctcttcctgcagagttcctatcagactgagattgggcagaccctggacctcctcacagccccccagcgaaattgtggatcttgtcagattcactgnaaaagaggtacaaatctattgtcaagtacaagacagctttctactccttctaccttcctataagctgcagccatgtacatggaaggaattgatggcgagaaggagcacgccaatgccaagaagatcctgctggagatgggggaattctttcaagattcaggatgattaccttgacctccttggggaccccagtgtgaaccggaaaaattggcacttgacatccagggacaacaaatgcagctggctggtggttcagtgtctgcaacgggccactccagaacagtaccagatcctgaaggaaaattacgggcagaaggaggctgagaaagtggcccgggtggaagcgctatatgaggagctggatctgccagcagtgttcttgccatatgaggaagacagttacagccacattatggctctcaatggacaggaacgcagcacccccggccccccagccctntttttctggggcttgcgccgccaaatctaacaga

SEQ ID NO: 69592 - DNA, 816 bp, Homo Sapiens
gcatattcaatacacacagtcctgtatcaccctttctccaattacacaggacagagaagcccttttcgtgtgccacgtaccacaaccccacttccgcaacacccttcctcgcttttctgtcccttccaggcacgctgcaatcctgtaccctgaaaccaagctagatgagcatgtcctatagaggccaaggctaccatgggcaccctctgggcatcgggccctgtctgcaatacacctgcaggaagagctcgatcaggttcaggtaatagggctgctcccggcaatagagcttcagcaggcggtagatacatgcttccaggaggttagcatcattgatggcatccagacccacgcccggcttctgataccagcagatctgtccccggcgggtaagggatgaatccatgatgtcatctgccaccaggaagaaagcttgcagcagttccacacaccagcccacagtccaggcccgctggagactatcagcatcctgtttccttggctccaccagctcccggaatgctactaccaccgtcaaaccccggttatacttgcctccaatggcattgtactccaggacctccttgagccgggcaatagcatctcctatctctgggtgccccatctcatcctcagtcagcaccctaacgatctgggagaagtgctgaacgaaatcctgcttttcttgggcataaacatctgaattctggtctccgttcattctgagggaggagccaagggctctgttcccagatacggattcctgctcggtcccgcttgttggcgggtactcctaaaagcagaatcccctccgcg

SEQ ID NO: 69593 - DNA, 809 bp, Homo Sapiens
gtgggcctgccaagcttattagggaaagggtaggaaaggggagttaggaaaaggccgtttcttggtaccttgaccaaaataagatttggttaccttcttttcccaggggaatttggaccaagattcccacatttgcccctgggggggccggtgaggaaggtcccagggtcctggcccaatctccagtctgataggaactctgcaggaagagctcgatcaggtttcaggtaataggggctgctcccggcaatagagcttcagcaggcggtagatacatgcttccaggaggttagcatcattgatggcatccaaacccacgcccggcttctgataccagcagatctgtccccggcgggtaagggatgaatccatgatgtcatctgccaccaggaagaaagcttgcagcagttccacacacccagcccaccagtccaggccccgctggagactatcagcatcctgtttccttggctccaccagctcccggaatgctactaccaccgtcaaaccccggttatacttgcctccaatggcattgtactccaggacctccttgagccgggcaatagcatctcctatctctgggtgccccatctcatcctcagtcagcaccctaacgatctgggagaagtgctgaacgaaatcctgcttttcttgggcataaacatctgaattctggtctccgttcattctgttcccagatacggattcctgctcggtcccgcttgttggcgggtactcctaaaagcagaatccgctccgcgatcggctctgtgggtcgagtagttcccgctctccccacactcccc

SEQ ID NO: 69594 - DNA, 595 bp, Homo Sapiens
gattacttttaaaactcaatacaattagaagtaattacaaatatacagctacagaacacttggcagggtgactatcttacagtacactgctactttggtggccccaaatgaaccaggcttcccaatatttgcacctttaggagttctcttctcttgagtctgattgggcctgtaacttgctttaatcaatagtagaatgcgttggaagtgatgttatgccagtttgggactatgccttaagaaggcctgatagcttctgtttttgcattcgggggaagccagctgctgtgttagaagtttgacttctcagacttactgcctgtgaaaagcccaaccaaccatgtgaagaagaactgaggtttgggccaacagcctcagttgaactcccagccagcagtcaacaccaacttttgccagccacgtgaagaaggccatttaaaaagtggattctccagcccactggagccacctcaggtgactgcgtgtggagcaaagaaaggctatttgagcccacattgcaaaattacaagcaaataaataaaattattgtagttttaagccactaagttgtttaataatagatagctaaaatgta

SEQ ID NO: 69595 - DNA, 677 bp, Homo Sapiens
agtgcctgtggcaagaccaacctggctatgatgcggcctgcactgccaggctggaaagtggagtgtgtgggggatgatattgcttggatgaggtttgacagtgaaggtcgactccgggccatcaaccctgagaacggcttctttggggttgcccctggtacctctgccaccaccaatcccaacgccatggctacaatccagagtaacactatttttaccaatgtggctgagaccagtgatggtggcgtgtactgggagggcattgaccagcctcttccacctggtgttactgtgacctcctggctgggcaaaccctggaaacctggtatgtgcggtggggaaggtgtggcacagcctccaggcctcagcaccttaatggtggaaaagctttctccacaacctccaaccatcttctaggactgccaggaggcacagaagtcatgaacgtttgcagtttccagtcccaggcaaaatctcagttcatgtcccaactccaccagtcactggttttgtgatctggctaagttgctcaacttccctaagctttagtttccacatcagttgaatgagggtagttgtgatagtacctatctcatgagattgttggaggattaaatagtgcataaaaagggtttagcacactgacaaatacacagtaaattctcaatacccaaaaa

SEQ ID NO: 69596 - DNA, 2446 bp, Homo Sapiens
  misc_feature (1171)..(1171): n is a, c, g, or t
  misc_feature (2214)..(2315): n is a, c, g, or t
  misc_feature (2324)..(2336): n is a, c, g, or t
tatgctaggtagaggctcggggtcaattcggcacgagggcgctcctccttccccgccttccatacctccccggctccgctcggttcctggccaccccgcagcccctgcccaggtgccatggccgcattgtaccgccctggcctgcggcttaactggcatgggctgagccccttgggctggccatcatgccgtagcatccagaccctgcgagtgcttagtggagatctgggccagcttcccactggcattcgagattttgtagagcacagtgcccgcctgtgccaaccagagggcatccacatctgtgatggaactgaggctgagaatactgccacactgaccctgctggagcagcagggcctcatccgaaagctccccaagtacaataactgctggctggcccgcacagaccccaaggatgtggcacgagtagagagcaagacggtgattgtaactccttctcagcgggacacggtaccactcccgcctggtggggcccgtgggcagctgggcaactggatgtccccagctgatttccagcgagctgtggatgagaggtttccaggctgcatgcagggccgcaccatgtatgtgcttccattcagcatgggtcctgtgggctccccgctgtcccgcatcggggtgcagctcactgactcagcctatgtggtggcaagcatgcgtattatgacccgactggggacacctgtgcttcaggccctgggagatggtgactttgtcaagtgtctgcactccgtgggccagcccctgacaggacaaggggagccagtgagccagtggccgtgcaacccagagaaaaccctgattggccacgtgcccggaaccagcggggagatcatctccttcggcagcgggctatgggtggcaactccctgctgggcaagaagtgctttgccctacgcatcgccctctcggctggcccgggatgagggctggctggcagagcacatgctgatcctgggcatcaccagccctgcagggaagaagcgctatgtggcagccgccttccctagtgcctgtggcaagaccaacctggctatgatgcggcctgcactgccaggctggaaagtggagtgtggtgggggatgatattgcttggatgaggtttgacagtgaaggtcgactccgggccatcaaccctgagaacggncttctttggggttgcccctggtacctctgccaccaccaatcccaacgccatggctacaatccagagtaacactatttttaccaatgtggctgagaccagtgatggtggcgtgtactgggagggcattgaccagcctcttccacctggtgttactgtgacctcctggctgggcaaaccctgggaaacctggtgacaaggaagcccttgtgcacatccccaactctcgattttgtgccccggctcgccagtgccccatcatggacccagcctgggaggccccagagggtgtccccattgacgccatcatctttggtggccgcagacccaaaggggtacccctggtatacgaggccttcaactggcgtcatggggtgtttgtgggcagcgccatgcgctctgagtccactgctgcagcagaacacaaagggaagatcatcatgcacgacccatttgccatgcggcccttttttggctacaacttcgggcactacctggaacactggctgagcatggaagggcgcaagggggcccagctgccccgtatcttccatgtcaactggttccggcgtgacgaggcagggcacttcctgtggccaggctttggggagaatgctcgggtgctagactggatctgccggcggttagagggggaggacagtgcccgagagacacccattgggctggtgccaaaggaaggagccttggatctcagcggcctcagagctatagacaccactcagctgttctccctccccaaggacttctgggaacaggaggttcgtgacattcggagctacctgacagagcaggtcaaccaggatctgcccaaagaggtgttggctgagcttgaggccctggagagacgtgtgcacaaaatgtgacctgaggccctagtctagcaagaggacatagcaccctcatctgggaatagggaaggcaccttgcagaaaatatgagcaatttgatattaactaacatcttcaatgtgccatagaccttcccacaaagactgtccaataataagagatgcttatctattttannnnnnnnnnnnnnnnnnnnnnnnnnnnnnnnnnnnnnnnnnnnnnnnnnnnnnnnnnnnnnnnnnnnnnnnnnnnnnnnnnnnnnnnnnnnnnnnnnnnnnttggggggnnnnnnnnnnnnnaaaaaatttttcaaaaccttcttttgggcgcggggccccagagggaagggaaacggggccatacgggttccaaagaaaacccgggccagaaaaagggttgggttcccccc

SEQ ID NO: 69597 - DNA, 984 bp, Homo Sapiens
  misc_feature (148)..(148): n is a, c, g, or t
  misc_feature (176)..(176): n is a, c, g, or t
  misc_feature (251)..(251): n is a, c, g, or t
cgtgagggcgtggaccatatgatgcatctagccccgtacatttgtcgtcgtttgttgattggcgtacattcccaggaagttgctgtacgattatcgatcattaggattgcctcgagcagaatcgcacgagttaatctgcagaataatnctagggcgaagccaggcagagtcaaatntgcaggaaccgtgagtgctgacttagctggcaggttgaacaggcgagtccaagatcaagtctctgatgtcttccntgaaagtaagcagagaactagggctatcccataaattaagtgggagattggaaagggtgcggacttctgtattggggagaaggtcttggatgaactggggcagagaactgccagagagagtacctaggaatacgttgttagcaggagaaagaccaagttcagatgcagacttgggaaagtaggtaacttgaccaaaggtagcaaaattagactacccaactggattgtgaatgcagtttatgaaatggatcaggacaggaacaaaaatagattttctagaaactgcagactcctgtgattggagcagtatacaaagtacagcaacatcagactagatctcacctgaggtgctgggtgagaaatcttagggaccagatggaagagggcctgtgtataaagacattaggaaggaggtttgggaaggtttgggagggcagcctgacttgtctccagagaaagttagaactggttgacttagcaaccaagggacactgggtcaaagacgaggaatcaggacgtcggtgcctagtgactgagcgccagcccagcccatttctctacattgccatgggctaaacccagtgtgctgtaaactcttcagttcctttggttatggattttgtatcttttctgtgtttcttaataaagttcttttgaaaaatgggaacctttctcagatgggaattttgtatctttcctctgtttcttaataaagttcttttgaaaaattgga

SEQ ID NO: 69598 - DNA, 665 bp, Homo Sapiens
  misc_feature (449)..(457): n is a, c, g, or t
gaattcggcacgaggcaacaaaatgtgtatattcatacagtggaatattattcagcctctaaaaggaagatacgctgacatgtgctgcaacatggatgaatcttgaggacatgatgctaagtgaagtaagccagttactggaagacaaatactctatgcttccatttatgtgaagtatctagagcagtcaaatgcatagaaacaagtagaatggtagttgccaaggactgggggaggaggaaatgaggagttgtttaatgggtatagtgtttcagttttgcaagataaaaagtcctgtggattggttgcacagttaagttatgtgaatgctgtatgccaactcaactgtacactctaaaatggttaagatggtaaatcttatctttattttaccacagttttttttaaagcatggtaaacaccatttcccaggatgtaaatcggtactnnnnnnnnngtgctccaaagtaagatatatttgggaaacacagggataactaaggttagataggtgttctttattgcaggaattctaagagcatttaacaaattaatttacactgggaattttcagtgtggagggtctggctcatagcatttcacaaacattatacttcagagtcccaaagcctttaaataaaatgttaatggtagaaactcaaaaa

SEQ ID NO: 69599 - DNA, 820 bp, Homo Sapiens
  misc_feature (741)..(750): n is a, c, g, or t
cccattcgatccagatatagcaacatggagttggaagttgtatgcctataatgtctaaagtcccagaatgaaaagatctgtaacaatctgaatagatgtgacacatatagcagagagaactatgtaaattatcttgcagaacaaaatagaagggtcctaaatcacgttaactcaaacattgtagactagctttgtgtttattcttcaggtccttgcgccttatttggttttgtatattcaacgaactgaaatatttggaattcctatttctacgtatttggtggtccataagactttgtcaaatgtaaacctacagtttgataagctttaaaatacctagttaagaggatgatttctctttaatcgtttaaatgttctgaaaattaaaatcttttgaggcacatgaagtgggcaccatatatcatctagagtccttactggtattcaggatgaaaatgttcacgctgcattaattgtcatttttctctcccatgttctttctcactttgatacgttaatactgataatggataaagagtgagtttttataataaatggttttggaaaggtattcataggaaccgcggttatttacttaaggttatggagtaaactagcttggaccttgggctgcaggacgactaggattcacccataacgacacagtgccctatgtttcttaacttcttgttgccatttgaaactctgtactcttatgtttaaagggttctgtatagccannnnnnnnnncagaaagttacattgctttgtatagaaataaaaggcattattaaaatttgcttgttaaaaaatgataaaa

SEQ ID NO: 69600 - DNA, 1139 bp, Homo Sapiens
cagtcgacggtaccggacatatgcccgggaattcggccattacggccgggggccggacgctggttgcgcgctcccaggcgccgagcggccccgggcacgcgcgcgcgccaccggcccggcaggtgctgtccttattcccagcccagtcaagagctaccggggctggctagtcatgggggagcccagtagagaggagtataaaatccagtcctttgatgcagagacccagcagctgctgaagacagcactcaaagatccgggtgctgtggacttggagaaagtggccaatgtgattgtggaccattctctgcaggactgtgtgttcagcaaggaagcaggacgcatgtgctacgccatcattcaggcagagagtaaacaagcaggccagagtgtcttccgacgtggactcctcaaccggctgcagcaggagtaccaggctcgggagcagctgcgagcacgctccctgcagggctgggtctgctatgtcacctttatctgcaacatctttgactacctgagggtgaacaacatgcccatgatggccctggtgaaccctgtctatgactgcctcttccggctggcccagccagacagtttgagcaaggaggaggaggtggactgtttggtgctgcagctgcaccgggttggggagcagctggagaaaatgaatgggcagcgcatggatgagctctttgtgctgatccgggatggcttcctgctcccaactggcctcagctccctggcccagctgctgctgctggagatcattgagttccgggcggccggctggaagacaacgccagctgcccacaagtattactacaggcgaagtctccgactaggcctccagatcagggcttccctcaccagcactggcctttcttctacccacctctaaagctggcagtggagtctctgcctcacccaaagacttttcccttccagactttgagtgtcttcccttctagactttcccatctcctggtgagatgttcccaccttatgccgtggtcctgccctgagccccttttccccaccacaaccaccacgggccagggcagagaaagggcaactcccaagaagccactgcactggggtaaacattaatggcaactactacccttgggggcctcagttac

SEQ ID NO: 69601 - DNA, 2450 bp, Homo Sapiens
  misc_feature (28)..(28): n is a, c, g, or t
tcccgtcctctccctctcattgactccnccccccacaaagcacgctggtaccggtccggaattcccgggatatcgtcgacccacgcgtccgatggttgcccccgcagtgaaggttgcccgaggatggtcgggcctggcgttgggcgtgcggcgggctgtcttgcagcttccagggctaactcaggtgagatggagccgctatagtcctgaattcaaggatcccttgattgacaaggaatattatcgcaagccagtggaggagctaactgaggaggagaaatatgttcgggagctcaagaagactcagctcatcaaagctgctccagcagggaaaacaagttctgtgtttgaagacccagtcatcagtaaattcaccaacatgatgatgataggaggaaacaaagtactggccagatccctcatgattcagactctggaagctgtgaaaaggaagcagtttgagaagtaccatgccgcttctgcagaggaacaggcaaccatcgaacgcaacccctacaccatcttccatcaagcactgaaaaactgtgagcctatgattgggctggtacccatcctcaagggaggccgtttctaccaggtccctgtacccctacccgaccggcgtcgccgcttcctagccatgaagtggatgatcactgagtgccgggataaaaagcaccagcggacactgatgccggagaagctgtcacacaagctgctggaggctttccataaccagggccccgtgatcaagaggaagcatgacttgcacaagatggcagaggccaaccgtgccctggcccactaccgctggtggtagagtctccaggaggagcccagggccctctgccgcaagaaacagtgtgagctactgccacgctgaaaactacctgtgggttaaggatgtagttcctttgtaagggtgggcaggcctcgtaagaaagatgtagcagcatattcactatccgttaatccttctttctttgaggctggaacttgctctctctgcccctatttccttgtaaagagggagcacattgacttgggaatttcctccaggaaactcagggctgttttctcttcccttaggttggggcggacctttggacatataaaggaagcagttttagtatcagaaaagatttattagaaaattctcacgctgaactggtgtagcatgtggtgcagcattcagtgaaactggctggaggaaataggcttgtttccagagttgtccttatacaaaatgtataaaaagcagtttctggtgtgacttgtgctctgcctccaccccttgacatcccaaaatatcccaccagtggctatgcttacccattttacagatgggtaaactgaggcaccaaggtagtagttgcactaatggttacacagtgcagtggctcttgggagttgcccttctctgcctggccgtggtgggttgtggtggggaaaggggctcagggcaggaccacggcataagtgggaaacatctcaccaggagatgggaaagtctagaagggaagacactcaaagtctggaagggaaaagtctttgggtgaggcagagactccactgccagctttagaggtgggtagaagaaaggccagtgctggtgaggaagccctgatctggaggcctagtcggagacttcgctgtagtaatacttgtgggcagctggcgttgtcttccagccggccgcccggaactcaatgatctccagcagcagcagctgggccagggagctgaggccagttgggagcaggaagccatcccggatcagcacaaagagctcatccatgcgctgcccattcattttctccagctgctccccaacccggtgcagctgcagcaccaaacagtccacctccgtgagcagtgggctgacacacggctgagctggactgtccatcctgcagccttctgtgcttgtgccagggctggggccacccacctcctcctccttgctcaaactgtctggctgggccagccggaagaggcagtcatagacagggttcaccagggccatcatgggcatgttgttcaccctcaggtagtcaaagatgttgcagataaaggtgacatagcagacccagccctgcagggagcgtgctcgcagctgctcccgagcctggtactcctgctgcagccggttgaggagtccacgtcggaagacactctggcctgcttgtttactctctgcctgaatgatggcgtagcacatgcgtcctgcttccttgctgaacacacagtcctgcagagaatggtccacaatcacattggccactttctccaagtccacagcacccggatctttgagtgctgtcttcagcagctgctgggtctctgcatcaaaggactggattttatactcctctctactgggctcccccatgactagccagccccggtagctctgacgggcgatcccgggaatccggaccggtccagcc

SEQ ID NO: 69602 - DNA, 850 bp, Homo Sapiens
ggcccaaggggttggcccgaggatggtcgggcctggcgttgggcgtgcggcgggctgtcttgcagcttccagggtgagagggtggcgagcagcggggggggcgctgcgaggaaggaagggggccacaggcaggccgcgtgggcccctagagagagcattgccctgggggccggagtatctggattcaagcttctaagttagctgcgtgaccctgcgccaatccgaaggtttagtgactacctctcgcctaaggagtctggctgatctagggttctaacgcggagctgaaagtgcggttcagctaaagagctcagatctgggatcgcctgtgaattgggatgggtgtgtaggcgccaagcccatccttaccgttagcacttgaccaggaggagactttacccgcctgcttggggaatgtcctcctacttgggacaagggcctgaattgttgtggctcaggtttagctcgcggtctccgcgccgctctccctcgtcggcgcgttggcagtcatgcctattgttaagtcaaacctactcgcttgtggagtcagcttttgcctgcctcctcctttccccccctcccaggctaactcaggtgagatggagccgctatagtcctgaattcaaggatcccttgattgacaaggaatattatcgcaagccagtggaggagctaactgaggaggagaaatatgttcgggagctcaagaagactcagttcatcaaaagctgctccagcagggaaaaacaagttctgtgtttgaagaccagtcctcagtaaattcaccaacatgatgatgattggaggaaccagtacttgggcaattcttctgattcgactctggaactgg

SEQ ID NO: 69603 - DNA, 817 bp, Homo Sapiens
gggaccgagggccgcgccagactgcgacggatacagggagggcaagggtttccttttggcgcttccctttggaccccggagtgaaaaactctaacgtccagatcagtggagagaaacgcagatttaggaccctgaggagtctttttcacccgtttcccgtcactcgctcaggcgcgccgagggcagtccttgtggggtcctcgtggccagccaagatggctgcccccgcagtgaaggttgcccgaggatggtcgggcctggcgttgggcgtgcggcgggctgtcttgcagcttccagggctaactcaggtgagatggagccgctatagtcctgaattcaaggatcccttgattgacaaggaatattatcgcaagccagtggaggagctaactgaggaggagaaatatgttcgggagctcaagaagactcagctcatcaaagctgctccagcagggaaaacaagttctgtgtttgaagacccagtcatcagtaaattcaccaacatgatgatgataggaggaaaaaaagtactggccagatccctcatgattcagactctggaaactgggaaaaggaagcagttggagaagtaccatgccgctttctgcagaaggaacagggcaaccatcgaacgcaacccctacaccattcttccatcaagcactgaaaaaatgggaagcccattgattgggctggttacccatccctcaaggggaggcccttttccaccagggtccccgtaacccctaccccgaccgggcgtcgccgccttcctagccatgaagatggatgatcactgagtgcccgggaaaaaaag

SEQ ID NO: 69604 - DNA, 794 bp, Homo Sapiens
tggtgtctaatcggcacgaggagagtctttgttccctgctacaagagtctaaagaagaagccatcaggactctgcagcgaaaaatttgtgagctgcaagctaggctgcaggcccaggaagaacagcatcaggaagtccagaaggcaaaagaagcagacatagagaagctgaaccaggccttgtgcttgcgctacaagaatgaaaaggagctccaggaagtgatacagcagcagaatgagaagatcctagaacagatagacaagagtggcgagctcataagccttagagaggaggtgacccaccttacccgctcacttcggcgtgcggagacagagaccaaagtgctccaggaggccctggcaggccagctggactccaactgccagcctatggccaccaattggatccaggagaaagtgtggctctctcaggaggtggacaaactgagagtgatgttcctggagatgaaaaatgagaaggaaaaactcatgatcaagttccagagccatagaaatatcctagaggagaaccttcggcgctctgacaaggagttagaaaaactagatgacattgttcagcatatttataagaccctgctctctattccagaggtggtgaggggatgcaaagaactacagggattgctggaatttctgagctaagaaactgaaagccagaatctgcttcacctctttttacctgcaatacccccttaccccaataccaagaccaactggcatagagccaactgagataaatgctatttaaataaagtgtatttaatgaatttctcc

SEQ ID NO: 69605 - DNA, 604 bp, Homo Sapiens
ctcaagagaatgtaatttaagccttggaatcagaatatgttgcaaatagtaattttctcctatagtggcctcagagtttgttttttaaagtcattaattcataacttctgtgtagggacccctccatagtcgagatgggtcatttcaggtgtaatgaaggcagaggcttggaaggcatagacctaataaaatcgggagaaggcacctgcacaaaagtgttacaaagactataatgtttgtttactgccactataccagatgtgctaaatataacacttctttaaaacagtgatcctccgactgtgaaaaaccagacctctggctgcctggctccctaggaatcaagaagacgcacagactgaaaatcaagggaggaaggaacaagatcaaggatgaggattagcatctgcaaattgaactctatctaatttgcatgtttatttcttagaattgtaattaaatttgtgtaataaatgttttccatttcatttgtacacttaaaacttgggtgactgacatgcagttaagtgaatttcctttttttaaaagcaaatgtagattattcaataaagcagcaaaccaatattaaacataattagaactt

SEQ ID NO: 69606 - DNA, 1792 bp, Homo Sapiens
  misc_feature (43)..(77): n is a, c, g, or t
  misc_feature (1313)..(1313): n is a, c, g, or t
  misc_feature (1665)..(1701): n is a, c, g, or t
aaaacgaccgagcgccccgagttttgagcgaggaagcggccgnnnnnnnnnnnnnnnnnnnnnnnnnnnnnnnnnnncagtcgacggtaccggacatatgcccgggaattcggccattacggccgggggcgacagtcggggccgaggcccagggggaggtggcctgtcgcgggtcgcccggctcccggaggcgaggggggcgcgggcggatggcggagggcgcccagccgcagcagccgcctcagctcgggcccggcgccgacgaccggggcatgaagcgggagtcggagctggagctgccggtgcccggagcgggaggagacggagccgatcccggcctgagcaagcggccgcgcactgaggaggcggcggccgacggtggcggcgggatgcagaacgagcctctgactccaggttatcatggattcccagcgcgggacagccagggtaaccaggagccgacaacaactcctgacgcaatggttcagccttttactaccatcccatttccaccacctccgcagaatggaattcccacagagtatggggtgccacacactcaagactatgccggccagaccggtgagcataacctgacactctacggaagtacgcaagcccacggggagcagagcagcaactcacccagcacacaaaatggatctcttacgacagaaggtggagcacagacagacggccagcagtcacagacacaaagtagtgaaaattcagagagtaaatctaccccgaaacggctgcatgtctctaatattcctttccgcttccgggaccctgacctccggcagatgtttgggcagtttggcaaaatcctagatgtagaaataatctttaatgaacgtggctctaagggattcgggttcgtaactttcgagaatagtgctgatgcagacagggcccaggagaaattacacggcaccgtggtagagggccgtaaaatcgaggtgaataatgctacagcacgtgtaatgaccaataaggaagatggtcacaccatatgcaaatggttggaaattaagcccagtagttggagctgtatatggtccggagttatatgcagcatccagctttcaagcagatgtgtccctaggcaatgatgcagcagtgcccctatcaggaagagggggtatcaacacttacattcctttaatcagtctccctttagttcctggcttcccttaccctactgcagccaccacggcagccgctttcagaggagcccatttgaggggcagagggcggacagtatatggtgcagtccgagcggtacctccaacagccatccccgcctatcncaggtgtggtttaccaggacggattttacggtgctgacctctatggtggatatgcagcctacagatatgcacagcctggtactgcaaccgcagccaccgctgctgcagccgctgcagccgcttacagtgacggttatggcagggtgtacacagccgacccctaccatgcccttgcccctgccgctagctatggagttggcgctgtggcgagtttataccgaggtggctacagccgatttgccccctactgaagtgacgtgagacccctgcaaatgggacagccccccagttcatgaggcctggctattgcaatatttactagtagaggaactctatagcaagatgaagaggnnnnnnnnnnnnnnnnnnnnnnnnnnnnnnnnnnnnngaaagaatcttttttatacctcactatgttctttgaatatgtatttttcctttaaattctgcctttaatcttttgttccaaagattgtgca

SEQ ID NO: 69607 - DNA, 635 bp, Homo Sapiens
cctcttcatcttgctatagagttcctctactagtaaatattgcaatagccaggcctcatgaactggggggctgtcccatttgcaggggtctcacgtcacttcagtagggggcaaatcggctgtagccacctcggtataaactcgccacagcgccaactccatagctagcggcaggggcaagggcatggtaggggtcggctgtgtacaccctgccataaccgtcactgtaagcggctgcagcggctgcagcagcggtggctgcggttgcagtagcaggctgtgcatatctgtaggctgcatatccacccctggataggcggggatggctgttggaggtaccgctcggactgcaccatatactgtccgccctctgcccctcaaatgggctcctctgaaagcggctgccgtggtggctgcagtagggtaagggaagccaggaactaaagggagactgattaaaggaaatgtaagtgttgataccccctcttcctgataggggcactgctgcatcattgcctagggacacatctgcttgaaagctggatgctgcatataactcccgaccatatacagctccaactactgggcttaatttcaaccatttgcataggtgtgaccatcttcttattggccat

SEQ ID NO: 69608 - DNA, 731 bp, Homo Sapiens
  misc_feature (22)..(22): n is a, c, g, or t
  misc_feature (191)..(267): n is a, c, g, or t
gcagaatatgagaaattcattntggagtagttgtccatatgcaatgagtagagcaaaccatcaagcattaattgacattagggtcaattcagcattgacttgagtttgtattgacttaacattgagttcaagcattaattgacattagtgtttatgttaagaggattgggccaggcacatcagcttacacnnnnnnnnnnnnnnnnnnnnnnnnnnnnnnnnnnnnnnnnnnnnnnnnnnnnnnnnnnnnnnnnnnnnnnnnnnnnngacgtgagccattttcccagcctgttttttgtttctttaaaaaaactgataaggatttttatggataccatgttgaatctaaatcacattgggttattatataatcatttaacaatattaatttttccaaaccataaatatgggttgtagctcaatgtttctaatcattttgatcaatgtttgtagatttcaaggtaaaaacctctgacctttgtacgtttatttctaagtatttcttactttaagttctccagcaaatggaagtgttttaaaattttcttttaaaattgtttattgttaaaagtatggaaattcaactaatttttggtgctgatactgtattgtgcaaatccactgactatgttacttagttccagtagtattttggttggctctttgtgattttctacaccagaagattatgtcatctacaaacaaaatataattttacttcttactttctg

SEQ ID NO: 69609 - DNA, 1871 bp, Homo Sapiens
  misc_feature (931)..(963): n is a, c, g, or t
gagctcggtaccgaattcatccagcgtagagacgaggttctccagtcgacaggctggtctcgaactcccacctcagcctcccaagactgctgggattacaggtgtgagccaccgtgaccagccaatgtgccttcttatagtgtctactcattggtctttgttctgcccagtgataacaatgggataacgcctgctacacatcttcattgtgaaacccttcccctgtgctgagattaaatgaactctaagattattaaatagtatattttccttgacagcctagcgtttgatgattttaaagccttatgtataaataaaccaaaggaagtaagcagtcatattgctaatttgctaactcctatctattgaatggtgaagttttaaaaatttccccaggtaagtttaagattcaaacaccatctattgagcacctacattgtgtgccaggtagtaaaataggtgctttcatacacatcgtctcaattcctgtgaggtcagaattatctctgcatttgaaacttgaggaaacatgctcagagtgcaagaagcttccttgcctgagatcacctagaaaggaaccctcagagccggcaactgaatcttggtccctgtgatgtcaagcccattgctctcccactgcagaacatggcctctagattaatgccaccgattcaggaacacctccgacagtcttgaaatacccccatgttgccttgtttgttttttccttctggcttcttctattacagtctcttcattggaagctctgtaggccaaggccagagctgatactgacacggagccaatgcagatagcacatcagatgctaggggtcgctgggaggattaagggacttaatctgctaggaacacctgtacttgaagtggaggaggctagggggccacagttgctgcttcattaacatagaggnnnnnnnnnnnnnnnnnnnnnnnnnnnnnnnnnaagtggattggcagactccttgttgcttaagagtggctttctaggcaggccactggcatctgaattcatcattgacaataaatgtaagaaattggaataaaaaagagagacctgctgttattcgcttttgttctccagtgatttgattaactcagggcaaggctgaatatcagagtgtatcgcactgaagaataataatccattcagtaatgttatagttatcctcaatctaaatatgtcaactgtcattttgctgcttttcaaataaaatacttgagcaatggggggagaaagaggaatttatcttcttgacctctagtcccttgattgaaaatttaactctgatttaaggaagccgttgggtaagccagattccacatcccactaaactgcctggaagaggtgggaggagagcagccattaaggtatgaggtacagagtcccatcaggtgagacccatgtctgtagccactgaggttcctgttgcaacaggtgagatgtgatcttcccaaagccccagcttcttccgcaggaggctgagacagcaggcccacggatgtccattcaggaagaggctaaggcttgggggtcaggtgaagaatcttgagagacacaaaaattgttctagtatagtcatgacttaaaattataaagaataattttcaagtcttttagcaaatccatgaattggtgtttttgtggagatatgaatgactttcagtaaaagagtcaccgaatcataataggtatggaggtggaaattctattattaagatttatgattactgaaatattttcatgattactcagatccatttctggactgaccttatgcttaaccagatgatgtttattattaaagctgatttttaacgagtgttcattaataaaaaatgctcttaaccaaa

SEQ ID NO: 69610 - DNA, 1597 bp, Homo Sapiens
tggtgactatagaccagtgttcaaaaagcaggctggtaccggtccggaattcccgggatatcgtcgacccacgcgtccgcaaaaattgatttttgatctctgaattgtggtttttagctcaccagttattgtgtagtctcactatttgaaaattcatgctgaaaaactgagtgaatatgatcagatttctccaccaaattctcagcctgataaggaaaatcccgttttgtcaacctaatgaagcattcaaagaagacatatgactcttttcaagatgaacttgaagattatattaaagtacagaaagccagaggcttagagccaaagacttgtttcagaaagatgaaaggggactatttggaaacctgtgggtacaaaggagaggttaattccagacccacgtatagaatgtttgaccagagactcccatctgaaaccatccagacctacccaagatcatgcaatattccacaaacagtggaaaatcggttgcctcagtggttaccagcccatgacagcagattgagactagactctctgagctactgtcagttcacgagggactgtttctcagaaaaaccagtacccctgaactttaatcaacaagaatatatttgtggctcacatggtgtagaacatagagtttacaagcacttctcctcagataacagtaccagtactcatcaagccagtcacaaacagatacatcagaagaggaaaaggcacccagaggaaggcagagaaaaatcagaggaggagcggtctaagcataagagaaaaaaaagctgcgaggaaattgacttagacaaacacaagagcatccaaagaaagaaaacagaggtggaaatagaaaccgtacatgtcagtacagaaaagcttaagaatcgaaaggagaaaaaaagccgagatgtagtctctaagaaagaggaacgtaagcgtacaaaaaagaaaaaggaacaaggccaagaaaggacagaggaggaaatgctttgggaccagtctattcttggattttgaagctttcaaagttggttctcccaaagttaaattgaaaaaataggtgagagcttggttttatgatatccgtgttcataccacttttcttatgtgaataggttctttaacttctaacaaaggcctagtaaacaaagtgtttagcatgcttgctctccaacacagaaattgcttttcctcattttctaaaagcattattacattttttgaacatatagtgtaatttcctttaatgaaagtgactctgcttttattcatcaaattgctttgatggtggaaatattttctgttgggaggttatttattttaaattggaggattaatgacctttgcacaatctgtttcttgattgggtttgttatagttttgagttgggtattttatgttcattggtttttctctgtgaagcaatttttttctcctttattagatctaacttgcagtgtattttctaggctggaaagtggaaaatgaaatatattataatcttaggttacataaagtttctaaagtttcaaagagtcttgatacaaaatcagtttatattctgaaaatatttataataaagtattctaatttctaa

SEQ ID NO: 69611 - DNA, 990 bp, Homo Sapiens
  misc_feature (871)..(930): n is a, c, g, or t
agcttgtaactatgaccagtgttcaaaaagcaggctggtaccggtccggaattcccgggatatcgtcgacccacgcgtcggggcaggtggtcaccgtacatctgcagacgtcggggagaatggcacacgggtgcaggaggagccggagctggtgttcactctgggtgactgtgacgtcatccaggccctggatctcagtgtcccactcatggacgtgggggagacggccatggtcactgctgactccaagtacggctacggcccccaaggcagcaggagcccatacatccccccgcacgcggccctgtgcctggaggtgaccctgaagacggctgtggacgggcctgacctggagatgctcacggggcaggagcgcgtggccctggccaaccggaagcgggagtgcggcagacgcccactaccatgcgggcggacttcgtcctggccgccaactcctacgacctcgccatcaaggctatcacctccagcgccaaagtggacatgacgttcgaggaggaggcacagctcctgcagttgaaggtgaagtgtctgaacaacctggcggcctcgcagctgaagctcgaccactaccgcgcagcctgcgctcctgcagccttgtgctggagcccagccagacaacatcaaggctctcttccgcaagggcaaggtgctggccagcagggggagtacagtgaggcatccccaatcctgaggcagcctgaagctgggaaccttcaacaagagatccacgcagagctctcagagctggtggaagaagcatgcgggccgcggagcccggagaccgcctgtaccggagaatggtggggacccgcgggtgctgctagtgccggaggggccgtcccccctggannnnnnnnnnnnnnnnnnnnnnnnnnnnnnnnnnnnnnnnnnnnnnnnnnnnnnnnnnnnctgagggacgggcgcacaacagggaccgggcccctggaggggccacgcaagggtcccacc

SEQ ID NO: 69612 - DNA, 1634 bp, Homo Sapiens
  misc_feature (1570)..(1588): n is a, c, g, or t
ctaggtcaggctgcgtgttaatcggcacgaggggaggaagaggagtaggaagaggaggaagaggatgacctgagtgagctgccaccgctggaggacatgggacaacccccggcggaggaggctgagcagcctggggccctggcccgagagttccttgctgccatggagcccgagcccgccccagccccggccccagaagagtggctggacattctggggaacgggctgttgaggaagaagacgctggtcccagggccgccaggttcgagccgcccggtcaagggccaggtggtcaccgtacatctgcagacgtcgctggagaatggcacacgggtgcaggaggagccggagctggtgttcactctgggtgactgtgacgtcatccaggccctggatctcagtgtcccactcatggacgtgggggagacggccatggtcactgctgactccaagtactgctacggcccccaaggcaggagcccatacatccccccgcacgcggccctgtgcctggaggtgaccctgaagacggctgtggacgggcctgacctggagatgctcacggggcaggagcgcgtggccctggccaaccggaagcgggagtgcggcaacgcccactaccagcgggcggacttcgtcctggccgccaactcctacgacctcgccatcaaggctatcacctccagcgccaaagtggacatgacgttcgaggaggaggcacagctcctgcagttgaaggtgaagtgtctgaacaacctggcggcctcgcagctgaagctcgaccactaccgcgcagccctgcgctcctgcagccttgtgctggagcaccagccagacaacatcaaggctctcttccgcaagggcaaggtgctggcccagcagggggagtacagtgaggccatccccatcctgagggcagccctgaagctggaaccttccaacaagacgatccacgcagagctctcaaagctggtgaagaagcatgcggcgcagcggagcacggagaccgccttgtaccggaaaatgctgggcaaccccagccggctgcctgctaagtgccctggcaagggtgcctggtccatcccatggaagtggctgtttggggcgactgctgttgccttggggggtgtggcactctctgtggtcatcgctgccaggaactgaccacctaggtggctgccaccccctctgcacaccatggaccctgccctgcgctccccaactcccccaggctccctgtccactgccctccctggtctggccccctcctccgggttaggggagcaaggattgggggtcgtgcagcccagccagcaggagggactgaggccctctaggaggaaagcccagagggagggggccctcattccttcagacccagttttcccccaccctccttaccccgctgggctaggtctccgccagggctggcctcagtttctcctcaacaggcctgggggcagcccttcccctgcctagtccccgcctgagtgccagccccccaccccgcctgccgccccctgtccaggttccctccccgccacagtgaaataaagcatcccaccctgcnnnnnnnnnnnnnnnnnnnctcgcctcgtgccgagttcgccacccaggcctcgctacctagaccc

SEQ ID NO: 69613 - DNA, 717 bp, Homo Sapiens
  misc_feature (41)..(57): n is a, c, g, or t
  misc_feature (224)..(256): n is a, c, g, or t
gggggccgaacctggttcccgaggcgcggcggccgcggctnnnnnnnnnnnnnnnnncgcaggaccccaagtgggggtcccggagccagagggccaattcctgtccccccagcagcatggcatcgtgtgctgaaccctctgagccctctgccccactgcccgccggggtcccaccgctcgaggacttcgaggtactggatggggttgaggatgcagagggtgannnnnnnnnnnnnnnnnnnnnnnnnnnnnnnnntgacctgagtgagctgccaccgctggaggacatgggacaacccccggcggaggaggctgagcagcctggggccctggcccgagagttccttgctgccatggagcccgagcccgccccagccccggccccagaagagtggctggacattctggggaacgggctgttgaggaagaagacgctggtcccagggccgccaggttcgagccgcccggtcaagggccaggtggtcaccgtacatctgcagacgtcgctggagaatggcacacgggtgcaggaggagccggagctggtgttcactctgggtgactgtgacgtcatccaggccctgaaatctcagtgtcccactcatggacgtggggggagacggccatggtcactgctgactccaagtaatgctaaggcccccaaggcagcaggagcccatacatccccccgcacgcggcctgtgcctggaggtgacc

SEQ ID NO: 69614 - DNA, 1108 bp, Homo Sapiens
  misc_feature (326)..(360): n is a, c, g, or t
actataacggtcctaaggtagcgaggctgggtggcgaattcggcacgaggctcctcctcaggccctcaggttcacttctgtaactaaggcttcaggatgggtcattcagcaaccccagagctgccctgcccgtcaagcttgaactctttaaggaaataacatttagagtggactgtgcccccagcagcccccaagggccaattcctgtccccccagcagcatggcatcgtgtgctgaaccctctgagccctctgccccactgcccgacggggtcccaccgctcgaggacttcgaggtactggatggggttgaggatgcagagggtnnnnnnnnnnnnnnnnnnnnnnnnnnnnnnnnnnntgacctgagtgagctgccaccgctggaggacatgggacaacccccggcggaggaggctgagcagcctggggccctggcccgagagttccttgctgccatggagcccgagcccgccccagccccggccccagaagagtggctggacattctggggaacgggctgttgaggaagaagacgctggtcccagggcacgcaaggttcgagccgacccggtcaagggacaagtggtcaccgtaacatctgaaagacgtagctggagaatggcacacgggtgcaagacaggagccggagctggtgttcactctgggtgactgtgacgtcatccaggccctggatctcagtgtcccactcatggacgtgggggagacggccatggtcactgctgactccaagtactgcgtacaggccccaaggcaggagcccatacatccccccgaacgcggccctgtgcctggaggtgaccctgaagacggctgtggacgggcctgacctggagatgctcacggggcaggagcgcgtggccctggcaaccggaagcgggagtgcggcaagcgcccactaccagacgggcggaccttcgtcctgggccgacaatcctacggaccatcgccatcaaggctatcacctccagcgcccaagtggacttgacgttcgaggaggaggcacagtccttgcagttgaaggtgaagtgtctgaagcaactggcggcctcccgctgagctcgacaattaccggcgcctgcgctcg

SEQ ID NO: 69615 - DNA, 990 bp, Homo Sapiens
tagcgaggcctgggtggcgaattcggcacgaggccaaccggaagcgggagtgcggcaacgcccactaccagcgggcggacttcgtcctggccgccaactcctacgacctcgccatcaaggctatcacctccagcgccaaagtggacatgacgttcgaggaggaggcacagctcctgcagttgaaggtgaagtgtctgaacaacctggcggcctcgcagctgaagctcgaccactaccgcgcagccctgcgctcctgcagccttgtgctggagcaccagccagacaacatcaaggctctcttccgcaagggcaaggtgctggcccagcagggggagtacagtgaggccatccccatcctgagggcagccctgaagctggaaccttccaacaagacgatccacgcagagctctcaaagctggtgaagaagcatgcggcgcagcggagcacggagaccgccttgtaccggaaaatgctgggcaaccccagccggctgcctgctaagtgccctggcaagggtgcctggtccatcccatggaagtggctgtttggggcgactgctgttgccttggggggtgtggcactctctgtggtcatcgctgccaggaactgaccacctaggtggctgccaccccctctgcacaccatggaccctgccctgcgctccccaactcccccaggctccctgtccactgccctccctggtctggccccctcctccgggttaggggagcaaggattgggggtcgtgcagcccagccagcaggagggactgaggccctctaggaggaaagcccagagggagggggcccctcattccttcagacccagttttccccccaccctccttaaccccgctggggcaaggtcctccgcccaagggctgggcctcaatttcctcctcaaaaggccctggggggcaagccccttccccctgcccaaatcccccgcctgaagggggcagacccccccacccgggctgggcgccccct

SEQ ID NO: 69616 - DNA, 946 bp, Homo Sapiens
  misc_feature (159)..(170): n is a, c, g, or t
  misc_feature (767)..(850): n is a, c, g, or t
tagtagaagctgcaaacagaattatgtggaactgaatataagaaaatatacagtgaagagtgctaagaattcctctgaaatgtagtgaaaaggtagatttcatttagcattcagtatatttatcttgaaggaaaaaaggtggaaatatcaaaggtttgnnnnnnnnnnnncctctttgctttttcatatgctagatggatcaattactttgttgacttatttaacaagagccttgtggttaagcaatatatataaaatcacaaaagtattatattaataatataacataataatgtccaccatgaaatctgtaatgatatgcgtgcacctaccaagtgttgggcacagtgctaagtgatttcacaaaatacttatttaatcttcctggcaactccactaaagtatttaggaactgctatagtttgaatgtgctccctccaaaattcaggtgttatcaatgtgatagaagtaagaggtagggtctgtaggaggtgattatgccatgagtgtttctctctcattaatgggattaaggccctattaaaagaggctttgagcagcctcaggtcagcttgcccttctgcttctgccatgtgaggatgcagccaaaaaagccctcaccagaccaagggtcagcatcttgattttggacttcccagcctctagaactgtgaaaataaatttctgttctttacaaattactcagtctcaggtattctattgtagcagcaaagaacaggctaagacaggggttctatgcatccagnnnnnnnnnnnnnnnnnnnnnnnnnnnnnnnnnnnnnnnnnnnnnnnnnnnnnnnnnnnnnnnnnnnnnnnnnnnnnnnnnnnngacaccccttcccctcatgacccttttgccaccatgtgccgttttgttaacccgcatgaccattcacgacagctgctgggatcctctagatgaccc

SEQ ID NO: 69617 - DNA, 688 bp, Homo Sapiens
ccttcacttgtcagtatcataaagagtattgcccaactgaactgtgctcccactggtttaatagttacttatttctgcctaagcactcaccttccgattttacccaagtatatatataggatagaaaaaaatgcattatatttgagagctacttcgcccaaattacaaaatgagtgtttttagattcaagtgacagtaaaaggatttgttcccttcagtgacttgagtgttttagttatgcataagtatttctagcaaaggaagggtagaaaggaattgaaaattaatttacactagttgctacttgggaataaagggctttttgaggggggtatggatattaaatgttttcgttatatacttatccctattaaaacaggcagttgtttctttgaatatgcctaaataacagtattcttaaaatctgacagacaagtaacatgtcaattacttgatattccttgtctccagtaccacaggccactcttgacatcccatgtttgcctggataaagttcctcatttcaaacagtatacatacttctttgcagttcattatagtaaggcttaacctgtaaacagtatctgatggcccacctataaataaaattcagcattctatttttaataatttgtatgccaccaatttgtattatttgtctcaataaatacttagtcatcaaaaaaaa

SEQ ID NO: 69618 - DNA, 748 bp, Homo Sapiens
  misc_feature (16)..(16): n is a, c, g, or t
ggagcaccaaagcatntgataaagaccgtatagggaaatgggggggaaatggctaaaagagaacaattcgtttacaaataacaagatattagctaattgtgccaggggctgttatatacatatatacacaacccaaggtgtgatctgaatttaatccacatttggtgttgcagatgagttgtaaagccaactgaaagagttccttcaagaagttcctctgataggaagctagaagtgtagaatgaagttttacttgacagaaggacctttacatggcagctaacagtgctttttgctgaccaggattggtttatatgattaaattaatatttgcttaataatacactaaaagtatatgaacaatgtcatcaatgaaacttaaaagcgagaaaaaagaatatacacataatttctgacggaaaacctgtaccctgatgctgtataatgtatgttgaatgtggtcccagattatttctgtaagaagacactccatgttgtcagctttgtactctttgttgatactgcttatttagagaagggttcatataaacactcactctgtgtcttcaacagcatctttctttccccatctttctattttctgcaccctctgcttgttccctcatattctgttcttccgactcctgctaacacacatgcaacaaaaaagggaagggagtgcttatttccctttgtgtaaggactaagaaatcatgatatcaaataaacatggtgaaacattaaaaaa

SEQ ID NO: 69619 - DNA, 391 bp, Homo Sapiens
ctaagacaccttttataagcctccctataaaaatctcacctttcaagtactaagttagaattgcaagtcatcttttctgaaaaccagatgctatcaaagtcctcctttgaaaattaagggtctctttaaaattagaatttataaatggcattcagtgatagtgtacaccaaaattaaaagaccttgactggtgggctttttacgtgtaaggaagaggaagtttaagaagtaggactctgcttgtttcagtagcccatgtactaaaataggaacaatgcagagattagcacagcccctgcacaaggctgacacataaattcatgaagcgttagagacaaaaagtaggactaatgtttgtttattttttaataaaaatctagaatggtaaaaa

SEQ ID NO: 69620 - DNA, 688 bp, Homo Sapiens
caaaaggacttacttcttgttttttcccagttttatatagaggaaacactgtctatgataggatttccaaaagtatttgtggacagttaaatgctaattaatatacatctgtagttattctacattttcttgaaatttgggaggttaataccaagtattcatttcatgatgtaaagaaactgaacagtgaagtggcttgattgcttaaactattgacttggtaagtctactgtatataacatctaatatatatattacaggccaaatgaactaaacattgccttgctatattcaccaaaaggacttaattcttgtttttttcccagttttatatagaggaaacactatgataggatttcctaaagtatttgtggacagttaaatgctaattatatacatctgtagttattctacattttcttgaaatttgagaggttaataccaagtattcatttcatgatgtaaagaaactgaacagtgaagtggcttgattgcttaaactattgacttggtaagtctactgtatataacatctaatatatatatattataggccagctacaaggggtttaaatatttaggattgtgtcttgaaaactaagtattggagtggattttcttctgctttcattgatacttgtcagaaaaaaatattagaccaaaatgtaaaatataagtaattattctc

SEQ ID NO: 69621 - DNA, 901 bp, Homo Sapiens
ttttaagtattgttaacaatcctttggaagtcactactggtctttgtgtgctgctttttaataattgagttattttgagcttgccaagtaggatctattgcctggactaaaatttatttcctaatcttctgatgaccaagaaaggaaaaattaagtttgcagatgtgagatgaaatatagccagtgaatatgcatactgattctgaatgaaaggaattaacttttcagtcaagaaacagtctgcatgcagtaaattgaatttttcctgcaactggaatgatttgtttaattcttctttgaacactgccctttctccagtaagaacactaatgatttgctaatattttttaaagaaatctgtttttttaattagttaagctcagacttcctcttattttttatcctagagaaaactgctaaaagggaatgatatatcagtactattcttctaaaacaactttttaaaaatgattatacaaagccaaatatgctcattatataaaatttagaagcaaaaagaaggaaataaaaattttccataattctaccagctagagataatggtgttagaatatattcctttctaatctgttttctatgcatgcacaaacacatatgtgagcacatatttataattttattctaaaaaataggatactgctgtacatattgttttacaatctaagtcatataattataatattctttaagcatatttatgagtaaaatattaaaacctatacaaaaaaataatagaatggcattttagctcattcattgatttttataaaatatttaacacactccctggtttgtagttagcgttcaataaatgctaaaaatttatcttcaccatcatcattaatttatttattaatcattattaaattattcattgatc

SEQ ID NO: 69622 - DNA, 905 bp, Homo Sapiens
ctgcacatgctgttctcaattggtaattataggcaatttatcttttctaatgatcaaaagagtgtgacttctcatttgtgagtagttcacaaatttcctgttaaaaagctgaaaccatctactttttcttaacccaagtgataataaacaatattcacaactttcttaaatttttaaattgaaaaccaaggttttttcaaatataaacctagatgattttggtcacaaattgttaacatttgtcgatcctttgtatatactttggatatatattaaaggcaaaactatctcttgactaactgatggattcatttactaaagcacagctgtatgtatttttgaatacatattatgatcttgagactttataaatcaatttttatgactttatgcagttgtatagggattatgccctttcagttctatagggattatgcccttttataatacataatataccacagagattacaaatgttgaggaatgaaagcacttctttgctttggcaatcattttcagaccactatgtgtttgaatcctctggtatcaatacgtattatagggttttagagatctgtgggtcaaatgatgtccctcaaaacttcctaaaaaggtgaagctcaaagtcacacattcatttataaggcgcatgagtttctcattttcccatgtacgagcattgtaaaggaattcagctgtattaatttctatttcagatctagaattgacattttgccttcttgtttccaggtgtttctattttttgtattctttcagagaaatctcatatttcggtgtatttattgctgttactactatatttactgctgaaaactgtaacaacctgaagatttgtaaaatgttaaacatagttcattaaaaataataaaataaatctaaaatgt

SEQ ID NO: 69623 - DNA, 620 bp, Homo Sapiens
  misc_feature (41)..(79): n is a, c, g, or t
agaacactaaacaacgctgctaaagtctcaattgggaaggnnnnnnnnnnnnnnnnnnnnnnnnnnnnnnnnnnnnnnnctcaatcctttgagggcattttactcttttgggctcattggatcacaaagcagacccaagactataacaacacagatgacattggcatctcagggtgatgatgacaccctacagaaaaatccagtttcgaagttgttctactgaactggaatagcagagccaaacattttcctaaatgttactggaatctgtgacgaatctctagttccacatctgctgcagtccaagcttgataaaacagaccaaatgagggtttgatatcagctctacctaaatccagaaatttaaccaaaataagttttcttttgggagcgattctgtagggaaacctgattttcttccacgctgtgccatcagatcttcctaaaattatctcacaggcctactctcatcacatttcttctgggttatttacccaagcagctcaagttcctcccactggttacatcaaggtataactttggtttggggaggaacaaatgtaaaatcggcaagcgattctgtagggaaacctgattttcttccacgctgtgccatcaga

SEQ ID NO: 69624 - DNA, 463 bp, Homo Sapiens
  misc_feature (45)..(45): n is a, c, g, or t
  misc_feature (86)..(86): n is a, c, g, or t
  misc_feature (120)..(120): n is a, c, g, or t
  misc_feature (126)..(126): n is a, c, g, or t
aatctcttaaaatcctggtaacctgaatggtaataacaacagtgnacttccaaagttggccataaccctggttcaaaagcttttcnactttgcaaaagatggtgggcaactgggcagctnctacanaccctggaaactgcaacaggcatctccctgctcccagaggcttgaaagtttagtttgtccaacaacatatttcaggaaatcccatagattctgtgcttgtgaacattcccttgtacccaggccctccacaaagagctgggatttgaattctttgacgaagctcagcagagactcaagggaaaggccgtccatcaaagcctggtacttgtcaatcatagaccaacgggcatattcccaggattaaaagccgtacatctttggccaaagtctcgggcttgatgaggatgttaaagtaggtcttcttcaactgctcagttatcattgtaaagacagctgg

SEQ ID NO: 69625 - DNA, 2223 bp, Homo Sapiens
ggctgggatggaatcggccgagggaatttgaagagattcggaaaattgaggataatgaatttcattaccaagaacagacagatccagttgagtatgtggaaaacatgtgtgagaacatgcagctgtacccattgcaggacattctcactggagatcagcttctttttgaatacaagccagaagtcattggtgaagccttgaatcagctagttcctcaaaaagcaaatcttgttttactgtctggtgctaatgagggaaaatgtgacctcaaggagaaatggtttggaactcaatatagtatagaagatattgaaaactcttgggctgaactgtggaatagtaatttcgaattaaatccagatcttcatcttccagctgaaaacaagtacatagccacggactttacgttgaaggctttcgattgcccggaaacagaatacccagttaaaattgtgaatactccacaaggttgcctgtggtataagaaagacaacaaattcaaaatccccaaagcatatatacgtttccatctaatttcaccgttgatacagaaatctgcagcaaatgtggtcctctttgatatctttgtcaatatccttacgcataaccttgcggaaccagcttatgaagcagatgtggcacagctggagtataaactggtagctggagaacatggtttaattattcgagtgaaaggatttaaccacaaactacctctactgtttcagctcattattgactacttagctgagttcaattccacaccagctgtctttacaatgataactgagcagttgaagaagacctactttaacatcctcatcaagcctgagactttggccaaagatgtacggcttttaatcttggaatatgcccgttggtctatgattgacaagtaccaggctttgatggacggcctttcccttgagtctctgctgagcttcgtcaaagaattcaaatcccagctctttgtggagggcctggtacaagggaatgtcacaagcacagaatctatggatttcctgaaatatgttgttgacaaactaaacttcaagcctctggagcaggagatgcctgtgcagttccaggtggtagagctgcccagtggccaccatctatgcaaagtgaaagctctgaacaagggtgatgccaactctgaagtcactgtgtactaccagtcaggtaccaggagtctaagagaatatacgcttatggagctgcttgtgatgcacatggaagaaccttgttttgacttccttcgaaccaagcagacccttgggtaccatgtctaccctacctgtaggaacacatccgggattctaggattttctgtcactgtggggactcaggcaaccaaatacaattctgaagttgttgataagaagatagaagagtttctttctagctttgaggagaagattgagaacctcactgaagaggcattcaacacccaggtcacagctctcatcaagctgaaggagtgtgaggatacccaccttggggaggaggtggataggaactggaatgaagtggttacacagcagtacctctttgaccgccttgcccacgagattgaagcactgaagtcattctcaaaatcagacctggtcaactggttcaaggcccatagagggccaggaagtaaaatgctcagcgttcatgttgttggatatgggaagtatgaactggaagaggatggtaccccttctagtgaggattcaaattcttcttgtgaagtgatgcagctgacctacctgccaacctctcctctgctggcagattgtatcatccccattactgatatcagggctttcacaacaacactcaaccttctcccctaccataaaatagtcaaataaataaactgcagtcacgttggcctgaagcaatgtgtattttaaaatgtgtgtgtttgtattttatggagttagttatactactgccttagggcttccattgaagttttgcactggcatcatagcatttgatttactttttatcctttgttgagactaataaacccagggttactgtaggagctggcaaaggaaaattagcagaatgggccaagcgagaccagaaagcctgcagcagcactttgagaagccctggcctgtgtcctctcagactgagaatctacttcttgaaaggccttacgtgaccagtatattgaataactaaatgctaggtactaatacctgtttttttaatgtatttttaaat

SEQ ID NO: 69626 - DNA, 433 bp, Homo Sapiens
cagcagtcttcatcttaagaagaaagctgcccagcatcagaggggtcaggttcccttctaaacagaatatgataatgctggcctgccaaaactacagcttcccctttaggaaagaactatggcaattccagagttcacaactgcattcagacctggcctacagagcatctcacactcactgtgcttgtgacattcccttgtaccaggccctccacaaagagctgggatttgaattctttgacgaagctcagcagagactcaagggaaaggccgtccatcaaagcctggtacttgtcaatcatagaccaacgggcatattccaagattaaaagccgtacatctctgtacagagggcagaaaaaaaacactcaaagttttgttattagaaatgaatcttcagaataaagaaatgtttggtcaaagttcaaaaaaa

SEQ ID NO: 69627 - DNA, 416 bp, Homo Sapiens
ttcagatgctaagcaggtccagggacatctgcctgggggttaggtttaagagctatctttcttcttgaatttctttcctatcttcccttcccttgtaagattgaagcactgaagtcattctcaaaatcagacctggtcaactggttcaaggcccatagagggccaggaagtaaaatgctcagcgttcatgttgttggatatgggaagtatgaactggaagaggatggtaccccttctagtgaggattcaaattcttcttgtgaagtgatgcagctgacctacctgccaacctctcctctgctggcagattgtatcatccccattactgatatcagggctttcacaacaacactcaaccttctcccctaccataaaatagtcaaataaataaactgcagtcacgttggcctgaaaaa

SEQ ID NO: 69628 - DNA, 475 bp, Homo Sapiens
tacccaccttggggaggaggtggataggaactggaatgaagtggttacacagcagtacctctttgaccgccttgcccacgagattgaagcactgaagtcattctcaaaatcagacctggtcaactggttcaaggcccatagagggccaggaagtaaaatgctcagcgttcatgttgttggatatgggaagtatgaactggaagaggatggtacccctttctagtgaggattcaaattcttctctgtgatagtgatgcacgctgacctacctgcccatacctctcctcctgctggcagagttgtatcatccccatcagagagagcgtcccttcccagggaacgccgctgaccgctgagggatctctgggatgcccgtctttcccagccggtggctccagctgccgctgcttggggggtagggcgggcggcggggccagcacctgcacggagtccaccccacagagagacatcgggg

SEQ ID NO: 69629 - DNA, 1914 bp, Homo Sapiens
caataggagcgcgcctggtttttacaaaccaggtttgtattgacccgcccattcggtttgtttgcccccgccttgattcgtgtcaccctgtgtttgagacccagtgggcagaccccgtcaatgtggggcaaaattaaagctgagatttgcacaggcccatttgagctgccaaatgaaccatttataatacctttgttagaccattgctcaaactaccagacttcaattgttggttttccaccaaaattggcaacatatgttgacatgaatgtgtgtccagggaattcataacccaggtagaatggacaagtaacatcagtatagcctaaattttttgccaccttggggaggaattggaattctgcctattttcgaattaatcctacagcactcactaaaaactaacagccatggcaccataatacattttgtgaggtacctagaatattactaagggaaacaagaaatgtgaggtaaaccgacctttccccaagaaactttgaagccagagattttaaacaattaaggcacttgaaaacattaagtatatgtacaaatgtgcaagtaaaacaaacagctgtaccaacgagtaacaaagaaacagtaaatcttcatcttaacaacctttaatagttatctaaatgcagagtttgtttatgaaatgaaacaaagcagtttgtcatttcttactataaaatattgaaaatcaagtgcgaaactcagccactattggctaaagaaactaaataaaaaacgttaatgacctagaaaagcaaaagcccattttaaactacttaaagcctctgcactagtccaatgagtcaaaggcaagggagaagtaaacctctaaaactgaagacgaccctctaaaggagaaaactatagaagttaaagtatgcatgcttattatactatgggaaaccaagaaggaagggagagaaaaagaaaaagcacagtctattcatccaggacaatcagtaaaaatctacagtaacctgatcaaccaaaaaatccttaggtgttgtgaaattacattggtcacttctgttatcttaaaacttaaaatgattgtctcatttaaaataaatgattctaaaataatatgattgtctcatttaaatagtaaatgattctaaaataatgtatatccttcttgcctcaccaaagaagtcactactcaagacagtctggtggaaatcctttcaaggtacaatagtgctagcatacttttttttaaagtacaaaggaaagtgtaattaaatcaatttagctctatacttttcaacagccataagaaaaatgttgggaggttcaagatacgaaggctttcaattctgtataacagactttagcttaagtttctccgctctgaaataaattttcaataaaatattaacagtatgatatctaaaacaggtttactactgctcacatcaagttacatcctctgaccaatccttaccttccttaatgtcaaagaacaaatcatagacattaagctagagcttacctttcactgtcttctaaggcactgttctttatattctcaatgacataagatgctttacaagtatgaacaataatctgttatacacactaatggtatcctttcatttctttaaatctggaatgtagttccttgtgtggcatcttatttctaatgtagaaaaaacagctgttatcaagcacaaaattttaatctaaggataccatttagtactactaaattaataaatttattccacttttgaaatgacagccaaaaatccacctaattgattctcatttggcacgttcttctcaattctgttcactaaattaaaattactaaatttaaactgccaagagccatgatgttgtctgcacaagacaacattttccatcactttcagaaagttatatttggcatgaaaa

SEQ ID NO: 69630 - DNA, 2156 bp, Homo Sapiens
  misc_feature (1185)..(1208): n is a, c, g, or t
  misc_feature (1259)..(1267): n is a, c, g, or t
  misc_feature (1526)..(1526): n is a, c, g, or t
  misc_feature (1562)..(1562): n is a, c, g, or t
  misc_feature (1591)..(1591): n is a, c, g, or t
  misc_feature (1620)..(1620): n is a, c, g, or t
  misc_feature (1678)..(1678): n is a, c, g, or t
  misc_feature (1697)..(1698): n is a, c, g, or t
  misc_feature (1720)..(1720): n is a, c, g, or t
  misc_feature (1806)..(1806): n is a, c, g, or t
  misc_feature (1814)..(1814): n is a, c, g, or t
  misc_feature (1852)..(1852): n is a, c, g, or t
  misc_feature (1924)..(1924): n is a, c, g, or t
  misc_feature (1936)..(1936): n is a, c, g, or t
  misc_feature (1942)..(1942): n is a, c, g, or t
  misc_feature (1955)..(1973): n is a, c, g, or t
  misc_feature (1978)..(1980): n is a, c, g, or t
  misc_feature (2034)..(2034): n is a, c, g, or t
  misc_feature (2059)..(2060): n is a, c, g, or t
cagtcgacggtaccggacatatgcccgggaattcggccattacggccggggactagtgcagaggctttaagtagtttaaaatgggcttttgcttttctaggtcattaacgttttttatttagtttctttagccaatagtggctgagtttcgcacttgattttcaatattttatagtaagaaatgacaaactgctttgtttcatttcataaacaaactctgcatttagataactattaaaggttgttaagatgaagatttactgtttctttgttactcgttggtacagctgtttgttttacttgcacatttgtacatatacttaatgttttcaagtgccttaattgtttaaaatctctggcttcaaagtttcttggggaaaggtcggtttacctcacattttttgtttccattagtaatattctaggtacctcacaaaatgtattatggtgccatggctgttagtttttagtgagtgctgtaggattaattcgaaaataggcagaattccattcctcccaaggtggcaaaaattagctatactgatgtaattgtcatttacctgggtatgaattccctgacacacattcatgtcaacatatgtagcaaattttgtgaaaacataacaatttgaagcttctgtaattttgagcactgctctaacaacaagcataatataaaattagttagattttgcaagtctacaaatgagctcttgcaacagaactcacagcctttttacttttttcccctaactttagcaatgtagtatcttgagccattaatttttgggtttttttaaaatccagaaggtatatagaaaccttttcagatttttcatctgatttgttcttgcagatgttcttctatcaaataccttattttaccttacagatatttgttgcacaggcagatactgctgtatttagacatttctatttcagttcattaaaaactgcaaaaccaatctgtatcatgtaccaaactgacttaaaataaatctacatgtttattgcaaaaaaaccaccaaaacacaaagcaccaccacaaccccgaaagagcacgcaagaaaagaaaaacgagcaccatccattcccaccgcgaacccgccagaacacaaacgaacaatacaattagggccaacaccaccacacaaacgcgcaaaccacaaaataaccatcttggtnnnnnnnnnnnnnnnnnnnnnnnnaacaaaaaacttcaccataaaaaccctttttccttgtcgccgcaccctcgnnnnnnnnnatattgtgtgagacccgcacaagaagcggcgcctctctccgtctctcctcttcctcgcacaacagaggaaactcctcttcgccgcccccacacccaccaacacggcgcgccgcctcgaccgcgggacaccccccacccaccccactcacaaacataaacctcccgcgcccccgcccgcggggcgcccgagacgacacacacacacccaccccgtcgctgtgagtctttttttatctatgagaaaaccacacaaaacacnatcccaccgaccaccctagaggcgtcagggaggggntattcgtccttctccctggctatgcgganaccgcgcgccgtcgtaactccaacccacngcgcggcagcgggcccctgcctccccccctcacccaccaccacacagcgtcgacgcgngccggtcccccctccactnnccccctccctttctacgcgccnccgccctctactctcaaattccaaacgccggagactaattgctgagggcgtcccgcgcgcgcacgccgaggctgttttggtgtggngcgcgtgntgtggatgcatatgcagcgcgacgagaacacgggctgntccagtcgggggggaggaataaacagtaactacgtgatagatagagcgcagaactcaaccgcgcgcgccggncgcccctagatntgatgnatggaagccagannnnnnnnnnnnnnnnnnnaaccnnntcatgaggagggaggcagtcgacgcggatcgtacatcctacggtagcggtcagncccgccgcgcgggcgggtggtgttnntgttgatggtagattgtttgagtgatgtcgaccctgccggcggtgggaccgcgcgacacatcacttttcttcggcccccgccagagcggcacgaca

SEQ ID NO: 69631 - DNA, 614 bp, Homo Sapiens
  misc_feature (42)..(42): n is a, c, g, or t
  misc_feature (503)..(511): n is a, c, g, or t
gagtgaagccgttcagaaaatcacagggctgaaaagcatatntatacattcggagaagtcgcaaatagaaaggaaaaacatattgaagggattacttgaaggagactatgaagttgtgagtgagcacaggagtcttgggacgaggcctagacttgatcagtgtcaggctggttgtcaattttgatatgccttcaagtatggatgagtatgtccatcagattggaagagtaggaagattaggtcaaaatggaacagcgattactttcatcaataataattcaaaaagactcttctgggatattgcaaaacgagtaaagcccacaggatccattcttccccctcagttattaaattccccataccttcatgaccagaagagaaaggaacaacagaaagataaacagacacagaatgatctggttacaggagctaatcttatggatattatcagaaaacatgataaaagtaattctcagaaatgattttctctgccacttcaatannnnnnnnnattgtatatagtcagcaaaaaattatggtttgcataaatggaaatgtacatgaattttaaaaattttaagatatttttaatttaataaaatttatataactaa

SEQ ID NO: 69632 - DNA, 726 bp, Homo Sapiens
  misc_feature (51)..(51): n is a, c, g, or t
tgggtttattgtatctgtagcatgtcactgattatttcagttagtttatanatgatttttaaaaaacatatctatttggaataagatacagcaacaatcattgctactgacttgttcaaccccttagttacactgtatgatcaacatataacaagatacagtggaatggcccatacagtatattactgttgtgtgatgattggctttggaagcagtttgattttgaaatgctttgatattctaattgacatggaacaagttttttccctgctccccaaatagaattttgtaaccaactttgctatttttttaaagtttgtaagaatgtgtcatttcttggggagtagccatccatcaacaaatatcctgactgctactttgttatatacaaaatacttacattgaacctggtggcataatgagtattttgaaagaagaaatttcttcactctcatttttatagaaatcttggaatcagcttaagctgtagcttttatgacaaaagacagtcatttttggtcagagtgatatttggtgacggaaacttgttcataatttattgttactatagaactatttggattttctcatttttagttctgatagttaaatattttggtttgttctgtgccttcagtttaaattatttcaggatttttcagatgtttaaataatggtgtgaatcattcaggatggaaataaaagtcatcctttctgtaaaaaaaa

SEQ ID NO: 69633 - DNA, 479 bp, Homo Sapiens
aatgattggttaaaaagtattgaattaaggatattggcattgaatactagtaaagtgaaaatacagtgcatagacaaataagtaaaaatttgcttttactaggcatactgactattttctgttaaactatcagagtttctaaattgtatgccagtcaacgcaaactggatgaaagcactagagtgcttgaaaaagatgacattgtagtgcccaaatacctaagaaagcttaacaagtgtctgggctgttacagtatttgctaaatacatatttacttaaaattgtaaagttctgatgaatactaagttacacatgtataattagttaacagtaaataaaaagtctttgtcaccgtggctgttttcagctgaaatgtcaggccagttgtgaatttgttgtgtatgctcattgataaagatccttttttgggctcatctgtatttaaggtttgttaataataataaaaggtattccaaact

SEQ ID NO: 69634 - DNA, 705 bp, Homo Sapiens
  misc_feature (161)..(204): n is a, c, g, or t
aagaaagattgatccagtaggtgttgattatattcttcaaaaattgggctttcatcatgctaggactactattcctaaatggcttcaaagaggagtcatggatccactggacaaggttctgtcagttcttatcaaaaagctcggtactgcactacaggatnnnnnnnnnnnnnnnnnnnnnnnnnnnnnnnnnnnnnnnnnnnntaatttgatctgtgaacaaattatgattgtgtctgttttattacactggagtgtttttttagtataataatttgaaatataactttaaaataattctaaatttgtggctataattaaaagtttgtaagttaacctgttctagttccatcattctgtgtacagtgaagtattgcatgataatgtaaattttgtgaaaaactagattaaaatatataactgcttgttatggtttataattatataatgtgcaatacaattcctgcatctttaaaatgtctgcagaataactgtgaatttttttgttattggattggccgtaacttttagaaaaaaatcttgttgatgataatgtgattttggggaggtcattaattgctttttcttttttaaatgtagacttatataaatacctgtttgtatatagcttgagtaattgtgatatgattgtataccactaaaatattgttaactattataataaagtcacagtaatggtttaat

SEQ ID NO: 69635 - DNA, 1483 bp, Homo Sapiens
  misc_feature (92)..(92): n is a, c, g, or t
ggcattctcttccttaacaagaaagacctttttgaggaaaaaataaagaggagtccgttaactatctgttatccagaatacacaggttccanatacatatgaagaggcagctgcctatattcaatgccagtttgaagatctgaacagaagaaaagataccaaggagatctatactcacttcacctgtgccacagacacgaagaatgtgcagtttgtttttgatgctgttacagatgtcatcattaaaaacaacttaaaggaatgtggactttattgagaagcatggatgttagtgaaagttactacagtgtggagtgttgagaccagacaccttttgctgtctcatggggcagctacaagcatgaacgggaccagggaatggcagcagcatgcagaatcttagcactctttagcacaatattttgtattagggaacttttaattgacatgagatgctaaagtcagacattggaattggaagaactataaagtgtgattcgatcgtcaagacatcacttggatttcttaatcttaaatgcttatggaagatgtgaagttgaggtgctgcattctagaacttcaatatgtagcttactctttttttccccccttcttaaaccaccagtggttcatttttaaggttttttcatcaagagaagaataactttactaaattttatttctttatttgcaaaagaatctttattaaaacaaacaatcttaactatgcacatgatgtgaccagatcatcttgaaaatattcctctttagtaggaactctttgtttttaactcttggtatggtcagaatataatacttccataattacttataattctttccggttactggggctataaatacaactttttaaatgaaatttatgttattatcctgctcaaagtaccattatggtttccatatggtaattacattggaaagttctgcaataagattctagttctctcttttctttaagcttatggttgaaggttaaccttgtttgtgcagattaccaaattactgctgatgtagtatgataaagtcagcttcttggatacagacacacccagggcagctgccaatcagaaatgcaaattgctaaattccaaacagaaccagtgactttgctgctacatatttactaaattgaccactttgattcttgcttgtttgtctcagttatagggagttttgtacatggtgcctcttgttttccatcttcatggccttttctgttgagaaacatctaaagtgtattaacagtgcatgcttttactttgtaaatgtggtgccaaatccctgtttgccatcgtttttactgtaccgatgttaactgtagtaatccttagccagtatgttcttttgctgaaactgttgcattttgggacttttttccactttgtcatgtgtacatttttaatctgttatagttggcggcagtattaaaatggtgagtaaagagcccaggtttgcaaaaaaa

SEQ ID NO: 69636 - DNA, 354 bp, Homo Sapiens
ggaacgaggccaaacctctgattaacactgtgaagtaagtgttttggaaggcagttccatgagttggctaacatttctttaaagcaaatgactgcttctaagcttagccgtacaagagattttggttgaactgaaaatattagtatttcattactgtgtgcagctctgtgatggacaagcaagttgttggcacatccaccaaaaacaattacttctccttcatcgctggcacaagctgtgtgccataaccttggtttttcggtatatggatgattaaattgtatccattcatttttactgatgaattaattccacaaaggcatatgcccagttggtcgatgttggagcggccgc

SEQ ID NO: 69637 - DNA, 1811 bp, Homo Sapiens
gtggtaccggtccggaattcccgggatatcgtcgacccacgcgtccgagggagccggcccgacgcggaccgcttccctgcagtgccccgagtcccgggcccgcgccgccgccgcccggctccgctcgcggcccctctgtctgcaggcgtgccccggcggcggcggagagccgtcctcggccgaggaggctgggaaacgcgagcgcaggcggcagagaggcctcaacgccgtccctttcgccaccgccttttccttgcctcgcgccgctgtgcatttctctccttttcctttgtttttttggcccctcgcgggtgtgggcattgttggttagcaaaagtgcagcctcaagatggctgatggcaacgaggatctgcgggctgacgacttgcctgggccagccttcgagagctatgagtccatggagcttgcctgccccgctgagcgcagcggccacgtagccgtcagcgacgggcgccacatgttcgtctggggcggctacaagagtaatcaagtcagaggattatatgacttttatctgcctagagaagaactatggatctacaacatggagactggaagatggaaaaaaatcaacactgaaggtgatgttcctccttctatgtcaggaagctgtgctgtgtgtgtagacagggtgctgtacttgtttggaggacaccattcaagaggcaataccaataagttctacatgctggattcaaggtctacagacagagtgttacagtgggaaagaattgattgccaaggaattcctccatcatcaaaggacaaacttggtgtctgggtatataaaaacaagttaatattttttggagggtatggatatttgcctgaagataaagtattgggaacttttgaattcgatgaaacatctttttggaattcaagtcatccaagaggatggaatgatcatgtacatattttagatactgaaacatttacctggagccagcctataactactggtaaagcaccttcacctcgtgctgcccatgcctgtgcaactgtcggaaatagaggcttcgtgtttggaggcagatatcgagatgctagaatgaatgatcttcactatcttaatctggatacatgggagtggaatgaattaattccacaaggcatatgcccagttggtcgatcttggcactcactaacaccagtttcttcagatcatctttttctctttggaggatttaccactgataaacagccactaagtgatgcctggacttactgcatcagtaaaaatgaatggatacaatttaatcatccatataccgaaaaaccaaggttatggcacacagcttgtgccagcgatgaaggagaagtaattgtttttggtggatgtgccaacaacttgcttgtccatcacagagctgcacacagtaatgaaatactaatattttcagttcaaccaaaatctcttgtacggctaagcttagaagcagtcatttgctttaaagaaatgttagccaactcatggaactgccttccaaaacacttacttcacagtgttaatcagaggtttggtagtaacaacacttctggatcttaaggcttcataaataatgcctatgatcaccttgcatggacagcaatcctgtaaacatcacagagtggcatcatttgtataattatatgcattgttgtagtttgcacctgttggttttaatgtgcatgtgaatggcctagagaacctatttttgtgtctaaagtttacaataaatgtatttaacaccagtaagctgtcctctattaaagtaaagtaatggttgggctttttaccctgaaaaaaa

SEQ ID NO: 69638 - DNA, 515 bp, Homo Sapiens
agagattttggttgaactgaaaatattagtatttcattactgtgtgcctgaaaaataaataggaagaacacatttaaaagcaaatgctttgcaagtaagtttcagtaataatgtgaaggtagtatacttacagctctgtgatggacaagcaagttgttggcacatccaccaaaaacaattacttctccttcatcgctggcacaagctgtgtgccataacctgcatttaaaacaaaaacgagtttgaagccacccagaacaccagttggccattttatactacagaatagagctatgaaataaagactagcgatcttaaggtagttcagaccaaaacatcatggcgagaagtaaaatcttaagggaaagtagcaaaagcagatcaatcaatatctattttatctggatattattttctctctctggtcgttctcatttatgcaatgaggagtttgaactgaacgatctgttctctaggtctttgttagcaataaaaatcgtatgggagctgaaaaa

SEQ ID NO: 69639 - DNA, 1151 bp, Homo Sapiens
  misc_feature (162)..(162): n is a, c, g, or t
  misc_feature (171)..(574): n is a, c, g, or t
ggttccgtaagcgcaggtcgaccagagagcgccgaggagttccagggaacgcctgtatcttatgtcctgtcggttccccaccctgactgacgtcgatttttgatgtcgtcagggggcgagcctatgaaaaacgcagcacgcgccttttacgttcctgccctntgctgcccnnnnnnnnnnnnnnnnnnnnnnnnnnnnnnnnnnnnnnnnnnnnnnnnnnnnnnnnnnnnnnnnnnnnnnnnnnnnnnnnnnnnnnnnnnnnnnnnnnnnnnnnnnnnnnnnnnnnnnnnnnnnnnnnnnnnnnnnnnnnnnnnnnnnnnnnnnnnnnnnnnnnnnnnnnnnnnnnnnnnnnnnnnnnnnnnnnnnnnnnnnnnnnnnnnnnnnnnnnnnnnnnnnnnnnnnnnnnnnnnnnnnnnnnnnnnnnnnnnnnnnnnnnnnnnnnnnnnnnnnnnnnnnnnnnnnnnnnnnnnnnnnnnnnnnnnnnnnnnnnnnnnnnnnnnnnnnnnnnnnnnnnnnnnnnnnnnnnnnnnnnnnnnnnnnnnnnnnnnnnnnnnnnnnnnnnnnnnnnnnnnnnaagaattcggcacgaggacacacactaaagaaaacatgacttgatgcttggcatcacgtaaacaaactccttgcctctaaagtcagatcatgaagggataggtgttcatctaaggttacagttatgttaccgaaacacaaaactgccaaaatcttactctgctgttatgaatgtttaccatcagcattattttatcatttaatatgtgctcactgattgttaactgtagcttcagcgcgtgccaagcagttgacttaataggatcatcttgtgaatttgtttacgtgatgccaagcatcaagtcatgttttctttagtgtgtgtgcttacacaggtgttaaacagtttttctctattttaaactgagccttctttttaatatattcccgaagagatatgtaaataagctctcagagtttctgtgatgatttgttgagccttgctggacaagtggtttgtttgtgtgcaaaccaaactttctttacccagtgcaatagatttgtttgactgcttgtgtctttttatgacctgtttgccttttagaaaattggtaaataaagcaagtataatattaaaa

SEQ ID NO: 69640 - DNA, 844 bp, Homo Sapiens
  misc_feature (67)..(67): n is a, c, g, or t
agcttcagctgaactatcatcattgaaaagaaagaaaaagccaacctacgaggaacgggccatttgntgagtacaatgaaaacccaaaaggatacatgcttgatgatgcagatagcagttcattagaaatcctagaaaacagtgaaacaacaccaagcaaagacatgaaaaaaacaaagaagatttttctgttcaaaagagtcccctcaataaatcaaaagattgtcaagaataacaatgagccgctcccagagataaaatccataggagaccagatcattttaaaaagtgataataaagatgccgaccagaaccacatgagtcagaatcatcagaatatcccaccaacaaatacagagagaagatcaaaatcctgtacaatactataaatatatatttatgttttcacagtcaccaagtgtattgtaatgtatacttgaaaaatgttataacttatgaagtaaagtttctgatagtagtctttaaaagatataagacttaatatgttttattcagcttctataagtgtgaccagttttgatatttatttatgctaatatttttaacaagtcatttcaaaatatgtgtatctcaaattctccctaaagtgttgtggccttaactgttcagtattgcaataaaaaatatatttttatatgtggaaaattgaaataagatatttcctagtttttactaaacaattttacttctttataattttataaggcaatatttgcaatcttacgacactgtaacagtttttgatgtatttacaatttttacaaaactgaggtaaaattgtttataatgaacatattttaataaactatatctggtcagttcc

SEQ ID NO: 69641 - DNA, 154 bp, Homo Sapiens
ctccagactactttaaatgtctctgctctgactgaattgaaggaattgtaagtttcagttgctgaatatatcagtatatctgaactccggatctttttatttcctatttttggcttcctacataaattaataaagtctgtctatatttaaggtt

SEQ ID NO: 69642 - DNA, 1025 bp, Homo Sapiens
  misc_feature (121)..(121): n is a, c, g, or t
  misc_feature (200)..(207): n is a, c, g, or t
  misc_feature (209)..(232): n is a, c, g, or t
  misc_feature (234)..(234): n is a, c, g, or t
  misc_feature (274)..(274): n is a, c, g, or t
tccgatgaacgcatgggcaccatatggagtgtcatcttgccccagttacatttgtccgtgtatgtgttgattgagcgtaacattcaacagaacacttgcatgataggattatcgactcatntaggattggcctcgagcccagaattcgcagagggcccaggggtgggaaataaacccccctgggagtgggggccggggcnnnnnnnngnnnnnnnnnnnnnnnnnnnnnnnncntccacattctactccacagtacagactgtccccaacttanacagtggtcaacttaaaccatgtttcaactttacaattggtctgttggggtattaaatgaatttgtgacttaggatattttcatttatgatgggtttatcaggaagtaaccccatggtaagttgaggcatatctgtatatatttaaacctaattaattcttgagctgaaaataaataaaccaggatggcagggaccaacccctaatccctccccagcggcaagcccctcttttcagagtgggcagagggttgcctatggtgggcactaggaatgaggtcccctgcctcgatgcgggtcctaggagaaaaagtcctacttttctgggtccccaggtgcagcacctcccggagactgtttctcccatggcctcctgagtgatgggccctgcctccctgtgcctcatcctcaggctggttggagcagagggtgggcaggagccccagcacagactggggggtgctcacagcagggccaccttgatgcaggctggaatgttatccctggggtgtgcttggaccccacctgctttctttctctcctgcccctcccctactctcactgtaatttatggaccctgcccgcctgcgtgttgtgtgtatgtcctgtgccttttctcactattgtttgggtgtgggagggggtggtttttcactgaaaaggggggtacacctatagctttcttgatgttcaatcaatcagtcactgtgtcccagacatattcaataaacacagattggtaccaccaaaaaa

SEQ ID NO: 69643 - DNA, 1225 bp, Homo Sapiens
  misc_feature (380)..(468): n is a, c, g, or t
actttgatacacctaggaagaactaggaaacagccacacaggaccttttacggtcctgcataatgtggcagttgacgacattacatactagaatatcccaagatatctggagacacgacacacgcatgtggatgaatagatacactagctacatctgaacgacagaggaaaggggatattgagaagagaagcggagggagaccgaatagccaaactgccattcgccgacaagttggcagttcataattgcgaatgcgacgacggattaccggatggaaagcggccagtgggcacagcgcaattaatgtgagatagctcactcaatagccaccccaggaattacacatgtataattccagatagtataatgtgtgaactcnnnnnnnnnnnnnnnnnnnnnnnnnnnnnnnnnnnnnnnnnnnnnnnnnnnnnnnnnnnnnnnnnnnnnnnnnnnnnnnnnnnnnnnnnaagaattggacacgaggactatttttattattgtttgtcctttataaattttcttaaagattaagaaaatttaagaccccattgagttactgtaatgcaattcaactttgagttatcttttaaatatgtcttgtatagttcatattcatggctgaaacttgaccacactattgctgattgtatggttttcacctggacaccgtgtagaatgcttgattacttgtactcttcttatgctaatatgctctgggctggagaaatgaaatcctcaagccatcaggatttgctatttaagtggcttgacaactgggccaccaaagaacttgaacttcaccttttaggatttgagctgttctggaacacattgctgcactttggaaagtcaaaatcaagtgccagtggcgccctttccatagagaatttgcccagctttgctttaaaagatgtcttgttttttatatacacataatcaataggtccaatctgctctcaaggccttggtcctggtgggattccttcaccaattactttaattaaaaatggctgcaactgtaagaacccttgtctgatatatttgcaactatgctcccatttacaaatgtaccttctaatgctcagttgccaggttccaatgcaaaggtggcgtggactccctttgtgtgggtggggtttgtgggtagtggtgaaggaccgatatcagaaaaatgccttcaagtgtactaatttattaataaacattaggtgtttgttaaaaaaa

SEQ ID NO: 69644 - DNA, 1865 bp, Homo Sapiens
  misc_feature (1644)..(1651): n is a, c, g, or t
  misc_feature (1653)..(1653): n is a, c, g, or t
  misc_feature (1655)..(1663): n is a, c, g, or t
  misc_feature (1665)..(1685): n is a, c, g, or t
  misc_feature (1687)..(1719): n is a, c, g, or t
  misc_feature (1721)..(1725): n is a, c, g, or t
  misc_feature (1727)..(1756): n is a, c, g, or t
  misc_feature (1758)..(1761): n is a, c, g, or t
  misc_feature (1763)..(1764): n is a, c, g, or t
  misc_feature (1766)..(1766): n is a, c, g, or t
  misc_feature (1774)..(1787): n is a, c, g, or t
  misc_feature (1795)..(1798): n is a, c, g, or t
  misc_feature (1801)..(1801): n is a, c, g, or t
  misc_feature (1806)..(1809): n is a, c, g, or t
cgatagtaatatgaccagtggttaaaaagaggctggtacggtcggaatcccgggatatcgtcgaccacgcgtcgccacgcgtcgaatttagaaattaacatgatatcttaaattacctttatgaaatatagtttgtataatagcatagattttccttcaaaaaatgaacatttatatatctacaaaaatatggagaagagtaatttgaaagcctactttctgaagaaaatggtgggatttttttatcatgattaaatatcaaaaaattgccctatgaaaactttaaatctctaaaacatttgaaatactaccatatttgtgatttattgagaataaaaatccattttgaaatgtaaaatttttatgatctgattcagttttaagaaaacatgaatgaactagaagatattaaaaacatttgacattggtaagaaatattgatactgatattgatttttatataggtatttatttcagaattgatattttgagaaaaatacatgtgagtcattttttctgtttctcttttctcttaacgattatcactgtaattctgaatctgaaaggtaaaacaattagtcaaaatattattgccatcattctacctgtgttatgaaactacttattcatagttaattctcattaacacttacatttccataaagaaaactcaagtattaataaaagagactttactggcttaagagggctgtgaaagatttttgatagtgaatcatgaccctaagggagagatttgtgtgataaaagtattgtatataatagatcagcgatttttgtaaggcaaacagaatttgtaagttggcagatcttcctaagttgcaaaatgtaatgatgagcttggtggagaagaatgagtcgttcttggaatacctatgtgcagccactacccatctcaatgtcaccttgtttgcattcttggatagcttgtatatgtagtagtttgatgaataatttaaagaaaaacacctaaaatttgaaaaatgattgtaggatcaaaaaaggcagatgaaattacttaatactcagtgttttggagagtattccttttagtttgttggttggctggtttgaacgatagaaatatgcagcatgcaatatatgcttatatttcattttaatttctgatatataatgaacttcttgggagaggtactgaatctttgatgttttttgtcattgttctcaagtgcaatataacaatgtaaccaaatctagataatttcaaagttgtcattaatttagtaagcctaatataaacaaatatttgtattatttttgttagcaggaaagagtgattaagtgaggttatttacccctaaatggtccattctgcattgtatttcaggctggaaatgaattattctttaccagttttgaaacactttgaaatatcctaaggtaacttggaagctgtgtagtatatcaaattaatttgctacctaataacatagaaagtaaatatctttgtggtcacccacattgggtgagacagaaaatgaatctgttctaaaatttgtaatttgctaacttgatttgagttagtgaaaactggtacagtgttctgcttgatttacaacatgtaacttgtgactgtacaataaacataagcatatgggtaccaannnnnnnnanannnnnnnnnannnnnnnnnnnnnnnnnnnnnannnnnnnnnnnnnnnnnnnnnnnnnnnnnnnnnannnnnannnnnnnnnnnnnnnnnnnnnnnnnnnnnnannnntnnanaaaaaaannnnnnnnnnnnnnaaaatttnnnnccnccccnnnncccaccaaaaaattttaaaaaaccttttttgtcgggggggcccgccccccaaagag

SEQ ID NO: 69645 - DNA, 1479 bp, Homo Sapiens
  misc_feature (1187)..(1213): n is a, c, g, or t
  misc_feature (1263)..(1300): n is a, c, g, or t
ttactactcacgacccacagtaggtggaacgggccggaattttgcgatctttcccagcacattcttggatgggagcatgagggcaccagtcaccttttaacctattgggggacattagcagtcacatgttgagtgcaaacgagggtacttttgtgcatgtgtacaaacaggcagttacaagcgtgtcattttcagtggctccattttaaatcagtctgctgcctcagaatcccgtacgcctgaaggttttaagttgcatgtgcacctgaaactcgtatatgagtattttctgtctgtgcttttagagaggaggaattctgtaacgacttttgtttcgggttaggaagagaatgatctctttcagtgcaccgccacttatgttacctttttccttatatttctttgtgtttccagttgcaagaacagcaaggaaaaggaagccctctccagaaccagaaggtgaagtcgggccccctaagatcaacggagaggcccagccgtggctgtccacatccacagaggggctcaagatccccatgactcctacatcctcttttgtgtctccgccaccacccactgcctcacctcattccaaccggaccacaccgcctgaagcggcccagaatggccagtcccccatggcagccctgatcttagtagcagacaatgcagggggcagtcatgcctcaaaagatgccaaccaggttcactccactaccaggaggaatagcaacagtccgccctctccgtcctctatgaaccaaagaaggctgggccccagagaggtggggggccagggagcaggcaacacaggaggactggagccagtgcaccctgccagcctcccggactcctctctggcaaccagtgccccgctgtgctgcaccctctgccacgagcggctggaggacacccattttgtgcagtgcccgtccgtcccttcgcacaagttctgcttcccttgctccagacaaagcatcaaacagcagggagctagtggagaggtctattgtcccagtggggaaaaatgccctcttgtgggctccaatgtcccctgggcctttatgcaaggggaaattgcaaccatccttgctggagatgtgaaagtgaaaaaagagagagactcgtgacttttccggtttcagaaaaacccaatgattacccttaattaaaactgcttgaattgnnnnnnnnnnnnnnnnnnnnnnnnnnnccaagacaagggaaatgtagacttcataaacatggctgtataattttgannnnnnnnnnnnnnnnnnnnnnnnnnnnnnnnnnnnnncgacaaaaggtatgtacttataaagacatttttttcttttgttaacgttattagcatatctttgtgctttattatcctggtgacagttaccgttctatgtaggctgtgacttgcgctgcttttttagagcacttggcaaatcagaaatgcttctagctgtatttgtatgcacttatttt

SEQ ID NO: 69646 - DNA, 1594 bp, Homo Sapiens
  misc_feature (734)..(753): n is a, c, g, or t
  misc_feature (1061)..(1063): n is a, c, g, or t
  misc_feature (1245)..(1287): n is a, c, g, or t
  misc_feature (1330)..(1356): n is a, c, g, or t
cgccaagtttacattttcatcggtttaagggggttcctggtaataattgatgatttattggttttaaaaaaatcattttactgatgcaaaatagtgatcaaaagaaattagtttacaaaaagacttctaaaaatattttgagaggtggggcctgtctattatataaaacccttaatttctttaatttccactagtttatcatttttttccagaacagtattattcacttggtatttcaaacacatgttaagaaggaaattacaggtttcctccacccacatttgggctgtcactgatatgcccaagggcagtcctggcagcaccacgcggctgttactgtcattgtaccatactgtattcagcactcactagaaacagggtataggtgatagtatcaacagcaatagcactacaggtaaatgataaacaaaacaaaacagaaacaaaaccaatcccacaatctccaagttcacctggactgtaacttctcttgcaactctttcaaaataaaggacaacagcaacaacaaacagacctctagggtgtttaaaaagatgaagtggcgctgcagagctgggctctgctcaaagatggcagtgccatcttgtacacaccaccatccattataaccgccttccatcactggaattgtatcttatgtaaccaactagcatgcagcattgtaatcttacaactgatcacgtggacagtgaacagcggtcaactttgtcttnnnnnnnnnnnnnnnnnnnnccccaaaagaccacacaatcctgaaaatttcccagcagcactctcagtcatcagtatctcaggaactgaacttttgagcaaaatagagattcaaaatccactttcctactcctctgaggacaatgtttcagggtaaactggtggtatttccccagtggcatgcccacttgacaacatgcccgttcgatcatttcctttccttctccaccacttggcctccggcctgagaaaggggccagcaataaggaatgacagacagtaaggcaatcttacaatgtcagaaaatgtatttggcttttttctttttnnnaaaataagtgcatacaaatacagctagaagcatttctgatttgccaagtgctctaaaaaagcagcgcaagtcacagcctacatagaacggtaactgtcaccaggataataaagcacaaagatatgctaataacgttaacaaaagaaaaaaatgtctttataagtacataccttttgtcgtcnnnnnnnnnnnnnnnnnnnnnnnnnnnnnnnnnnnnnnnnnnntatacagccatgtttatgaagtctacatttcccttgtcttggnnnnnnnnnnnnnnnnnnnnnnnnnnncaattcaagcagttttaattaagggtaatcattgggtttttctgaaaccggaaaagtcacgagtctctctcttttttcactttcacatctccagcaaggatggttgcaatttccccttgcataaaggcccaggggacattggagcccacaagagggcatttttccccactgggacaatagacctctccactagctccctgctgtttgatgctttgtctggagcaagggaagcagaact

SEQ ID NO: 69647 - DNA, 507 bp, Homo Sapiens
  misc_feature (140)..(151): n is a, c, g, or t
  misc_feature (182)..(218): n is a, c, g, or t
  misc_feature (267)..(293): n is a, c, g, or t
aaaataagtgcatacaaatacagctagaagcatttctgatttgccaagtgctctaaaaaagcagcgcaagtcacagcctacatagaacggtaactgtcaccaggataataaagcacaaagatatgctaataacgttaacnnnnnnnnnnnntgtctttataagtacataccttttgtcttcnnnnnnnnnnnnnnnnnnnnnnnnnnnnnnnnnnnnncaaaattatacagccatgtttatgaagtctacatttcccttgtcttggnnnnnnnnnnnnnnnnnnnnnnnnnnncaattcaagcagttttaattaagggtaatcattgggtttttctgaaaccggaaaagtcacgagtctctctcttttttcactttcacatctccagcaaggatggttgcaatttccccttgcataaaggcccaggggacattggagcccacaagagggcatttttccccactgggacaatagacctctccactagctccctgctgtttgatgcttt

SEQ ID NO: 69648 - DNA, 647 bp, Homo Sapiens
tgcggccgccagcctgggctccgcgcagcccaccgatctgggcgcccacaagcggccggcatccgtgtcgagcagcgctgccgtggagcacgagcagcgtgaggcggcagccaaggagaaacaaccgccgccgcctgcgcaccggggcccggccgacagcctgtccaccgctgccggggccgccgagctgagcgcggaaggtgcgggcaagagccgcgggtctggagagcaggactgggtcaacaggcccaagaccgtgcgcgacacgctgctggcgctgcaccagcacggccactcggggcccttcgagagcaagtttaagaaggagccggccctgactgcagttgcaagaacagcaaggaaaaggaagccctctccagaaccagaaggtgaagtcgggcccccttaagatcaacggagaggcccagccgtggctgtccacattccacagaggggctcaagacccccatgactcctacatcctcttttgtgtctccgccaccacccactgcctcacctcattccaaccggaccacaccgcctgaagcggcccagaatggccagtcccccatggcagccctgatcttagtagcagacaatgcagggggcagtcatgcctcaaaagatgccaaccaggttcactccac

SEQ ID NO: 69649 - DNA, 556 bp, Homo Sapiens
gcggccgccagcctgggctccgcgcagcccaccgatctgggcgcccacaagcggccggcatccgtgtcgagcagcgctgccgtggagcacgagcagcgtgaggcggcagccaaggagaaacaaccgccgccgcctgcgcaccggggcccggccgacagcctgtccaccgcggccggggccgccgagctgagcgcggaaggtgcgggcaagagccgcgggtctggagagcaggactgggtcaacaggcccaagaccgtgcgcgacacgctgctggcgctgcaccagcacggccactcggggcccttcgagagcaagtttaagaaggagccggccctgactgcaggcaggttgttgggtttcgaggccaacggggccaacgggtctaaagcagttgcaagaacagcaaggaaaaggaagccctctccagaaccagaaggtgaagtcgggccccctaagatcaatggagaggcccagccgtggctgtccacatccacagaagggctcaagatccccatgactcctacatcctcttttgtgtctccgccaccacccactg

SEQ ID NO: 69650 - DNA, 1570 bp, Homo Sapiens
  misc_feature (1365)..(1394): n is a, c, g, or t
catagctcttcccgaggtcatgatggcatgagccaacgtagtggaggtggcacaggaaaccatcgccattggaatggcagcttccactcccggaaagggtgtgcttttcaggaaaagccacctatggagattagggaagaaaagaaagaagacaaggtggaaaagttgcagtttgaagaggaggactttccttccttgaatccagaagctggcaaacagcatcagccatgcagacctattgggacaccttctggagtatgggaaaacccgcctagtgccaagcaaccctccaagatgctagttatcaaaaaagtttccaaagaggatcctgctgctgccttctctgctgcattcacctcaccaggatctcaccatgcaaatgggaacaaattgtcatccgtggttccaagtgtctataagaacctggttcctaagcctgtaccacctccttccaagcctaatgcatgggaaagctaacaggatggagcacaagtcaggatccctttcctctagccgggagtctgcttttaccagtccaatctctgttaccaaaccagtggtactggctagtggtgcagctctgagttctcccaaagagagtccctccagcaccacccctccaattgagatcagctcctctcgtctgaccaagttgacccgccgaaccaccgacaggaagagtgagttcctgaaaactctgaaggatgaccggaatggagacttctcagagaatagagactgtgacaagctggaagatttggaggacaacagcacacctgaaccaaaggaaaatgcggaggaaggctgtcatcaaaatggtcttgccctccctgtagtggaagaaggggaggttctctcacactctctagaagcagagcacaggttattgaaagctatgggttggcaggaatatcctgaaaatgatgagaattgccttcccctcacagaggatgagctcaaagagttccacatgaagacagagcagctgagaagaaatggctttggaaagaatggcttcttgcagagccgcagttccagtctgttctccccttggagaagcacttgcaaagcagagtttgaggactcagacaccgaaaccagtagcagtgaaacatcagatgacgatgcctggaagtaggcatataaatgctcacagttaaatctgacccagtaaactctgtgtgtttagggagtatacaaaagaaatcgttcttttccttttcttatgttgttgaatacttcattcacaagggaaataatcatatcccaaagagagagcaattggcttgttttgcttttgttattgttcttccctgttatctgctttatagagagaagtttgtgtggtgggacagattttttaannnnnnnnnnnnnnnnnnnnnnnnnnnnnnccagtatatatggggcgatgcacaggtaggagctggcagtgcagggaagaggagacactggtctgcagcaacagcttctactaccagcccttggggcactcacccctgtgatcaagcaatcattgtcaatgacaaagtgactattgaagttataattgtattaaattaatgctaat

SEQ ID NO: 69651 - DNA, 438 bp, Homo Sapiens
  misc_feature (34)..(34): n is a, c, g, or t
  misc_feature (50)..(50): n is a, c, g, or t
  misc_feature (54)..(85): n is a, c, g, or t
  misc_feature (329)..(358): n is a, c, g, or t
ttcccctattctccaaaatattatacgggctgtnccccaaaaggggaaangggnnnnnnnnnnnnnnnnnnnnnnnnnnnnnnnncccacatatgcttggttaagggctaaagttacccgagcagccaaaaataaaataaaatatccaaattattagcattaatttaatacaattataacttcaatagtcactttgtcattgacaatgattgcttgatcacaggggtgagtgccccaagggctggtagtagaagctgttgctgcagaccagtgtctcctcttccctgcactgccagctcctacctgtgcatcgccccatatatactggnnnnnnnnnnnnnnnnnnnnnnnnnnnnnnttaaaaaatctgtcccaccacacaaacttctctctataaagcagataacagggaagaacaataacaaaagcaaaacaaaa

SEQ ID NO: 69652 - DNA, 865 bp, Homo Sapiens
ttccggtttccttcagtgggctggtcccgagcacgagctgtgaggggattcacttgtgtgcggaactcctcggaaccatggcgtccctttcccttgcacctgttaacatctttaaggcaggagctgatgaagagagagcagagacagctcgtctgacttcttttattggtgccatcgccattggagacttggtaaagagcaccttgggacccaaaggcatggacaaaattcttctaagcagtggacgagatgcctctcttatggtaaccaatgatggtgccactattctaaaaaacattggtgttgacaatccagcagctaaagttttagttgatatgtcaagggttcaagatgatgaagttggtgatggcactacctctgttaccgttttagcagcagaattattaagggaagcagaatctttaattgcaaaaaagattcatccacagaccatcatagcgggttggagagaagccacgaaggctgcaagagaggcgctgttgagttctgcagttgatcatggttccgatgaagttaaattccgtcaagatttaatgaatattgcgggcacaacattatcctcaaaacttcttactcatcacaaagaccactttacaaagttagctgtagaagcagttctcagactgaaaagctctgggcaacctggaaggcaattcattattatcaaggaagctaaggaggaagtttggccagatttcctattttagatcaaaggctttcctgttggatacaacacatggggtcaatcaaccacaacgaattggaaatggcaaattctttttgcacatcgcgtttgttccgcacaataaggacattggccccgggtagagtgacctccgcaagg

SEQ ID NO: 69653 - DNA, 2705 bp, Homo Sapiens
  misc_feature (2009)..(2112): n is a, c, g, or t
  misc_feature (2119)..(2174): n is a, c, g, or t
  misc_feature (2356)..(2371): n is a, c, g, or t
gataggtgaatataagaacacgtcgttacaaaaagcaggctggtaccggtcccggaattcccgggatatcgtcgacccacgcgtccgcggacgcgtgggctggtcccgagcacgagctgtgaggggattcacttgtgtgcggaactcctcggaaccatggcgtccctttcccttgcacctgttaacatctttaaggcaggagctgatgaagagagagcagagacagctcgtctgacttcttttattggtgccatcgccattggagacttggtaaagagcaccttgggacccaaaggcatggacaaaattcttctaagcagtggacgagatgcctctcttatggtaaccaatgatggtgccactattctaaaaaacattggtgttgacaatccagcagctaaagttttagttgatatgtcaagggttcaagatgatgaagttggtgatggcactacctctgttaccgttttagcagcagaattattaagggaagcagaatctttaattgcaaaaaagattcatccacagaccatcatagcgggttggagagaagccacgaaggctgcaagagaggcgctgttgagttctgcagttgatcatggttccgatgaagttaaattccgtcaagatttaatgaatattgcgggcacaacattatcctcaaaacttcttactcatcacaaagaccactttacaaagttagctgtagaagcagttctcagactgaaaggctctggcaacctggaggcaattcatattatcaagaagctaggaggaagtttggcagattcctatttagatgaaggcttcctgttggataaaaaaattggagtaaatcaaccaaaacgaattgaaaatgctaaaattcttattgcaaatactggtatggatacagacaaaataaagatatttggttcccgggtaagagttgactctacagcaaaggttgcagaaatagaacatgcggaaaaggaaaaaatgaaggagaaagttgaacgtattcttaagcatggaataaattgctttattaacaggcaattaatttataattatcctgaacagctctttggtgctgctggtgtcatggctattgagcatgcagattttgcaggtgtggaacgcctagctcttgtcacaggtggtgaaattgcctctacctttgatcacccagaactggtgaagcttggaagttgcaaacttatcgaggaagtcatgattggagaagacaaactcattcacttttctggggttgcccttggtgaggcttgtaccattgttttgcgtggtgccactcaacaaattttagatgaagcagaaagatcattgcatgatgctctttgtgttcttgcgcaaactgtaaaggactctagaacagtttatggaggaggctgttctgagatgttgatggctcatgctgtgacacagcttgccaatagaacaccaggcaaagaagctgttgcaatggagtcttatgctaaagcactgagaatgttgccaaccatcatagctgacaatgcaggctatgacagtgcagacctggtggcacagctcagggctgctcacagtgaaggcaataccactgctggattggatatgagggaaggcaccattggagatatggctatcctgggtataacagaaagttttcaagtgaagcgacaggttcttctgagtgcagctgaagcagcagaggtgattctgcgtgtggacaacatcatcaaagcggcacccaggaaacgtgtccctgatcaccacccctgttaagcattcccacgtgctgtcgatctttggaccagtttctagcaaagttgtgtttgaaagatactctattaaagaagactgtggaatctgtttatcggtgcccattatatccttaagtttggatatttagctgaccttcgctttaacataggtctaatttatttgccgtgtcattttccatacaaatcagttgatttaaaaaagttcatttctcatactgtgcattaaaataaaaatttgaacaattnnnnnnnnnnnnnnnnnnnnnnnnnnnnnnnnnnnnnnnnnnnnnnnnnnnnnnnnnnnnnnnnnnnnnnnnnnnnnnnnnnnnnnnnnnnnnnnnnnnnnnnnccaggannnnnnnnnnnnnnnnnnnnnnnnnnnnnnnnnnnnnnnnnnnnnnnnnnnnnnnngcaaaaaagggcaataggcggttcccaaggaaaacctcggaaaaaaaataaggcttggaattctccccagaaaaaaccccccgggagaaacccaagcgttctaacaaaccccaaaggaatttcggggggaataccgggacctttcaaagggaaccccaagaaaggggaaaacaaaaattcgnnnnnnnnnnnnnnnnaaacaagagcccggggggaaaattccttgagcgcattcccgccaacgtgggaagccctccaaaaagaggccttaggaaaccctgaaagcgcccaccggaaattccccaccctggtaccactaaccccgaacaaattttgccccaggggggaaaaaacgcgggggcggaaaaaaattggggccccattttggcgccgcgcgttataaaacccacacagggggggaaataaactcccccgaggggaatgcggccccgaagaaacaaataaacctatttttccgccacaaaaaaccccttttagggagaaacccccgccggagggaatatacggcgg

SEQ ID NO: 69654 - DNA, 2277 bp, Homo Sapiens
tgcttctcttggaactgaatgcacctgagcatgtgttggaaaccattaatttccagacacttacagctttctgcaatacattccacatcttgaggcctaccaaagctcctggctttgtatatgcctggcttgaactgatttcccatcggatatttattgcaagaatgctggcacacacgccacagcagaaggggtggcctatgtatgcacagctactgattgatttattcaaatatttagcgcctttccttagaaatgtggaactcaccaaacctatgcaaatcctctacaagggcactttaagagtgctgctggttcttttgcatgatttcccagagttcctttgtgattaccattatgggttctgtgatgtgatcccacctaattgtatccagttaagaaatttgatcctgagtgcctttccaagaaacatgaggctccccgacccattcactcctaatctaaaggtggacatgttgagtgaaattaacattgctccccggattctcaccaatttcactggagtaatgccacctcagttcaaaaaggatttggattcctatcttaaaactcgatcaccagtcactttcctgtctgatctgcgcagcaacctacaggtatccaatgaacctgggaatcgctacaacctccagctcatcaatgcactggtgctctatgtcgggactcaggccattgcgcacatccacaacaagggcagcacaccttcaatgagcaccatcactcactcagcacacatggatatcttccagaatttggctgtggacttggacactgagggtcgctatctctttttgaatgcaattgcaaatcagctccggtacccaaatagccacactcactacttcagttgcaccatgctgtacctttttgcagaggccaatacggaagccatccaagaacagatcacaagagttctcttggaacggttgattgtaaataggccacatccttggggtcttcttattaccttcattgagctgattaaaaacccagcgtttaagttctggaaccatgaatttgtacactgtgccccagaaatcgaaaagttattccagtcggtcgcacagtgctgcatgggacagaagcaggcccagcaagtaatggaagggacaggtgccagttagacgaaactgcatctctgttgtacgtgtcagtctagaggtctcactgcaccgagttcataaactgactgaagaatcctttcagctcttcctgactttcccagccctttggtttgtgggtatctgccccaactactgttgggatcagcctcctgtcttatgtgggcacgttccaaagtttaaatgcatttttttgactcttggccaaaatttagaagatgctgtgaatatcattttgaacttgtgtaaatacatgaaagagaaaacctttgtctggaacttcttggctttgtgcaagctgtgtccaaggcaagtacataaactggtaccttgtaatgaagaggcagctgatgccatgcacttgtctgagggcatagctccatgtcttctgacattcctggtgtcccaaagaatagcaaaaagccagtttgaatattatgtaacttatttttttaatgtggacaggggaccttgaaaatcactaagttattaaaaatgtggatgtgctagaattggatatgtccaggaacatgggaagggctcactattggaatcccatgagtttccattttgtctctacccaaacgtattccaaagctgactgcatttgtaccatcttatttcttttggggattatacacctcagccgcctgagatgggggtcagctctttatataaagggaaaccagaccaggcctaaagcccacccctaccctcacccccccaatcctctcctgaaacttaaaaacagtgggaatataggaaagggaaccaaatctcattaattaattgttctcccccattaccccactgaatgaatggccatacaggctaagctgaataatgacaaagttgaaaggaccaatacagccccttttataaggattttgaatgttttgcaaatgtattggtccctgtgttgtattttgtagccttttcctgggcttcagctcccctacttcttgtatgtgtatgcatactgtagctaaccattaaagtcatgacacacacatgagtccactgtgcctttctcagtagcagcagccagtgctggtggtgaggaggaaaagtggacaatccagccctgcagaccttggggccatggggaaccaccaactaacttcttgctgaatcc

SEQ ID NO: 69655 - DNA, 526 bp, Homo Sapiens
gatgaaagggaggagatccttttgaagcatttaaaaaataagctgctcgcttaccttgtgatctgttcttggatggcttccgtattggcctctgcaaaaaggtacagcatggtgcaactgaagtagtgagtgtggctatttgggtaccggagctgatttgcaattgcattcaaaaagagatagcgacctagaaattaagaaaccttgacttaggacttagtctgaaaggccaacatgggaagacagttctaactggctagggtttgggtttctgacagaggctttcaaattaatctttggtttaaagcactggttcttgggaccccaaagagttctcatttctgtgcgttttatttcagaattttccacattagaaattagattttaaaaatattcatttttaaaaacagacccactatgtgctaatgtaagaaacatgaactattttctggtgacactcatcactaagtctttctacattttgcagatctctaagtcttgcttaataaaagacagctggattctc

SEQ ID NO: 69656 - DNA, 2973 bp, Homo Sapiens
ctatgtgttagagagtatgaagtcgacggcgcgccgaattcggcacgaggcgtcaagcagatgaataaatacaaagttgtcctgtcatctcaagacaaggacaagtctttggtcaccgtggagacagatgctcatggatcattttgttttaaagcaaaaccagggacttacaaagtgcaggtgatggttcctgaggcagaaaccagagcagggctgacgttgaaaccccagacatttcctcttactgtgaccaacaggcccatgatggatgtggcctttgtacagttcttggcatcagtttctgggaaagtctcttgtttggacacctgtggtgacttgctggtgactctacagtccctgagccgccagggtgagaagcggagcctccagctctccggcaaggtcaacgccatgactttcacctttgacaacgtgctccctggaaaatacaaaataagcatcatgcatgaggattggtgctggaagaacaagagcctggaggtggaagtgctggaggatgacatgtctgcagttgagttcaggcagacgggctacatgctgagatgttccctgtctcacgccatcactctggaattttatcaggatggaaatgggcgtgagaatgtggggatttataacctctccaaaggagtcaaccgattctgcctgtccaagcctggtgtgtacaaagtgacccctcgctcctgccaccggtttgagcaagcgttctacacctatgacacgtcttcacctagtatcttgacattgacagccattcgccaccatgtccttggaactatcaccaccgacaaaatgatggatgtcactgtgactatcaagtcttccatcgacagtgaacccgccttggtcttaggccctctgaagtctgtgcaggagctgcggagggagcagcagctggctgagatcgaggcccgcaggcaggagagggagaaaaacggcaatgaggaaggtgaagaaagaatgaccaagcctcccgtgcaggagatggtagatgagttacaaggccccttctcgtatgatttctcttactgggcgcggtctggagagaaaatcactgttacaccgtcatctaaagagctgctcttttatcccccttcaatggaagccgttgtcagtggagaaagctgcccagggaagctgatcgagatccatgggaaggcaggcctgtttttagaaggccagatccaccccgagttggaaggagtcgagattgtcatcagtgaaaagggggcaagttcaccgctgatcacagtctttactgatgacaaaggtgcctacagtgttggccccctgcacagtgacctggagtacacggtgacctcacagaaggagggctatgttctgactgcggtggaaggaaccatcggagacttcaaggcctatgccctggcaggcgtaagctttgagataaaagctgaggatgaccagcccctcccgggagtcctcttatccctgagcggtggcctgtttcgttccaacctcttgacccaggacaacggcattctgacattctcaaacctgagccctggccagtattacttcaaacccatgatgaaggagttccggtttgagccatcctcacagatgatcgaggtgcaggaaggccagaacctgaagatcaccatcacggggtaccgaaccgcttacagttgctatggcacagtgtcttccttaaacggagagcccgaacaaggggttgccatggaagcggtgggccagaacgactgcagcatttacggagaagacaccgtgacagacgaagagggcaagttcagattacgtggattgctgccgggatgtgtgtaccacgttcagctcaaggcagaaggcaacgaccacattgagcgggcgctcccccaccatagggtgattgaggttgggaataatgacatcgatgatgtaaacatcatagttttccggcagattaatcaatttgatttaagtggaaatgtgatcacttcctctgaataccttcctacgttatgggtcaagctttacaaaagcgaaaacctcgacaatccaatccagacagtttcccttggccagtccctgttcttccatttccccccactgctcagagatggcgagaactatgttgtgcttctggactccacactccccagatcccagtatgactacatcttgcctcaagtttctttcaccgcagtgggctaccataaacacatcaccttgatttttaatcccacgaggaagctgcctgaacaggacatcgcacaaggatcctacattgccctgccattgacgctgctggttctgctggccggttacaaccatgacaagctcattcctttgctgctgcagttgacaagccggctacagggagtcggcgcgctcggccaggcagcctctgacaatagcggcccagaagatgcaaagagacaagccaagaaacagaagacaaggcggacgtgaggaggaaggggacagttgcagtctcacttgggacaggccacagccaggggtccggccactacccgcccgtgggataaaagccaaaagcatgcgtcagctaacttcagcctgtgctgctgggcccgcaccccatgtcccttgtcactgtggcatcctgcacccatcctcacccctccgtagagcccctcgtgcaatgcaatgaatggaccctcctgtcactctgctgaacagaatttattttctgagtcaaatataatttattattatttttgtcaaagaagtatttaagctgtgctgtggtgtgagaatgtcattcttgatcttcagccttcgtttgcaagaagagttccagttgatgtggtgtttggttccatggcggggtaccctagggattcatctgttttcttcacttccctttgcatctgagatcctgctggaaaccacggcaacctgtatccactattaggaggtaaaaatcaataaaatggcccattcatttgtgttgtagctcaaaaaaaa

SEQ ID NO: 69657 - DNA, 1298 bp, Homo Sapiens
aggacatgtggcgaatgctgtcaatgtcaagatactaggtgacgacgtgtcataggtgtagacgcttgctcaaaccggtggcaggagcgagggtcacttttgtacacaccaggcttggacaggcagaatcggttgactccttgggagaggttataaatccccacattctcacgcccatttccatcctgataaaattccagagtgatggcgtgagacagggaacatctcagcatgtagcccgtctgcctgaactcaactgcagacacgtcatcctccagcacttccacctccaggctcttgttcttccagcaccaatcctcatgcatgatgcttattttgtattttccagggagcacgttgtcaaaggtgaaagtcatggcgttgaccttgccggagagctggaggctccgcttctcaccctggcggctcagggactgtagagtcaccagcaagtcaccacaggtgtccaaacaagagactttcccagaaactgatgccaagaactgtacaaaggccacatccatcacgggcctgtcggtcacagtaagaggaaatgtctggggtttcaacgtcagccctgctctggtttctgcctcaggaaccatcacctgcactttgtaagtccctggttttgctttaaaacaaaatgatccatgagcatctgtctccacggtgaccaaagacttgtccttgtcttgagatgacaggacaactttgtatttattcatctgcttgacggtgtccgggaagcgaatgattgatatccgaccacagacactgaaccctgttgcaacaatgtcagccagctgaggtgtgttcggtgcaattttgatggtgaccgtttcaaagtagaggtgctctttctgagcatggatggtgtatgtccctgtggttatgttctcaaggcggaatgagccatcagcttttgttttaactttgatttggttattcagggtgactactgcttctggaacaccatctccttcgggtccgttcaagaccctcccggtgacggagaatcccatgacgtggaacacgggctcgattttcaagctgtcatgctccactgtgaagtcaagtctggaaggcgccacatcaaaggtaatcctctcccctcgatagaacggaatcacagtgtagcccccacttggcaaggaatagaaagagaacgagccatcttctctggagaccgtgtagcacaaatacaccagactctcgtcttggggctggaacccaggcactggtgagacattgcagcccaggacatcctctttagttactaaagaagaaaagagaag

SEQ ID NO: 69658 - DNA, 696 bp, Homo Sapiens
gagctaggaatcaagaaatacgcagaactgattcctgtcactggcgccaccctgccacttgcccagagctgtggtataaatttttttaataggctgaaataaaaatatgaatagcattttggtgttaagcattaaattgataaaggctatgagatacacctgctctcaaccatgttaattttttattattggtattaataaattattacttactaacatattaacaagaattgcattgagaaacaaagcatccacaggccaaatcttctgaatttcaaatgtttatattaatgcgttgtattctagaaaagtagaattgtcttaagtagctttgtaatataaagtcatctatcagcccattacacctattagaatgttttaacctttatttcccacttttttgtttctagactgagtgtacttggtctggtatttgtggcataacttacggaacacataagaatgatacagatactatttaatgatgacctaatacaagcttagatagctaaggtgaaagctgctatggccttaacattttcctcttgaagaatgtattttctgtaataaaatacagtggctacttgaaatctataaacttatgtgaggtctggataaatctgagcaactttcttctttgtgctccaggaacctacgcactatatatataaataaagcttaagtaaacatcattgc

SEQ ID NO: 69659 - DNA, 1030 bp, Homo Sapiens
agtggtttccctttgcttcccaacctaaaatttcaagtttaataaaatagcaattagcagaagtgaccaaattgggagataattatcagtcatgaggaaagacacagatttcggtcataaagaatgtaagggctataagtagaaactttctataacctaaatgatgttatagaattatttttgagcaggagcagaaagattaaatatgatcacttcatacttctaaatcagaaataggaagattaaaaccacagaacagtttgtgatttctattgctgtagctaggtatcttactctgtccactcttgttcaagtatctaactcttctggaaaccaaataggctttagaagagattatcctatattcctatcagtataatactaaaatgtaactttttaatcatctggtttttaaaagataaacagtttagcccatctctccagagagcaaacataggaatatgactcaggagcctcctagggcttatcatcagccctcacacccgcttccccctccaacccacagcctttgcttccaggtggcaggattactactttgcctcttcagcagcatctactctaggcatattgatcattttagacactgggagaagagaacctcaaactaggaggaaaagacagagcctccacttagttttgggaggggatggcagacagtcaaggagatgagcgtcctaaggcatgttgggatagggtcagatgcaccacccatggagaggtttgtcaacacaaagacatggaaggttagaggtttgtcaacaaaaagacatggaaggttaggtttgtcaacacaaagacatggaagattagaggtttgtcaacacaaagacacaggaagaatgggctgcagaagatttagatgttttccatttgggcacattttacttagctggagaactaggtttaaaacagcctgggtaggaaaattagaagcaagctggatgcagtggctcatgcctgtaatcccaacactttagggaggtccaggcgggaggatcacttgggccca

SEQ ID NO: 69660 - DNA, 1663 bp, Homo Sapiens
  misc_feature (99)..(100): n is a, c, g, or t
  misc_feature (119)..(167): n is a, c, g, or t
  misc_feature (462)..(471): n is a, c, g, or t
  misc_feature (1648)..(1648): n is a, c, g, or t
gcaagtttgggcccggtttccttttccttaggggggcccgggggcccaaaggaaggtttttgaaaaagtttttgagggcccaagggggcccaccagggnntgtttttgtgggtttatannnnnnnnnnnnnnnnnnnnnnnnnnnnnnnnnnnnnnnnnnnnnnnnntagtttttaaaaaaatgtttattttttcaaagaaaacggcaatagccaaattggaaacctacttattcttcaactccaattttgttttctttaaatttagaagtgacttactgatttactattttaaacaaaccccccctttcccctttaaatgtttaccatctactcgtgctgaatccttccaaggagattgctccagcgtttatctccaggtcctcgctttgctccttttaccaaaaaacgcaaaacacaattccatcgtgcatcttaagggctccaatcgtcaaaaataggnnnnnnnnnntctttggaatagccaattaagttgaataaaaaaatccacacgaatgcggtttggttggggcaggaatccactcctatgttcctggtaatctgatcccgctccatgaatcctggtaattcatcctccctatcctatccacattatgatttgaatccaatgatccagctccaaggattgggatccagtgagccctctccaatccaaacctttataaccagcaaaaccaaaaaagaggaggcaaaatgttagatactgtaatcaaaaaaggtttctggggaatgatgagttatgtctgtcatcagtttaacagatgcacatcaataactatcaaattccccaaaacaagtttctgaatggtgttcagataaattttagaaacttaatcatcatagagactaattggaagaagcattttgtatttacagttcaactgataatgccaacacttgttactgtacagcgtattacaggtttcgtggttgcaagaagttacgtaatttaagtttactggcattgctacccacctaagtctaaaactaaatctaatgctcccatttgcaatttaatttgtaaattaaagtcttttaaacatatgaaccaattatgaatattagtttaaaggggaaggtgagacttaaaagtattcccaactagattatctacaccaatacattggaactctatattttgctttcattttgtcttaaaaaaatgaaatagcaacgctctatcagtcacacagaggacatgcagatttagcagtattgatattatactctatcttgttggatttaaaaacaccctgtacccacatgtacaccaacagcaggtcacacattaacagttgtaactaagcactgtgacaaattagccagttcttcccacattagtccctattaaaacaaaaatggggggaagggagcaaaataagttgctacaaaatgggcaatataattttgccacaattgccaaggtttaaaaagcaaagcaattgtagctaaagacaactgaataaaatgtttgcaagtgttttaaggaaaatgtatataatcatttttaacccctgccttttagtataaggtcaatactgccaatttcatctgtgacaatagcacttggagtcatacattgcctcattattgatctgatctcctcaatctccttttgacatcctaanatgatgaatgtgctc

SEQ ID NO: 69661 - DNA, 1869 bp, Homo Sapiens
  misc_feature (293)..(302): n is a, c, g, or t
agttttttaaaaaatgtttattttttcaaagaaaacggcaatagccaattggaaacctacttattcttcaactccaattttgttttctttaaatttagaagtgacttactgatttactattttaaacaaaccccccctttcccctttaaatgtttaccatctactcgtgctgaatccttccaaggagattgctccagcgtttatctccaggtcctcgctttgctccttttaccaaaaaacgcaaaacacaattccatcgtgcatcttaagggctccaatcgtcaaaaataggnnnnnnnnnntctttggaatagccaattaagttgaataaaaaaatccacacgaatgcggtttggttggggcaggaatccactcctatgttcctggtaatctgatcccgctccatgaatcctggtaattcatcctccctatcctatccacattatgatttgaatccaatgatccagctccaaggattgggatccagtgagccctctccaatccaaaccattgcctccattattgatctgatcctcctcaatcctccttttgacaatcctaaaatgattgaaatgtgctccacaatccttaatccaaagcattcttaatccatctcttcagatatgtctacagaaagacacatgaaaagcaagataaacataagaacttccccaggtaagataaccacaaacacccccaacatcccagttcacacaaaccagggcagatagacatttacacaatatcacagtctgaagagtatggagttaactaaatttaaacaatcctgtctatgacatcacttaaaatacaatttatcaaagacacgaagggaatgtagatgttaggagcaaggggatattacaagaatgcaattcaacactttagcccattctgaacaaaacagtttgaattaaaaaatgaaaagattgtactgaataaaggaaaactgtatacaacatgggttctacaaaaagtgtcaccaatcatcttatgtacgagagcgagatctgctatgacggggagaatagcgtggtgatcctctgcttctccttggggagtaactgcgactcctgctgttgcttctgctacggcttctgctacgactacggcttcgagatcgagatcttccataacttggacttctgggcccatcaactttaacccggatgtaggcagtttctccctcatgagatctaaacttagtgttatccagttttcgaactgcataggtcatatcttctttccgtacaaactccacgacaccagtgccatctcggtaaacatcagcataacatacatcacctgcttcacgcatgtgatcctttaaatcctgccaacttccacttggaggcagtccagagacaaccactctgttttcagaccgcctggatggggggccatagcgacctcggggagctccgccacctccacccccgccgccgcctcggcctgttccacggccgcttcgaggaaactccacccgcagacggtacccatcgtaatcatagccgtcgcgaccatacaccgcgtcttccgcgtctcgcgggtcctcgaactcaacgaaggcgaagggcggtcccccgcggcgattcttgaggtcgatgtcgcggatagcgccgtatttgtagaacacgtcctcaatgtccttggttcggatgtctggaggtaagttacccacgtagatgcggcaatcgttgttccctgcggggccacgaatcacaccacctcccgacatggcggtgacgaaaagcgcggactcgagaacaggccttcccaccaagcctagcgcacggcagagcgagcccgcagcggcaccacgtctcccgcggcccctccaaaatggcgcctttatcagctcggcgcccc

SEQ ID NO: 69662 - DNA, 2250 bp, Homo Sapiens
gcagtaactctaacggtttaaggtagcgaggcctgggtggcgaattcggcacgagggcagcggcaggaacgccagccgttcacgcgttcggtcctccttggctgactcaccgccctcgccgccgcaccatggacgcccccaggcaggtggtcaactttgggcctggtcccgccaagctgccgcactcagtgttgttagagatacaaaaggaattattagactacaaaggagttggcattagtgttcttgaaatgagtcacaggtcatcagattttgccaagattattaacaatacagagaatcttgtgcgggaattgctagctgttccagacaactataaggtgatttttctgcaaggaggtgggtgcggccagttcagtgctgtccccttaaacctcattggcttgaaagcaggaaggtgtgcggactatgtggtgacaggagcttggtcagctaaggccgcagaagaagccaagaagtttgggactataaatatcgttcaccctaaacttgggagttatacaaaaattccagatccaagcacctggaacctcaacccagatgcctcctacgtgtattattgcgcaaatgagacggtgcatggtgtggagtttgactttatacccgatgtcaagggagcagtactggtttgtgacatgtcctcaaacttcctgtccaagccagtggatgtttccaagtttggtgtgatttttgctggtgcccagaagaatgttggctctgctggggtcaccgtggtgattgtccgtgatgacctgctggggtttgccctccgagagtgcccctcggtcctggaatacaaggtgcaggctggaaacagctccttgtacaacacgcctccatgtttcagcatctacgtcatgggcttggttctggagtggattaaaaacaatggaggtgccgcggccatggagaagcttagctccatcaaatctcaaacaatttatgagattatggataattctcaaggattctacgtttgtccagtggagccccaaaatagaagcaagatgaatattccattccgcattggcaatgccaaaggagatgatgctttagaaaaaagatttcttgataaagctcttgaactcaatatgttgtccttgaaagggcataggtctgtgggaggcatccgggcctctctgtataatgctgtcacaattgaagacgttcagaagctggccgccttcatgaaaaaatttttggagatgcatcagctatgaacacatcctaaccaggatatactctgttcttgaacaacatacaaagtttaaagtaacttggggatggctacaaaaagttaacacagtatttttctcaaatgaacatgtttattgcagattcttcttttttgaaagaacaacagcaaaacatccacaactctgtaaagctggtgggacctaatgtcaccttaattctgacttgaactggaagcattttaagaaatcttgttgcttttctaacaaattcccgcgtattttgcctttgctgctactttttctagttagatttcaaacttgcctgtggacttaataatgcaagttgcgattaattatttctggagtcatgggaacacacagcacagagggtaggggggccctctaggtgctgaatctacacatctgtggggtctcctgggttcagcggctgttgattcaaggtcaacattgaccattggaggagtggtttaagagtgccaggcgaagggcaaactgtagatcgatctttatgctgttattacaggagaagtgacatactttatatatgtttatattagcaaggtctgtttttaataccatatactttatatttctatacatttatatttctaataatacagttatcactgatatatgtagacacttttagaatttattaaatccttgaccttgtgcattatagcattccattagcaagagttgtaccccctccccagtcttcgccttcctctttttaagctgttttatgaaaaagacctagaagttcttgattcatttttaccattctttccataggtagaagagaaagttgattggttggttgtttttcaattatgccattaaactaaacatttctgttaaattaccctatcctttgttctctactgttttctttgtaatgtatgactacgagagtgatactttgctgaaaagtctttcccctattgtttatctattgtcagtattttatgttgaatatgtaaagaacattaaagtcctaaaacatctaaaa

SEQ ID NO: 69663 - DNA, 926 bp, Homo Sapiens
  misc_feature (800)..(800): n is a, c, g, or t
  misc_feature (807)..(807): n is a, c, g, or t
  misc_feature (863)..(864): n is a, c, g, or t
ggggccggctgcagactctcaccgcagcggccaggaacgccagccgttcacgcgttcggtcctccttggctgactcaccgccctcgccgccgcaccatggacgcccccaggcaggtggtcaactttgggcctggtcccgccaagctgccgcactcagtgttgttagagatacaaaaggaattattagactacaaaggagttggcattagtgttcttgaaatgagtcacaggtcatcagattttgccaagattattaacaatacagagaatcttgtgcgggaattgctagctgttccagacaactataaggtgatttttctgcaaggaggtgggtgcggccagttcagtgctgtccccttaaacctcattggcttgaaagcaggaaggtgtgcggactatgtggtgacaggagcttggtcagctaaggccgcagaagaagccaagaagtttgggactataaatatcgttcaccctaaacttgggagttatacaaaaattccagatccaagcacctggaacctcaacccagatgcctcctacgtgtattattgcgcaaatgagacggtgcatggtgtggagtttgactttatacccgatgtcaagggagcagtactggtttgtgacatgtcctcaaacttcctgtccaagccagtggatgtttcccaagtttggtgtgatttttgctggtgcccaaaagaatgttggctctgctggggtccaccgtggatgattggccgtgatgaaccttggctgggggtttgcccctccgagaagtgcccctccggtcctggaaatacaanggtgcanggcttggaaacagctcccttgtacaacacggccctccatggtttcagcatctacgnncaatggggcttgggtttccgggagtggggattaaaaaacaatgggaagggtgccgccggccc

SEQ ID NO: 69664 - DNA, 999 bp, Homo Sapiens
aaggtagcgaggcctgggtggcgatttcggcacgagggaatcttgtgcgggaattgctagctgttccagacaactataaggtgatttttctgcaaggaggtgggtgcggccagttcagtgctgtccccttaaacctcattggcttgaaagcaggaaggtgtgctgactatgtggtgacaggagcttggtcagctaaggccgcagaagaagccaagaagtttgggactataaatatcgttcaccctaaacttgggagttatacaaaaattccagatccaagcacctggaacctcaacccagatgcctcctacgtgtattattgcgcaaatgagacggtgcatggtgtggagtttgactttatacccgatgtcaagggagcagtactggtttgtgacatgtcctcaaacttcctgtccaagccagtggatgtttccaagtttggtgtgatttttgctggtgcccagaagaatgttggctctgctggggtcaccgtggtgattgtccgtgatgacctgctggggtttgccctccgagagtgcccctcggtcctggaatacaaggtgcaggctggaaacagctccttgtacaacacgcctccatgtttcagcatctacgtcatgggcttggttctggagtggattaaaaacaatggaggtgccgcggccatggagaagcttagctccatcaaatctcaaacaatttatgagattattgataattctcaaggattctacgtttgtccagtggagccccaaaatagaagcaagatgaatattccattccgcattggcaatgccaaaggagatgatgctttagaaaaaagatttcttgataaagctcttgaactcaatatgttgtcccctgaaagggccataggtctggggggaagcatccgggccctctctggaataatgcccgtcccaaattgaagacgttccaaaagctggccccccctccatgaaaaaaatttttgggaaatgcatccagcctatgaaacaa

SEQ ID NO: 69665 - DNA, 898 bp, Homo Sapiens
  misc_feature (113)..(113): n is a, c, g, or t
gcaaacattctccagttctcttagtgtgcacatgtttcaggaggtgtgaaccccacatgtagcttgtgtaggcaagaagacaaatagtgctactgtctggtcaaggatttgtntgaagagccatgattatgcccatatggtaagccaccagtgctccccatccctgtaagacacttctttctcattattttctcctctgatggtgtgccaggatgctggccaagagaagccaagtggaaagaaggctgttcagtgacaaggaacctaagacttagtgccaaggactgaaaccaagtaaacttgtaattttccatgatggaaacatctacactttctcattagtggcctctacagcagttgccccaaagaagcgtctcattgtttttttactacatttatgtgaagcatacaggcaaactcagaaagactgtgataaggctcgccagagatgcctgcacaggtgctgggggaaaagcaggaccatcctgaagggagatggtgtctgtggacaaagaactctgcagtggttcttatttgcatgatttctgctggtggaggctgtaaatgtgagctcaaactcccacataagtgagttttcattgtaatccagaatgtttttaaatcaccctacttctattgaacttgcactatcatctgttaacctctactgtatttattaaataaacctgaataggtaaatcacagtacagcaaaaggttctgtgttccccagaattctaatcaaactccaaattcctgaaaaggctctagtcctttcctatatgtcaaatttaaatgataagttttcattttggaacataaagagggattttgaagaccacagcatagccctgggtttttgcatagagataataaacagacaatctcttttcagactg

SEQ ID NO: 69666 - DNA, 700 bp, Homo Sapiens
gtgttggtactttagattaacattttgtcatcagtgatgctaactcaaatcatatgtttatgtgtgtaataaaatgtattattctcccaaatttcaaggaataattgagattaagtatggaggccattcaaggcaaaaatgtcctaaatttaattgcattttgagattttgttggcatttacttgtatgtattttgtgattctgataggatgtataaatacttagatgcagtacaagccgatggatagaaagacagataaatatcccgatagcctactatcagcatcctactactgcttccctaaagcagaattgttattcatttaagaagtctaatatgatatacattcatcctagtataaataaataatctctaagttttctgaaatggaatatttaacgcacatagacagtggatatttactttaaatataatgttattaatcctctgcatttcttttatcttgataactcctagtgagggaatctaattaagatttcatgctgttctttgtaatgataaatgtttccggactaaacactctataatacaaatcaaaaaatcttcctccttataactgagaaatgtttcacccaaatttcctttgttattatatatttactacacatgttgaatttattattgtttatttccaaggcatgtattattcaatttctaattaaaatatatcagggcttt

SEQ ID NO: 69667 - DNA, 1414 bp, Homo Sapiens
  misc_feature (61)..(190): n is a, c, g, or t
  misc_feature (216)..(226): n is a, c, g, or t
  misc_feature (356)..(410): n is a, c, g, or t
gtgctaagctaaaattaaccctcactacaagggaataagcttgcggccgcatacgcggccnnnnnnnnnnnnnnnnnnnnnnnnnnnnnnnnnnnnnnnnnnnnnnnnnnnnnnnnnnnnnnnnnnnnnnnnnnnnnnnnnnnnnnnnnnnnnnnnnnnnnnnnnnnnnnnnnnnnnnnnnnnnnnnnnntgagccaccgcccccagcctgagccnnnnnnnnnnnctaatgcatccaaggttaaggggaagacgcaaataacaggactattctaaaaggaaacctgtttgaactctgtgagatcagtcatcagtctcagtattccacaggcacaccttaatttcattgtaaaaannnnnnnnnnnnnnnnnnnnnnnnnnnnnnnnnnnnnnnnnnnnnnnnnnnnnnnaccttatgtagagatcttattacaaagtgattttctacattaaaaagagactgaaataaattgtatagttacttaactaatgaagacatttcagaactctgggatgattttaatcttgaagtagtaggtggtatagtcataaaaccattcatccccttcttgattgtatcttaattttctggctttaaggtgacatctgagaggtaatgcattcttttttatattgaaatcataaactatcacccgctgcttctctgagttacttttaagtttgccttgcgggtatggtttggcgtttccttctgtttggttttcagagccccatgtctatatagtcctgagtgcaagtaattactatacttgtaaatgaagatcagtatttctgcctagatctgataaaaaaattttcttgtcttagttataaaaattcaaagaaatgtgttacaaagatacttagtatagctcctcagccataacctgagacttgggatgaaatttaaaccagatacgatttactttgcagatcataaggctttttatactcttgttatcaaaatggcttatttttcaggcactaaggattgttaagagaaaagcttttcaacgaaggattgcctttcttctcccacactgttcttgatttcctctctctttcaggcctcaacaggcactgtattcattgccaatgttccaaattatcaaattcaagtgaatttatttgtgtgttctttacttatataaaaaaagataactttaaggatgtgcaagtacatttccaactgctagcacaaccagtattttgtaattaaacaaatcgctgtatggtatggtcttctacacatttatgtctatagatatctatcgatcatctttctattctgtttcatgactgaataatgtaaaaccagtgttggcaattggtatcatcaatgatactcattttttaataaccaaaggcaggggaaaatcattttacttattaataaatattttatgatgtgaaa

SEQ ID NO: 69668 - DNA, 345 bp, Homo Sapiens
attggtaacacaggtgcagtgtattatagaaaaaataaaaactacaatcattagcagttttaatactgctgtgtcagttttgtaaaaaatgtacattatgtcttttgacatgttgaattttaaactagggaaatgacattgtaaatcatagtagcctcttttaatttaatatgaaaaatgccactatattgaaagtacttaatgtattgtatatatttctctactttggttctagctattttatatgattgacatgttatttaaaagataactgccttgaacttttggagacttgtactgtaaataaagaaatcttaacaataaactcagaatctacttaaaaaa

SEQ ID NO: 69669 - DNA, 703 bp, Homo Sapiens
tcaatctcccgtgaagagccccgccctttccttctgcctggacattgactcattgcctgcctgcaaggtgtttgtttgcttccttgcagcagtgttttcatgttcttctaaccctggtgttacgtgagaactggtaggcaggtctgcaaggtttaggctggtgagatcaacagggctcagtgacagatgaggcaaagccagcaggaggcaaggatgattctaccttgggtgacagaagtagatgtcactcagatgctgagaatagggagggaggagggagaggacaaatttgatttggggcacacagctttcaacatgtacaaaggacatccagatggcagtgggctatgtgagcctggagactgtgctgcgagttgttgatctacagccagtggggctgggctctcccaaggcggtggagtgagaagacaggtgagacaccaagcatgaggccgtggcggaggagatggagcctggggcccaactgctgagcagtagcagagaaaaagaaggaaaaccaggaggcctggcccgagaaagcccaagaaggagaggattttaaagagcaaacactggacagaagtcaggccagaggaagattgtcaggcctctaagccggagcaaggtccttgtaacccctgtgacctgcccgtatacatccaaatggcctgcaggagccacaaagtctggagcagccaaaaaa

SEQ ID NO: 69670 - DNA, 801 bp, Homo Sapiens
  misc_feature (328)..(389): n is a, c, g, or t
acgcagaggatgctgagccaggagtcaagccagcttgacaacatagtagaccctattctacccccctaataaattaatgtaaaaagccccccaatctgtggtatgtattatgggcagccctagcaagctaatacagtggtttgagagcctgggagggttgaggggaagataaacttttaaaaagctcttatctttcatttcaatcagttaaaaatacttgctcagtgtaacaattttgcttctcagcttccactctaatattgttgtgccattaagcaatttagctaatcctgacatttcttagattcataatgttaggagcatttannnnnnnnnnnnnnnnnnnnnnnnnnnnnnnnnnnnnnnnnnnnnnnnnnnnnnnnnnnnnnacattaacaagccctctaacaaaaactttacaatacatttatgttgaatggaactccaagatctcacctctccatccaggaatggagtccatgtaatcaaagtgaacttaaaaataggacactttcaacaagtcaggagattcacagcaactgatcaaagggagtccagtcaacgtgagcaagcgtgattatgatgaggaagccccctctgctttaatccacacaaggaacgtaacctgaagtaacctgatgttaaccaatctgctgtgtctactatgctgtttccttgttcctgctagtgctgctttacaaatgcagaccattctatcatacctggcagggcttctgttttattttgtaggctggatgctacccagttcatgaatcgctaataaaagccaattagatcttt

SEQ ID NO: 69671 - DNA, 626 bp, Homo Sapiens
ttaaaaagctcttatctttcatttcaatcagttaaaaatacttgctcagtgtaacaattttgcttctcagcttccactctaatattgttgtgccattaagcaatttagctaatcctgacatttcttagattcataatgttaggagcatttaatctgtattttacaagttaggaagcagaggatcagagatgggaaaggactagcccaaggccaacattaacaagccctctaacaaaaactttacaatacatttatgttgaatggaactccaagatctcacctctccatccaggaatggagtccatgtaatcaaagtgaacttaaaaataggacagtttcaacaagtcaggagattcacagcaactgatcaaagggagtccagtcaacgtgagcaagcgtgattatgatgaggaagccccctctgctttaatccacacaaggaacgtaacctgaagtaacctgatgttaaccaatctgctgtgtctactatgctgtttccttgttcctgctagtgctgctttacaaatgcagaccattctatcatacctggcagggcttctgttttattttgtaggctggatgctacccagttcatgaatcgctaataaaagccaattagatcttta

SEQ ID NO: 69672 - DNA, 1335 bp, Homo Sapiens
  misc_feature (64)..(64): n is a, c, g, or t
  misc_feature (1188)..(1210): n is a, c, g, or t
ccaccgtgcccagcctctatccccatttaattgccctgttctgtcctctgctggctcaggctcntgtggagcattattaggggagggtgtctggatgaacagctgtttgtgactgtttctaggcgttttaaggatgaacagattgacatcctcgtggccactgatgtggcagcccgtggacttgacattgagggggtcaaaacggtgagcagacactatcttccttggacttttggtggaagtctttttgcctcttcacaccccccttcccttgccaggcctgacgttcatttttgaccttctaggtaatcaacttcacaatgcctaataccatcaaacattatgtccaccgggtggggcgaacagcacgtgctggcagggctgggcgctcagtctctctggtgggagaagatgagcggaagatgctgaaggagattgtaaaagctgccaaggcccctgtgaaggccaggatacttccccaagatgtcatcctcaaattccgggacaagattgagaaaatggagaaagatgtgtatgcagttctgcagctagaggcggaggaaaaagagatgcagcagtcagaagcccagatcaatacagcaaagcggctcctggagaaggggaaggaggcagtggtccaagagcccgagaggagctggttccagaccaaagaagagaggaagaaggagaaaattgccaaagctctgcaggaatttgacttggccttaagaggaaagaagaaaaggaagaagtttatgaaggatgccaaaaaaaagggggagatgacagcagaggaaaggtctcagtttgaaatcctcaaggcgcagatgtttgctgaacggctagcgaagaggaatcgcagagccaagcgggcccgagcaatgcccgaggaggagccagtgagaggtcctgccaagaagcaaaagcaggggaagaaatctgtatttgatgaagaactcaccaacacaagcaagaaggccctgaaacagtatcgagctggcccttcctttgaagaaaggaaacagttgggcttgccccaccagagacgaggaggaaactttaaatctaaatccagatacaagaggaggaagtagctgtcgtggcctgaagaaattcatgggggcagcccttaaatcccttccctgtgggaagtcatcctggctggtctgtcttttctccatttgtttnnnnnnnnnnnnnnnnnnnnnnncaacactttggtgtggtggtatggtacgtagctattttcctaagcatgtctgtcaatctcccttcttgctgattagctttcatatgactatattaaatggaagtatttttgggaaaagagaaacc

SEQ ID NO: 69673 - DNA, 2060 bp, Homo Sapiens
  misc_feature (1826)..(1826): n is a, c, g, or t
  misc_feature (1911)..(1911): n is a, c, g, or t
  misc_feature (1924)..(1924): n is a, c, g, or t
  misc_feature (1938)..(1938): n is a, c, g, or t
  misc_feature (2002)..(2002): n is a, c, g, or t
  misc_feature (2009)..(2009): n is a, c, g, or t
  misc_feature (2042)..(2042): n is a, c, g, or t
ggggtgacgcatggtacttgcgcaaagacgacgaggaggctgcgaaaagttaagggccggaccgcaggctgtgctcgcttccggaagtggcttctgcgacaacatgcttgcggacctcggcttaatcggaaccataggcgaggatgacgaggtgccggtggagcccgagtctgactccggggacgaggaagaggaggggcccattgtgctgggcagacgacaaaaagctttggggaagaaccgcagtgctgatttcaaccctgatttcgttttcactgagaaggaggggacgtacgatggcagctgggccctggctgatgtcatgagccaactcaagaagaagagggcagccactacattagatgagaagattgagaaagttcgaaagaaaaggaaaacagaggataaagaagccaagtctgggaagttggaaaaggagaaagaagcaaaggaaggctctgaaccaaaggagcaggaagaccttcaagagaatgatgaggaaggctcagaagatgaagcctcggagactgactactcatcagctgatgagaacatcctcaccaaagcagatacactcaaagtaaaggatcggaagaagaagaagaagaaaggacaggaagcaggaggattttttgaagatgcatctcagtacgatgaaaacctctcgttccaggacatgaacctttcccgccctcttctgaaggccattacagccatgggcttcaagcagcccaccccgatccagaaggcgtgcatacctgtgggtctattggggaaggacatctgtgcctgtgcagccactgggacaggtaaaactgccgcctttgccctgcctgttttggagcgtctgatttataaaccccgccaggctccagtcacccgcgtgctggtgctagtgcccacccgagagctgggcatccaggtgcactctgtcaccagacagctggcccagttctgcaacatcaccacctgcctggctgtgggcggcttggatgtgaagtctcaggaagcagctcttcgggcagcgcctgacatcctcatcgccaccccagggccggctcatcgatcacctccacaactgcccttccttccacctgagcagcatcgaagtgctcatcctggaccaggctgacaggatgctggatgagtactttgaggagcagatgaaggagatcatccgaatgtgttcccaccaccgccagaccatgctcttctcggccaccatgacagacgaggtgaaagatctggcttctgtctccttgaagaatcctgtccggatatttgtgaacagcaacacagatgtggctcccttcctgcggcaggagttcatccggatccggcctaatcgtgaaggagaccgggaagccatcgtggcagctttgttgacgaggaccttcactgaccatgtgatgctgttcacgcaaaccaagaagcaggcccaccgcatgcacatcctcctggggctcatggggctgcaggtgggtgagctccatggcaacttgtcacagacgcagcggctggaggccctccggcgttttaaggatgaacagattgacatcctcgtggccactgatgtggcagcccgtggacttgacattgagggggtcaaaacggtaatcaacttcacaatgcctaataccatcaaacattatgtccaccgggtggggcgaacagcacgtgctggcagggctgggcgctcagtctctctggtgggagaagatgagcggaagatgctgaaggagattgtaaaagctgccaaggcccctgtgaaggccaggatacttccccaagatgtcatcctcaaattccgggacaagattgagaanatggagaaagatgtgtatgcagttctgcagctagaggcggaggaaaaagagatgcagcagtcagaagcccagatcaatacagcanagcggcttctggnagaaggggaaggangcagtggtcccaagagccccgagaggagctgggttcccagaacccaagaaagagagggaagaanggagaanaaattgcccaaaagcttctgccaaggaattttngactttgggccctttaag

SEQ ID NO: 69674 - DNA, 303 bp, Homo Sapiens
  misc_feature (158)..(180): n is a, c, g, or t
gcttctccatcctcattctggtcttaactctgattttcttacagatacaagaggaggaagtagctgtcgtggcctgaagaaattcatgggggcagcccttaaatcccttcccctgtgggaagtcatcctggctggtctgtcttttctccatttgtttnnnnnnnnnnnnnnnnnnnnnnncaacactttggtgtggtggtatggtacgtagctattttcctaagcatgtctgtcaatctcccttcttgctgattagctttcatatgactatattaaatggaagtatttttgggaaaagagaaa

SEQ ID NO: 69675 - DNA, 1077 bp, Homo Sapiens
  misc_feature (267)..(275): n is a, c, g, or t
  misc_feature (498)..(651): n is a, c, g, or t
gttccaaatctttaactttatttaaagcagatacagatgataacagcttccaaagagtaaaagcagtaacccaaatgctctgcaatctcccacaccatgaaacttgcatgtcacacacagtgcaatctcccatccagaatccagaacttagtagaaaccaaacttttgcttctttggaacaaatttagctaaaagatgaacagctagaaaataactataatagtaaagaatttaatgaatcaccaaaaactaaatttataatctgannnnnnnnnaaaaacatgtatcatttagcttaagcttcctcaactctctggacaaagaaaaagattctgagtttttaagttcttccaataggatttcctctggggaaatttgctttgaatactgtgtgggaatccatttctgagagaagcccagaataaagggatcgcctcaggctgctccatggagaagtaccctcatgggagacagtacagctctggggggcagagctannnnnnnnnnnnnnnnnnnnnnnnnnnnnnnnnnnnnnnnnnnnnnnnnnnnnnnnnnnnnnnnnnnnnnnnnnnnnnnnnnnnnnnnnnnnnnnnnnnnnnnnnnnnnnnnnnnnnnnnnnnnnnnnnnnnnnnnnnnnnnnnnnnnnnnnnngggacacactaaggtaagtactcattaaatattagctattattatctgataaaaaaatttgtacatgtgtgtatgtgtatctttgggaaaagaagaagacatcttgtttactatttttttggagagaggctgggacatggataatcacataatttgctattattactttaatctgacttgaagaaccatttaaaaataaaatttagcatgtcatatattccttatagtaggcttatttcaccttttttctgtccagagagagtatcagtgagaaagattttaagggtgaaaacatgaattggtgggacttagtaaagagctgaaaaactactacaatgtgggctacggttattataaaatgatagagatggaaactagagtaagtttattttgtctgttaaacctggaagtgagctaggcatggtc

SEQ ID NO: 69676 - DNA, 680 bp, Homo Sapiens
gagtacttaccttagtttgtcccctttacaacagctttacatctgtgtgattgatacagttcatattcccattttataactgagaaaactggtgcacagagaggataagcaacttgccaaaggtcacacagttaataagtggaaatgctggggtatgaaccaggtagtctgcccccatagctctgccccccagagctgtactgtctcccatgagggtacttctccatggagcagcctgaggcgatccctttattctgggcttctctcagaaatggattcccacacagtattcaaagcaaatttccccagaggaaatcctattggaagaacttaaaaactcagaatctttttctttgtccagagagttgaggaagcttaagctaaatgatacatgttttttaaaaaaaatcagattataaatttagtttttggtgattcattaaattctttactattatagttattttctagctgttcatcttttagctaaatttgttccaaagaagcaaaagtttggtttctactaagttctggattctggatgggagattgcactgtgtgtgacatgcaagtttcatggtgtgggagattgcagagcatttgggttactgcttttactctttggaagctgttatcatctgtatctgctttaaataaagttaaagatttggaacaaaaaa

SEQ ID NO: 69677 - DNA, 1151 bp, Homo Sapiens
  misc_feature (431)..(443): n is a, c, g, or t
caattctagatagcgtatggcagatcttgacaggctggacctgcaagatgtggcttgaattttaaccatttattacataatctctagtgatcatgcatctagttatcataagaaataatttaaaaggttttgttgctgaaagcagtaagtggtgcagtaaaatacttaagttattcaaagaatgttgatctttcttgcaagagtaatttaagcacatgggaaagattctagactttgtgtttcttgcaacaacagtgccctctgctgctagaaacctttttctacttactatcattttgtatgtggcttgagctcagtcaagtctggtgcagatgaggctggacaactactaaccaataaaatcaggagtttgtacaagaagttaaagtggaacattataattattttaagtaatgttaatgtgacaaaannnnnnnnnnnnngacaatataaaaaacattttaaatttcctagaaatgtcttcagggtaatgccaatttaagatctctcttaacttgtggccaagaaattctagattttccagctgactttggtataatatatatttatcaggaacttctctcagcagagagtacccattcttcgagttcaaagcacaattttaaacatgtaaaatggatatataatttgccaaaggtaattaatttattctttttttcttaaagaagaaaaagacattggttgttgttacaaaaagtctaaattactgttggttgaaacacagcagctgtggagttcagtccaggcatgaagactaaatctgctttaccaagtaaggtgtaaggttgcatgtttcagtcctctaccatcctgcactgtgagcagcactatacctgtgcgttgtctgaaagccttccgtatattctccagctaaatggtcgtctggtagcctttgcatttaacaaactagcatgaggctttttatatctaaatgctacgtgatagacaatttcagctagccacatattgtatgtatgagattcataaagactttcaatcatttcattttcagacaactgaaattttgtttagtatgtgaattctttttttgaaatgtatagtgaataggatgttgcactggtggcaattcatcatggagcataataaaattaatttgacccaaatagaaa

SEQ ID NO: 69678 - DNA, 537 bp, Homo Sapiens
  misc_feature (176)..(399): n is a, c, g, or t
atcctgctggaatataggctcagagttactacatcaactacattttcatcaagccagaaatttgtatgctatcaactaatttaaaaattacttagaaatattgtatgggcaaaataaaatacatctgcatatcagatctagcccatgggggatgaaaaacttacaacttctagtannnnnnnnnnnnnnnnnnnnnnnnnnnnnnnnnnnnnnnnnnnnnnnnnnnnnnnnnnnnnnnnnnnnnnnnnnnnnnnnnnnnnnnnnnnnnnnnnnnnnnnnnnnnnnnnnnnnnnnnnnnnnnnnnnnnnnnnnnnnnnnnnnnnnnnnnnnnnnnnnnnnnnnnnnnnnnnnnnnnnnnnnnnnnnnnnnnnnnnnnnnnnnnnnnnnnnnnnnnnnnnnctctaatataaatggctgcatgaagcaaaaactggcattctaagaatacaagtaattgccatgaacacagtctatgtactatgtgattatgcatgtcattaacaaattaaaaatttaaaacaattctctcccgttaaa

SEQ ID NO: 69679 - DNA, 991 bp, Homo Sapiens
tcccatcacccacagcaaatgacagctgcaaaagagaacaccaatcccatccacactcacgcaaaaaccgcgatgccgacaagaaaacttttatgagagagatcctggacttctttttgggggactatttttgtacagagaaaacctggggagggtggggagggcgggggaatggaccttgtatagatctggaggaaagaaagctacgaaaaactttttaaaagttctagtggtacggtaggagctttgcaggaagtttgcaaaagtctttaccaataatatttagagctagtctccaagcgacgaaaaaaatgttttaatatttgcaagcaacttttgtacagtatttatcgagataaacatggcaatcaaaatgtccattgtttataagctgagaatttgccaatatttttcaaggagaggcttcttgctgaattttgattctgcagctgaaatttaggacagttgcaaacgtgaaaagaagaaaattattcaaatttggacattttaattgtttaaaaattgtacaaaaggaaaaaattagaataagtactggcgaaccatctctgtggtcttgtttaaaaagggcaaaagttttagactgtactaaattttataacttactgttaaaagcaaaaatggccatgcaggttgacaccgttggtaatttataatagcttttgttcgatcccaactttccattttgttcagataaaaaaaaccatgaaattactgtgtttgaaatattttcttatggtttgtaatatttctgtaaatttattgtgatattttaaggttttcccccctttattttccgtagttgtattttaaaagattcggctctgtattatttgaatcagtctgccgagaatccatgtatatatttgaactaatatcatccttataacaggtacattttcaacttaagtttttactccattatgcacagtttgagataaataaatttttgaaatatggacactgaaaaaaa

SEQ ID NO: 69680 - DNA, 840 bp, Homo Sapiens
  misc_feature (69)..(69): n is a, c, g, or t
taaatcagtatgaatattatatgcctaaataaaaaatttgcacaggtaaattctctcacttgtgaatgngagaagctgccccaggaatctgtgaggatggtattccctggagtctggctttgaaagatttcattgttggtagaaataacaggttgagaaagagggagttagcatcacctaaaacctgcacgtgaacaagggttgacatgatacactatggccttagaaaagggccaggtgaaaccccaagctaatcactgcggtctttcagagccggacagacaggtgccagcagagcccggggctcactctcctttcagtcattcctcagcccttcgaagggaagcccaaacactttgcacgctgtgctgcagacattctggcctggtgtgtctgaaagttgcatcagtcctcacggtgcaaacacagttgatttaggaagtcacacaatgacactgaaatcctacagaccaaaatccacttgtcagcaggagcagcagcccaggcccagcaccagcggtcttccggctcctctgagggctgccacgttgggcgaggggagccatgccaagggtccaggctgctttaggccatctgtgccccactcatctggggacagatggtttttctttattgtaaaattgtggacttttaaaacctgttgactaaacagtaattaatttatatttgtgaaaaatgccactgtcctagtgatttctgatgtaaataatgttgtttatatagtatgtattaaattttcctacattgtaaaactgctgtacttttgattcttgtatattaaaaagtgttactgagcatttttagaattgggctaacaaa

SEQ ID NO: 69681 - DNA, 494 bp, Homo Sapiens
ggcaagaggcagcgtgcaaagtgtttgggcttcccttcgaagggctgaggaatgactgaaaggagagtgagccccaacactttgcacgctgtgctgcagacattctggcctggtgtgtctgaaagttgcatcagtcctcacggtgcaaacacagttgatttaggaagtcacacaatgacactgaaatcctacagaccaaaatccacttgtcagcaggagcagcagcccaggcccagcaccagcggtcttccggctcctctgagggctgccacgttgggcgaggggagccatgccaagggtccaggctgctttaggccatctgtgccccactcatctggggacagatggtttttctttattgtaaaattgtggacttttaaaacctgttgactaaacagtaattaatttatatttgtgaaaaatgccactgtcctagtgatttctgatgtaaataatgttgtttatatagtatgtattaaattttcctacagtgt

SEQ ID NO: 69682 - DNA, 546 bp, Homo Sapiens
attggaatcttaaattggaacaactgttacagaatgtatattgctccagttctaaagccagttaaccctgtgccctctaacttatgaaccttcatttcaaaacagtatgtgggaagtcctgtagtttgataagagtaaaattattttaaagaggataatttaccattttactactataaaataagttgatatcagttgaccattttattttttgatggactctttttgttgggagaaagaaatgaatggaagaaaaaaatatgttgcttttatttgaatattgattactaacaacttataaactacattgcaggaaatgaagaaatattttgaaattagcaaaatagcaacagtattcaagtatctgaaattttaatatggtgagtcttagagctttagactttcctataagtgacagtatctaagttattcttaatagtcacacttgataattctgctgaccataagcagctaacctacagttgaagatatttatgtgacatgaatagcctgtgttttaaaaattaaatattttataccattgaa

SEQ ID NO: 69683 - DNA, 2167 bp, Homo Sapiens
  misc_feature (1134)..(1188): n is a, c, g, or t
tcctgcgatatcgtcgaccacgcgtccgagcttgagcgcctcttccggttaccttttcccagcgccagaggcgcctagggttggggtcctcgctcaggcacagagacccgacaccgagcggcggcttccccgggatcgagggacgcgcacgccagaggagacgaaaggaacccgggtcggaccagatcggaaccactgaccattgcccatggcggccctaggccctagcagccagaatgtcactgaatacgtcgttcgagttcctaagaatacaaccaaaaaatataacatcatggcttttaatgcagccgacaaagtcaactttgctacgtggaatcaggctcggctggagcgggacttgagcaacaagaaaatctaccaagaggaggagatgcccgaatcgggcgcgggcagtgagttcaaccgcaagcttcgggaggaggctcggaggaagaagtacggcatcgtcctcaaggagttccggcccgaggaccagccctggctgctccgggtcaacggcaaatcaggcaggaagttcaagggcatcaagaagggaggcgtaacagagaacacgtcctactacatcttcacccagtgccccgacggggccttcgaggccttccccgtgcacaactggtacaatttcacaccgctggcccggcatcgcacgctcactgccgaggaggccgaggaggagtgggagaggaggaacaaggtgctgaaccacttcagcatcatgcagcagcggcggctcaaggatcaggaccaggacgaggatgaggaggagaaggagaaacgtggccgcaggaaggcgagcgagctgcgcatccacgacctggaggacgacctggagatgtcgtccgatgccagtgatgccagtggtgaggaggggggcagagtccccaaggccaagaagaaagcgccgctggccaagggcggcaggaaaaagaagaagaagaagggttcagacgacgaggccttcgaggacagcgatgatggggacttcgagggccaagaagtggactacatgtcagacggctccagtagctcccaagaagagcctgagagcaaggccaaggcgccgcaagcaggagaaggggcccaagggtggtcgatgagcaaagcgacagtagnnnnnnnnnnnnnnnnnnnnnnnnnnnnnnnnnnnnnnnnnnnnnnnnnnnnnnnaagaaggcacccaccccgcaggagaagaagcgcaggaaagacagcagcgaggagtcggacagctcagaggagagcgacattgacagcgaggcctcctcagccctcttcatggcgaagaagaagacgccacccaagagagagcggaagccgtcgggagggagctcaaggggcaacagccgcccaggcacgcccagcgcagagggtggcagcacctcctccaccctgcgggcggctgccagcaaactcgagcaagggaagcgggtgagcgagatgcctgcagccaagcggttgcggctggacacgggaccccagagcctgtctgggaagtcgacaccccagccaccatcaggcaagacaacacccaacagcggcgacgtgcaggtgactgaggatgccgtgcgccgctacctgacacggaagcccatgaccactaaggacctgctgaaaaagttccagaccaagaagacagggctgagcagcgagcagacagtgaacgtgttggcccagatcctcaagcgactcaaccccgagcgcaagatgatcaacgacaaaatgcacttctccctcaaggagtgaggcttggtccaatacatggctctgccccccagaacttaaggctctcactgccccttcgccatcctagagtgaggctctgtccaatacatggctctgccctccagaacttcaggctctcagtgacccttcgacatcctgcttgctccctgactcccagggccccgtagttagcaattctggaaaagttaagccatctcctcctctggcccttccttctggaatcttcagatgcctgttaggccttcttattgtcctcctcctcctggctcggcctccctcacactgaccaagggcctgtgctgcccactgggtaacttctacagttctcccttccacttccctaagtctctcttcagctgtgacttatccaccacatagcccagtaagtcttcagttttggctg

SEQ ID NO: 69684 - DNA, 840 bp, Homo Sapiens
cctttttctaaaaagctatgtatcgctcctattgaaagaccagatccttaaagaagtttgtggtataaaaagaaagtggggacagattcgcagcacagagtcgctggcatgtttcactcctgcttctctcagccagctgtttaagcctgcggcgccagcctcacggagggccgtgtgacactctcgtggtatgtatgggagatggcagcagtgaagcagcagccaccagggagtggccatttggggttgggacagggagggtgttttgggtggcatagaggttttgtattgagggccagtgatgatgttttgatatttatttcctgctacttaaatttgaatctgagtgaattgtacctatttctgatgatgtcggtcttgcaaagcgacagattcataaagtaatgatgaaatctttctttcttcccgtgtgtatttctaagaaatagagccaactgattttgtatgtaaataccaagagcaatttacctggtactaaacccgcaccccagtgcggacccttcccagccctcatcccacttcctttcctactgtcctggaacctgtctccattgtgtgatccagccctggttctggctgtggtcagcagatcccagtgaagggttttgtgtgtttaggcctcatttctttgtctttttcctactccgttcctggcatttgctgatttctagtgtatactctgtagtctcagttcgtgtttgattccattccatggaaataaaaagtatgttgtacatactgccgaagaattgtcttgcaagttaaggcttccccctttactataagactataaataaaaacttattttatccttaaaaa

SEQ ID NO: 69685 - DNA, 587 bp, Homo Sapiens
  misc_feature (14)..(14): n is a, c, g, or t
  misc_feature (23)..(23): n is a, c, g, or t
gcggccgctccacnggttacccncggctctccgcccctccttctcgcggcgctcgagggaccatggccgatcctcgcgtgagacagatcaagatcaagaccggcgtggtgaagcggttggtcaaagaaaaagtgatgtatgaaaaagaggcaaaacaacaagaagaaaagattgaaaaaatgagagctgaagacggtgaaaattatgacattaaaaagcaggcagagatcctacaagaatccaggatgatgatcccagattgccagcgcaggttggaagccgcatatttggatcttcaacggatactagaaaatgaaaaagacttggaagaagctgaggaatataaagaagcacgtttagtactggattcagtgaagttagaagcctgaaacttttctcgtatggggtggtttttgcattaaatcctggggtccattttacaatccattatttttgaccactgctatgtgttcaagtagtatgagaatgtgattgtttttatctggttacatatatatttctttgtctaatttaatatgtcaaataaatgagttcatctaataaaattgtttattttatactttaaa

SEQ ID NO: 69686 - DNA, 1367 bp, Homo Sapiens
  misc_feature (99)..(157): n is a, c, g, or t
  misc_feature (281)..(281): n is a, c, g, or t
  misc_feature (564)..(592): n is a, c, g, or t
  misc_feature (751)..(761): n is a, c, g, or t
  misc_feature (1008)..(1008): n is a, c, g, or t
  misc_feature (1255)..(1255): n is a, c, g, or t
  misc_feature (1353)..(1353): n is a, c, g, or t
gggctctccgcccctccttctcgcggcgctcgagggaccatggccgatcctcgcgtgagacagatcaagatcaagaccggcgtggtgaagcggttggtnnnnnnnnnnnnnnnnnnnnnnnnnnnnnnnnnnnnnnnnnnnnnnnnnnnnnnnnnnntgagagctgaagacggtgaaaattatgacattaaaaagcaggcagagatcctacaagaatccaggatgatgatcccagattgccagcgcaggttggaagccgcatatttggatcttcaacggantactagaaaatgaaaaagaccttggaagaagctgaggaatataaagaagcacgtttagtactggattcagtgaagttagaagcctgaaacttttctcgtatggggtggtttttgcattaaatcctggggtccattttacaatccattatttttgaccactgctatgtgttcaagtagtatgagaatgtgattgtttttatctggttacatatatatttctttgtctaatttaatatgtcaaataaatgagttcatctaataaaattgtttattttatacttcnnnnnnnnnnnnnnnnnnnnnnnnnnnnnccttgtcgggccccttgcggccctcaaaaagtttctcaaaacctttcggttgggccgccgcgggccacagaaggcaaagggaaactgtggccaatactgtgttctccaaggaaaactccgtggcactaggcactagggggttgtggtattccccccccnnnnnnnnnnncagcccccggggggggacaaccgcgagccggttcttgtaaacacaatatccacaagtaggggagatttcctgggaggggcgctataccacgtggacactctttacaccacacggggggagccccccaaagcgcgaacgctcccgataaatatgccaaaaatagtagcccccctcgcgaccccctggggcccaactcttctatgccgaaagaaacaacgtgggtggggaaaagatctccctttataanacgccatatttccggggccccggaaacatgtgtggaaacagccccttctccgacaaaaagacggggtatctggataacgaaaacccctcggagaatatcgcgccccggtgcgggggaaattccacggcacaaccccttggtggtctcggcccccttggggcgagagatatagataacatttatgtgcgccccaactgtaggcggggaaaaacaaacacgcggggggcgggcgcccaacacaaacccnaaagctgtcgctcccccccacaatactcagggggcgcgcgcccccggcgtgtgtttacaccatctctcgacggaaaacccttgggtgcggcggcgganaaaacatcccctcc

SEQ ID NO: 69687 - DNA, 727 bp, Homo Sapiens
agcttcaaggtaataggacagcaggaacctaaaatatctgccatcatctgccataggaaagatacccagagacccatcatgttctctttttgttgttacactgttgggtgggtataacaattggaaaatgaacaaactgattgattgtgcaaactactttttatgacaagcctaaaccctcataatgcggcagcttaaagtgtatacatatgcactaactttgatcaattatattctcatatctgttagctacacagtctcctattatctcaattgcttatgtgcatatggaatatgttacttaaaacgtgtgcattcttactgaaaatgttttcaaaggaaggtatcagctgtgggctaattgccaccaatttcagcctgccacgattcttggaaatatgtcttccaagtgccatccatcatcagtaggacaagtgtcgggagtttgtttatttttttccagtagcaacgatgggttacatggagccatgaaacctccttctggcctcccttgtgattaatggcatgtgtttgtaaaatggatagctggggttggcagatggctagagaagaatcgcctttggtttaaaatgtatgtggtcccctaatgattgtgaccccattctgtaatcaactgagctagttccaataaagttaagcaggtttaaatccactttgtgcctatcttttcactgacaataaagttagctattttaaaatgcaaaaa

SEQ ID NO: 69688 - DNA, 450 bp, Homo Sapiens
  misc_feature (62)..(78): n is a, c, g, or t
gtatgtgaagagatttttatataagatttatttccttttttgccaaaacactgtatactttnnnnnnnnnnnnnnnnngcaattcctggtggctgtgtgcctccaaccctggtccccctctgtctccagccaccctctgcttgggcttctgagctggtggccctggcccagaggtctggcggaggcccaggcagcagccatggcggggtgtctctacaggggagaggcgggagcctgccaccctcttcctgccctacctcctactaacacttcctgccccatttggacccgtaccatggggctcaggacagagggagctagcagctggcctccatggccccacagcctccttcgaggctgtgctgggtgcagaaccgccagagccacccaaaaggtgtttctcttctgctccctgaacctcttaacttaataaaacgttccagcagcaaa

SEQ ID NO: 69689 - DNA, 713 bp, Homo Sapiens
aaaagggagaatgtgtaaccctgggatcgaagggacagggttaaacccccaagttgccattttagttcaaggagaggtccacaagcactctcccaaaccagtgtttcaaaccttttatgaggagttaaatctgccagcaccagaacttctgaaaaagataaaaaatttgtttctccaattagcagaaaatgtagctcattcccttaatgttacttcttgttatatatgcgggggaaccactatcagagaccgatggccttgggaagcctgagagttggtgcccactgatccagctcctgatataatgggggcttgtccaggatctcatcaggactggatggctctcgctggactatactggatatgtgggcagagagcctacattcagttacctaatgaatgggcagacagttgtgttattggcactattaagccatcctttttcttattaccgataaaaactactggtactatctgtaaattccagacattgtatgagaaagcactgtaaaactttttgttctgttagctgatatatgtagcctccagtcacattcctcatgcttacttgatctatcatgaccctttcacgtggaccccttagagttgtaagcccttaaaagggctaggaatttctttttgggggagcttggctcttaagacatgagtctgccaatgctaccggccaaataaaaacctcttccttctttaaa

SEQ ID NO: 69690 - DNA, 986 bp, Homo Sapiens
  misc_feature (34)..(34): n is a, c, g, or t
  misc_feature (58)..(58): n is a, c, g, or t
  misc_feature (74)..(74): n is a, c, g, or t
  misc_feature (148)..(150): n is a, c, g, or t
  misc_feature (161)..(161): n is a, c, g, or t
  misc_feature (204)..(204): n is a, c, g, or t
  misc_feature (219)..(219): n is a, c, g, or t
  misc_feature (264)..(264): n is a, c, g, or t
  misc_feature (615)..(647): n is a, c, g, or t
actgtcattgatctacgtgcagcatctagaatantctatgaactgcagacttgctgtntagctggcagaaaccnaatgagatgctattatcagatagactgccttagactactgctagtagctgaagaggagttgtagaaattactannnccattgctgcntacaataaatgatcaaggacagttgttaaaaacatagtcaggnacatgacaaaggtgncacatgtgcctgtacaggtttggcacgagtttaatcctgagtctntatttgaaaaatgtttccagctataagaggatttaaaaccctcattgtaggtgtattgctagtgataggaacttgcttgctgctccccctgtgtattacccttgctttttcaaatgatcaaaggttttgtagctactttggttcatcagaaaacttcagcacacgtgtgttatataaatcactatcgctctatctcacaaatagactcaaaaagtaaagatgagagtgagaactcccactaaaaagtgaaaatgctcaaaggggggaaataaggtatgagaccaccacttctcctgttgtccttcccagtttctccccaacctccccttttccctagtttgtaagacagcnnnnnnnnnnnnnnnnnnnnnnnnnnnnnnnnnagaagtaaaataaatagctagaggaccttggcgccaccacctggccccggtggttaaaacaacaataatattaacccctgaccaaaactacctgtgttatctgtaaatcccagacactgtatgagaaagcactgtaaaaactttttgttctgttagctgatgtttgtagcccccagtcacgttcctcaggcttacttgatctattatgactttttcacgtagaccctttagagttgtaagcccttaaaagggctaggaatttctttttccgggagctcggctcttaagacaccagtctgccaacgctcctggctgaataaaaaaacctcttccttcttt

SEQ ID NO: 69691 - DNA, 1180 bp, Homo Sapiens
  misc_feature (68)..(68): n is a, c, g, or t
  misc_feature (88)..(88): n is a, c, g, or t
  misc_feature (92)..(92): n is a, c, g, or t
  misc_feature (104)..(104): n is a, c, g, or t
tttggtttactctttccaacgatcagaccttgtgccaagttcagagatttgagcacactttccctttnttgttgtgtgcccaggactntggnaggattagacgngctgatgtaggataagtgggatgggatacgcaacagaaaacttgggactagcatgcacccacccctgatgtgccctggtgacagccgagctgtgctctagcgtgaccagtccttcctgtccctgccaagggtgaggccagagttgcccccgaggctaatgtttcagtgggtgagattaggtcggccgtacagaggccggtgggctccctgacatcccttccaggcaacctgaaagcactgaaatagcttatggccctgtgccagggaccttggcccaagctgctgacctccagggtggggagggagctacccccaggagaagagtcactcagacagcagtatgagcaagccagccagcagctccgtgcctgcacccagctcaggggaatcccagggggttcagatgcccaggaaggaaaaggggacagcgctactgctatggaatgagaccaccacttctcctgttgtccttcccagcttctccccaacctccccttttccctagtttataagacaggagaaaagggagaaagcaaaaagctggaaagaaacagaagtaagataaatagctagacgaccttggcgccaccacctggccctggtggttaaaatgataataatattaacccctgaccaaaacgactggtgttatctgtaaatcccagacattgtgtgagaaagcaccgtaaaactttttgtcctattagctgatgtgtgtagcccccagtcacgttcctcacgcttacttgatctattatgaccctttcacgtggaccccttagagttgtaagctcttaaaagggctaggaatttctttttcggggagctcggctcttaagacgcgagtctgccgacgctcccggccgaataaaaacctcttccttctttaatctggtgtctgaggagttttgtctgtgactcatcctgctacattagaaatatgtatctttcacaaatggaatctaaccacccaaagttgaagagcatttccctatgttgaataaatatgaaggagttcaaattttggaactgatattgtgctttccactacacctcatttttttcttattctattt

SEQ ID NO: 69692 - DNA, 485 bp, Homo Sapiens
  misc_feature (109)..(157): n is a, c, g, or t
aaagtgaaaatgctcaaaggggggaaataaggtatgagaccaccacttctcctgttgtccttcccagtttctccccaacctccccttttccctagtttgtaagacagcnnnnnnnnnnnnnnnnnnnnnnnnnnnnnnnnnnnnnnnnnnnnnnnnngctagacgaccttggcgccaccacctggccctggtggttaaaataacaataatattaacccctgaccaaaactacaggtgttatctgtaaatcccagacattgtatgagaaagcactgtaaaaactttttgttctgttagctgatgtatgtagcccccagtcacgttcctcaggcttacttgatctattatgactttttcacgtagaccctttagagttgtaagcccttaaaagggctaggaatttctttttcagggagctcggctcttaagacatgagtctgccaacgctcccggccgaataaaaaaacctcttccttctttaaaaa

SEQ ID NO: 69693 - DNA, 704 bp, Homo Sapiens
  misc_feature (31)..(31): n is a, c, g, or t
  misc_feature (74)..(74): n is a, c, g, or t
  misc_feature (95)..(95): n is a, c, g, or t
aggacagttcgaggaacagcagaagcgctgngagaaaagaaaggacaaaatgcccagaagctccatctaaatcntggacaccccgtacatttccnaagaaatggagtctctacacttaagtgaagaggaaaggcaggaagagctggacagcatgattaggatgaacaaggagaagctggaggaatgtaccagaaggaatggccaggttttcataaccaacttggccaccttcaccgagaagttcctactgcagttggatgaggtggtcaccattgacgatgtccaggttgcaaggatggagccccccaaacagaaattatcaatgctcatacgaaggaaactcgctgggctctccctgaaggaagagagtgagaaacccctgattgaacgtggaagcaggaagtggccagggatcaaacccaccgaagtcaccatccaaaacaagattcttctccagccaacatcatcgatttccaccaccaaaaccaccctgggccacctggcggccgtggaagcccgagatgctgtgtacctgaaatatttagcatcatttgaggaggagctaaagaggatccaggatgactgtacatctcagataaaggaggctcagcgctggaaggacagctggaagcagtccctgcacactatccaaggcctgtatgtgtgaccctccgccccaccatgaataaacactttcttataca

SEQ ID NO: 69694 - DNA, 1042 bp, Homo Sapiens
  misc_feature (199)..(199): n is a, c, g, or t
  misc_feature (214)..(214): n is a, c, g, or t
  misc_feature (219)..(219): n is a, c, g, or t
  misc_feature (237)..(237): n is a, c, g, or t
  misc_feature (288)..(288): n is a, c, g, or t
  misc_feature (308)..(308): n is a, c, g, or t
ggagagggagccccatccaacccttcccgggtgcgatcatatcagtgcagacagtcccgatgaagcgcatagcgacccatatgtgatactcctcatagcacccgcttacattttctccgctgtatgtgtgtgatttgacggatacattcacacagaaaagcttgacagatacgaattatacgactcatataggaattgnccctcgagccagaantcgcnacgaggggatattagctnagatagtcaaggacaaccctgaacgtgttgtccagggggagttcttagtcnggaacccatatgagctagcntaagccaaagaagtctctatgaaccatatccggggactcatggaaactgcagcaacgtcagagcatcaagcttgggttggagctgggaacagcacccacaccactgcttagattcctccatccatgaccccctgcccctgtcaccaccccgagctgtgtggctggtgcattcagcttctccatggagagggctcagcctgccataactccaagtgggaggaggggtgccagtcctcccttttctaagtgtaatgccaggggaaatccctcgatctcaggctgtcggtgaggctgcagtcactagcctgtcttttgcctctagggatggagccccccaaacagaaattatcaatgctcatacgaaggaaactcgctgggctctccctgaaggaagagagtgagaaacccctgattgaacgtggaagcaggaagtggccagggatcaaacccaccgaagtcaccatccaaaacaagattcttctccagccaacatcatcgatttccaccaccaaaaccaccctgggccacctggcggccgtggaagcccgagatgctgtgtacctgaaatatttagcatcatttgaggaggagctaaagaggatccaggatgactgtacatctcagataaaggaggctcagcgctggaaggacagctggaagcagtccctgcacactatccaaggcctgtatgtgtgaccctccgccccaccatgaataaacactttcttatacag

SEQ ID NO: 69695 - DNA, 2968 bp, Homo Sapiens
aaggtagcgaggcctgggtggcgctgtcgcgccgctgctggttgctgtccctggacccctaccatggaggagaccatcaaagatccccccacatcagctgtcttgctggatcactgtcatttctctcaggtcatctttaacagtgtggagaagttctacatccctggaggggacgtcacatgtcattataccttcacccagcatttcatccctcgtcgaaaggattggattggcatctttagagtggggtggaagacaacccgtgagtattacaccttcatgtgggttactttgcccattgacctaaacaacaaatcagctaaacagcaggaagtccaattcaaagcttactacctgcccaaggatgatgagtattaccagttctgctatgtggatgaggatggtgtggtccggggagcaagtattcctttccaattccgtccagaaaatgaggaagacatcctggttgttaccactcagggagaggtggaagagattgagcagcacaacaaggagctttgcaaagaaaaccaggagctgaaggacagctgtatcagcctccagaagcagaactcagacatgcaggctgagctccaaaagaagcaggaggagctagaaaccctacagagcatcaataagaagttggaactgaaagtgaaagaacagaaggactattgggagacagagctgctttcaactgaaagaacaaaaccagaagatgtcctcagaaaatgagaagaagggaatcagagtggatcagcttcaggcccagctgtcaactcaagagaaagaaatggagaagcttgttcagggagatcaagataagacagagcagttagagcagctgaaaaaggaaaatgaccacctctttctcagtttaactgaacagaggaaggaccagaagaagctcgagcagacagtggagcaaatgaagcagaatgaaactactgcaatgaagaaacaacaggaattaatggatgaaaactttgacctgtcaaaaagactgagtgagaacgaaattatatgtaatgctctgcagagacagaaagagagattggaaggagaaaatgatcttttgaagagggagaacagcagattgctcagttacatgggtctggattttaattctttgccgtatcaagtacctacttcagatgaaggaggcgcaagacaaaatccaggacttgcctatggaaacccatattctggtatccaagaaagttcttccgccagcccgctctccatcaagaaatgccctatctgcaaagcagatgatatttgtgatcacaccttggagcaacagcagatgcagcccctttgtttcaattgtccaatttgtgacaagatcttcccagctacagagaagcagatctttgaagaccacgtgttctgccactctctctgagtatcccaacctcttggatgtatacagagattttatagaatagaacctatagcttctaccatgagttatatgagtcaagatcctgcctaacctgaaattattagggatttactcagccctgctgccgctaacagtggagttatgtcactgatctgaagtcactgttaagggcttctgctgccatccttgtgggttgctacctttaagtcgcataactctagctgtatcatcctctcacctgtcattcttctgagggtctcagtacaagggccctgggatggagccaacctgggtattcacaacaggcctgacttgatactaagtgattagttttccaagttgtcccactgccattcaaagtcagcccttgagtgtatttgttctcagtcctaaccctggggccagagattggtccgaggttgagaattccttcctcctcatccttggtgttgctttctccaaatgattgttttagactagccaaaaatgccgtggcaaagagctcagaaatccaatttggataccaaaggtttctcatgttaatttctcagcccccaaagaagcatcttactcctgaaccttagacaggaagtattgtttcagtcacagaaagcttttctgggtacctctggttagcactttctactctctgatatttcctatgtacatagcttttattgttgtaaatcctttcttaatggttaaataggattgttagcaactatgggtttgcagttttctgagtaggtgagttttgaatatgggtaaatcagaataatgagacaacttgttaatctctttaatactaaaaataaattactcttctatttcagggacttaggtaatttaaaataaaccttcaatttatggtcttctgttttgaagctcatgggcgaaaattgtgatcaaaaggggctatggggaaggggccaggacccccgcccattggatttttctccttcaccttggtctttaagattaaatacaaaaagagtgtcccttggctcctcacatatgttttacgttttcataataacaccctaagttcaccttggcttaactgtacggccatccatactgatctcccagaaggcagagtcctcagtatgaacattacactagtttgtcttttcaaccccaatgcttccgccaccacctttttatgtcgaattccctttaatcttagctcctacactctactggggtagcctcgacttccgtcgcccaaccgacttgtgcacttcttgaaagactacgttgaacgcaactcctacaggacgcacacattcgcatcctcacagggtcacatggattcccgtactgtctcaaagatactagcgtctcatctaagtacttatcagcgccctactacacggcgatgtcgccctctcaaatttctaacgcgggctacacatagctgattgccccaaatctcatcactaacgcgcgggaacacatacagtgtttactgaaatcataactcaaactttactggcgttacatctcacgtatacccacaaagcgttcccacctccagacgtgtttccgcagccctggccgcta

SEQ ID NO: 69696 - DNA, 1150 bp, Homo Sapiens
  misc_feature (64)..(165): n is a, c, g, or t
  misc_feature (883)..(1000): n is a, c, g, or t
  misc_feature (1007)..(1008): n is a, c, g, or t
  misc_feature (1021)..(1034): n is a, c, g, or t
  misc_feature (1058)..(1084): n is a, c, g, or t
caattctcgagcgtagctgggattacaggcacctgccaccatgcccggctaatttttgtaattnnnnnnnnnnnnnnnnnnnnnnnnnnnnnnnnnnnnnnnnnnnnnnnnnnnnnnnnnnnnnnnnnnnnnnnnnnnnnnnnnnnnnnnnnnnnnnnnnnnnnntgagcccccgcgcccagccatcaaaatgctttttatttctgcatatgttgaatactttttacaatttaaaaaaatgatctgttttgaaggcaaaattgcaaatcttgaaattaagaaggcaaaaatgtaaaggagtcaaaactataaatcaagtatttgggaagtgaagactggaagctaatttgcattaaattcacaaacttttatactctttctgtatatacattttttttctttaaaaaacaactatggatcagaatagccacatttagaacactttttgttatcagtcaatatttttagatagttagaacctggtcctaagcctaaaagtgggcttgattctgcagtaaatcttttacaactgcctcgacacacataaacctttttaaaaatagacactccccgaagtcttttgttcgcatggtcacacactgatgcttagatgttccagtaatctaatatggccacagtagtcttgatgaccaaagtcctttttttccatctttagaaaactacatgggaacaaacagatcgaacagttttgaagctactgtgtgtgtgaatgaacactcttgctttattccagaatgctgtacatctattttggattgtatattgtgtttgtgtatttacgctttgattcatagtaacttcttatggaattgatttgcattgaacacaaactgtaaataaaaagaaatggctgaaagagcannnnnnnnnnnnnnnnnnnnnnnnnnnnnnnnnnnnnnnnnnnnnnnnnnnnnnnnnnnnnnnnnnnnnnnnnnnnnnnnnnnnnnnnnnnnnnnnnnnnnnnnnnnnnnnnnnnnnncataaannattcctgggggcnnnnnnnnnnnnnnaaaaactttttaaaacattttttnnnnnnnnnnnnnnnnnnnnnnnnnnnacctgggtcttactgtgttccaaggaaaacccgggccctcgactaagggttgggatctcccacaac

SEQ ID NO: 69697 - DNA, 829 bp, Homo Sapiens
ggagagaatatttaaaaacattgaatgaagaaaagagaaaagaagaagagtctaaatttgaagaaatgaagaaaaagcatgaaaatcaccctaaagttaatcacccaggaagcaaagatcaactaaaagaggtatgggaagagactgatggattggatcctaatgactttgaccccaagacatttttcaaattacatgatgtcaatagtgatggattcctggatgaacaagaattagaagccctatttactaaagagttggagaaagtatatgaccctaaaaatgaagaggatgatatggtagaaatggaagaagaaaggcttagaatgagggaacatgtaatgaatgaggttgatactaacaaagacagattggtgactctggaggagtttttgaaagccacagaaaaaaaagaattcttggagccagatagctgggagacattagatcagcaacagttcttcacagaggaagaactaaaagaatatgaaaatattattgctttacaagaaaatgaacttaagaagaaggcagatgagcttcagaaacaaaaagaagagctacaacgtcagcatgatcaactggaggctcagaagctggaatatcatcaggtcatacagcagatggaacaaaaaaaattacaaggaattcctccatcagggccagctggagaattgaagtttgagccacacatttaaagtctgaagtccaccagaacttggaagaaagctgttaactcaacatctatttcatctttttagctcccttcctttttctctgctcaataaatattttaaaagcatatttgaaataaagggagatacttttt

SEQ ID NO: 69698 - DNA, 997 bp, Homo Sapiens
  misc_feature (81)..(115): n is a, c, g, or t
  misc_feature (607)..(669): n is a, c, g, or t
  misc_feature (904)..(941): n is a, c, g, or t
aaaatgtatagactcatataggggctcagcgtctcgtagccgaacgacgagcgcagcgagtattgagcgaggaagcggcgnnnnnnnnnnnnnnnnnnnnnnnnnnnnnnnnnnncagtcgacggtaccggacatatgcccgggaattcggccattacggccggggaaccaccagatactggactttattatgatgaatatctcaagcaagtgattgatgtgctggaaacagataaacacttcagagaaaagctccagaaagcagacatagaggaaataaagagtgggaggctaagcaaagaactggatttagtaagtcaccatgtgaggacaaaacttgatgaactgaaaaggcaagaagtaggaaggttaagaatgttaattaaagctaagttggattcccttcaagatataggcatggaccaccaagctcttctaaaacaatttgatcacctaaaccacctgaatcctgacaagtttgaatccacagatttagatatgctaatcaaagcggcaacaagtgatctggaacactatgacaagactcgtcatgaagaatttaaaaaatatgaaatgatgaaggaacatgaaaggagagaatatttannnnnnnnnnnnnnnnnnnnnnnnnnnnnnnnnnnnnnnnnnnnnnnnnnnnnnnnnnnnnnncatgaaaatcaccctaaagttaatcacccaggaagcaaagatcaactaaaagaggtatgggaagagactgatggattggatcctaatgactttgaccccaagacatttttcaaattacatgatgtcaatagtgatggattcctggatgaacaagaattagaagccctatttactaaagagttggagaaagtatatgaccctaaaaatgaagaggatgatatggtagaaatggaannnnnnnnnnnnnnnnnnnnnnnnnnnnnnnnnnnnnnggttgatactaacaaagacagattggtgactctggaggagtttttgaaagccacag

SEQ ID NO: 69699 - DNA, 1026 bp, Homo Sapiens
  misc_feature (50)..(71): n is a, c, g, or t
  misc_feature (947)..(965): n is a, c, g, or t
gctatttacctaaaaaaagaaaatgcttcagtcaattgcttttttatttnnnnnnnnnnnnnnnnnnnnnngctgtaaccttatcatttctgagtagaccattgagcgatgaatgcacacctgtagtagcccaggaccagctgtggtggctaaagggaatatgttaattaagcaagaggttcttttctaaaagtggtatctgttatccacaatgtattttagttattcccacaagtcaggggtccagataaaatgagggttatcagctaactgatatgctatcattgaggttcatcaatgaatttgtacatttctagttccctttggtgaagggaaaaatgatgattttgcaagacctagattttggcttggtttcttgcctccttttttggcagccttcatcttctcatctcccaaaccccctgagcccgtagggttttcatagtggacaaagaacttgtggtcttttaaaactgggactgatacttttttgagagagtatcgtgtcgaaagtgtgatgttctaccactttaccaataactaattttaaatacacattgtcctctcgatttttggaccaaacagacgctcacagtggaggcttatcaagggttgcattggggaagaagcctctccctctctgtcagcaccagctggtaaaggtgactgtacagatgtgcattttccttttggtataaatggtccacagcactaactggtaaggcttattgtacagtatattgtcagtattcttctggttcagcataccttatagttcatatataacctgtattaattgtatagattgtgcattaaaagctgttaccaagttgtcagaacataagagcgaaaacaaggtcatatgtaatattttgtttgtaagtatcctttgtatcatagcaaaggaaatgtttaaaaaaatcaactgtaataaagtaattttagtnnnnnnnnnnnnnnnnnnngcctacagccgcggccgcaagcttattccctttagttgagggttaattttagcttggcact

SEQ ID NO: 69700 - DNA, 1123 bp, Homo Sapiens
  misc_feature (77)..(77): n is a, c, g, or t
  misc_feature (90)..(91): n is a, c, g, or t
  misc_feature (98)..(98): n is a, c, g, or t
  misc_feature (104)..(104): n is a, c, g, or t
  misc_feature (115)..(115): n is a, c, g, or t
  misc_feature (121)..(121): n is a, c, g, or t
  misc_feature (127)..(127): n is a, c, g, or t
  misc_feature (206)..(206): n is a, c, g, or t
  misc_feature (988)..(1036): n is a, c, g, or t
ggaaggagtagacttgagaatcagaaaagctacagtacactgatcgaagtgcatgtaaaggagacttcttgtcatcntgaacacagtaanngaagtgnaagaanaattgaaacanggaaangaactnaaagcggaagagacaaaagtttgaactacaaaagaatgcaatggaaaaacttcatagtatggatgatgcctttaaaagnacaagttgatgcaattgttgaagctcatcaagctgaaatagcacagctggccaatgaaaagcagaagtgtattgattctgcaaatttaaaggtccatcaaattgaaaaagaaatgcgtgaacttttggaagaaacatgcaagaacaaaaaaacaatggaagcaaaaattaagcaacttgcttttgctttaaatgaaattcagcaagatatgtgatggttctgagaatgaatttaattgaaatagaccagcagacctattgtaaaaatgattaaatattgtaatagtagtaactgctatgactttgaaatgtctctttctatacatttcattatgaatatatttttaaagacttttgatcaagtattaattgtataggttttttataataaattgttgacaattttgtctattagaaaaaactatcataactagacttacaatatttttcttgtttctgtactatacgttgtttggtaattacacatttgcctacaaatttgtgaatgaaaagattagtattttcaccatatgaggtaaaacattttaatcattgttatcttattgtgatgatgaagaactaattatatttgttatttaattgatgtagctcaattcttttaaagcacttatgtacccaaaaagcatttgaaatctgtatgataaaagatgtgccattcttaagaaagtatatgtagccatctccacatcactcattatgacccccttcttttataacgcttacatccttttccttaaaagattaccttttacggtttttctnnnnnnnnnnnnnnnnnnnnnnnnnnnnnnnnnnnnnnnnnnnnnnnnnacctgtagggaatttccatttccccccccgcaccgccgtcttttttccctggcgggcgccgccccccgcgcctcctctagcaaaaat

SEQ ID NO: 69701 - DNA, 638 bp, Homo Sapiens
gcacgaggtttctgaataggcagccagtggggagaaggaaaagtggtggtctccagtgactagtgagagaaaaaaggagactgtgaagtgattaagaagaaattgcaaactagtgagaagaactcaatcagcaattgtgatgaggttaactcacagacctcttggaatatggtatagaagtggcagattaagtgactgaaataacatttctgaaaaaaaattactgaaccatcagaaattcataaaatctctaatttttacataagaattattttcaagcttaccagtaaacttgggtgtcatatattataccaagaactgctgctgcactaattgtgtacgctgcacagtctctgaataggggccaacatgatagtgttgagacctgtaatatggtaagttattatttccattacattgtaacttcttcaagtacaatccttagtataatactaaaattgtttatatatttgtagttaaatattgttatcttttgcatattgcttagagaaaaaaatgtaaaattgtgttctaacttacacagactttcataaatctgaccaagagctatttgtggattaacattaaattgaatacatgttgtttttctactgattaataaatttgattgcacataa

SEQ ID NO: 69702 - DNA, 1225 bp, Homo Sapiens
  misc_feature (77)..(111): n is a, c, g, or t
aactgtatagatactatagggcgtaggctgagagcgaacgacgagcgcagcgagttagtgagcgaggaagcggccgnnnnnnnnnnnnnnnnnnnnnnnnnnnnnnnnnnncagtcgacggtaccggacatatgcccgggaattcggccattacggccgggggcagaagctgcgggtgtcctgtgaggcgccgggtgacggcgaccctttccagggcctgttgtctggcgtggcccagatgaaggacatggtaacggaattattcgaccctctggtacagggggaagtgcagcaccgggtggcggcggctccagacgaggacttggacggtgatgatgaagatgatgcagaagatgaaaataacattgataacagaactaacttcgatggaccatctgcaaaacggccaaaaacaccgtcttaacaatagccttcatgacatttaaaagatggctgttgtatccttattgtcacactaggacatttaaggaagacttatgctctaatttggaaaaagcatttgtgttgttctcctgggacaattttgtcaaagagaaaactggtttttctgtttctagcaaagatagtaaaggcttagaaataaaatctgttttcttgagaaataaatttcagaccctggaaggaaaatagaacacttcataatgtataaaatcctctaagttggcaactgaatttttatcattgttttctatttttaaaataatcattgatttgtgtgatgtctacatcttttaacttctggttctgttataaagagtacatgtcacggttcataggcagtaacatttcagagaactgacatgaacaagtagtgaaaattgggcattaaatataaaaataacagttcttcataaacagaaggaaaataaggaaatagaaataccgacgagaaaggagagtccttgaaagagacccaaggaaaccctgaattcatacccacgtcaaatatgcacatatcctgagatgatgccactttgatgaatgtgcattagtctgatttatcatgtaccttaagagagccagatggggtatgtttttgtgctgtgatatggtatttatacaggtacaaatataaggccttaagtaaacaatctgcattgattacaatttggatatttcctctcctcctgtagccatactttgattttgctttaaaaagattattgaatccttttaaaaatatatattcctaaaatatgaaaaa

SEQ ID NO: 69703 - DNA, 689 bp, Homo Sapiens
ttctggctgtatggctcatgtttcctccccttggtaaaaatagaggcatgaatctccgttttgtgatctgctcctaatttcatatatgacattatttgatgtacataattaccaacatccaaaagcgtttcttcccctttctacgtgtgcactaaattctaaaacaaaaattggaatacaaaatgcctaataaagaaaaaattcatgtacagaaaagcaaaagataatctactttgttaagataatttgtcactagctggttgaataatgcacagtttttgtttaaggttacacatttatgcctggattaaataacaatagtaaaacttgacaagtcttttgaaaaacagctgctaaacatattgctttctggaatgtaatcattagcaacaaatattctcttattctatacaattgcagaatgctagtggaactttcttgtaggttatttgacaatgaatgttaattgatttattttttaaaaatgtaaaatcctcttatccctttaaggccggtttaggctttcatgtccctgtgatagaaaatttcaaatgctggcttctaatttctactcactgaagtgtcttccagacataccagatggttggagctcctttgatagtatataagggagctacataaatgtatttgaactaactcgtgagcaaaatttctgttttcagcaaaaa

SEQ ID NO: 69704 - DNA, 689 bp, Homo Sapiens
tatcaagtatgagacagagctctgcaaagaattatataagcctctgggaagcagccgaaggctcgtaaattttctgggcaatgagactgcttcatcctgaatcacgttgctgtgggaggagggcaccctgagtgaccctgaggtataaaccccaagtgctcttgagtggagtctgcctctgtcctctcctgatcagcacccttggcctctttgtgggggttacataggagctcgtgctgatccctgaggggctgacccgagaggggtcaggatgctgaaactgtcttcttagtggcttcttcactgcataccacaggggccaggcacattgtgaatgtttggcaaatatttgtggaaggaatgaattgtgggctgaccgtgtgctctcagcctctatcagcatttcattctgtcacagccattttcccctgcaagattggtggaggggaaagggtaggcctcctgggagaggttctggatctttctgccatctgctttgttccatgggtcagccctgaaattagggcatttggatgggtttgcagcctcaaagtggagaatggattctgcctgcgaggatgtgtaagcatcacttcatcgatggtttgctgttactcaacttccagattaccttttgagcacccttttaggaaagagaggaaagttaataaattacattttacccacaa

SEQ ID NO: 69705 - DNA, 1096 bp, Homo Sapiens
cacagttaaacattcctttattcaccctatggctcccaagaaaagcattcttcctctggagtactggtgtactaaggggacaatacaccaaatttgttgagtttacaatcaagtctactaaggttggacttccttatcagtttggcgagtcccagggcagaataatcatccatctacaggtctctgtttcctctccctccacagcagtggagagcatcccagtgtttggggcactgtgttcctcttcgtccctgcaccagaccctggaagccttggccagagacctcaccaaactcgacttgcggcgctgggccagcttcatggatgctggagtggagcacgatgacgtagcagagctgctgcaggagctacaaagcctggcccagtgctaccagggtggtgacagcctcgtggactaaagttcccagtgtgggagaaaggagctagtttgcaataaaaacagctggatgcaggagcccagtgtcttcatgcagaggagctcaatgtcgcgggactagctacaccaacatatgcactttttacatttagaaacactgtgattagaccacagaacaataaatatgtgccatcagaccaaaaaaaagtagagaaaggagctgaactccactctcgatgctacttacagaggacatctgtaaagtcttcataaaagaccttgaatgatgcctaggatggcagagcccctgggtcctactccatcctccagcctttgtccttgtcctggcctcctgctctccagatctgtaaactgggctcaaggactgtacaagcagagtacaactacccgcctccccggtgccagggcgcctgttgggtttggtcctgtgtagatgattcccagagtctcattcatccagctcctcttcagacagaaggtccccatggtcagacagctggtctgcattgctggtactggttgcatcatcctcatcctcagagctggcttcacaggcagtgtggaagagctgcatgagttctcgaaaatggtgggaaacctaagaaaggaggagggctgtattcactgatccttagtaacatgttaacatttatgaagcactatatattgatttgcaaa

SEQ ID NO: 69706 - DNA, 441 bp, Homo Sapiens
tttacatatttaagcaggagttggtaatgttttattcttaaagacttcacctttggaacttaaaataagcaatatattcattaaagaaatagtttaattttgcaatacagatagtctttaaattttttgtctataaaatatttaaagaaatattctaaggatcttaaagtaactttgggaggcacggggaaggacaaagggactgaatttttatgtcgtggcctctgatcagtgcttttagtccaatccagtcaagtaagtaaaggttcatagaaaaaattgttttataaaatcatagtgatgaaaaaaactttccagcctagcgtcatcccatcaaagaaaaatactgagaaaacagcttgtaaaaaagaaggtaataaaatcaaattatactcataaaactctacacttaataacaggaatacataatatatataatat

SEQ ID NO: 69707 - DNA, 1530 bp, Homo Sapiens
  misc_feature (989)..(1032): n is a, c, g, or t
  misc_feature (1275)..(1284): n is a, c, g, or t
gattttttgttctacgctgaagttgattttgtttggtagagtgtaaggctttgctggccacttttatagctaacctgtaccttttccctttcttcttctcctgaaggttgcttcagttattaacatcaaaccccaatacaactcactccacaggcagctgccgttctcacactgctctacttagactcaatagcagcaccattaagtatctagactttgtctttgctgtgaaaaatgaaaaccgattttatctgaaggaagtgaacatcagcatgtatttggttaatggctccgttttcagcattgcaaataacaatctcagctactgggatgcccccctgggaagttcttatatgtgcaacaaagagcagactgtttcagtgtctggagcatttcagataaatacctttgatctaagggttcagcctttcaatgtgacacaaggaaagtattctacagctcaagactgcagtgcagatgacgacaacttccttgtgcccatagcggtgggagctgccttggcaggagtacttattctagtgttgctggcttattttattggtctcaagcaccatcatgctggatatgagcaattttagaatctgcaacctgattgattatataaaaatacatgcaaataacaagattttcttacctctcagttgttgaaacactttgcttcttaaaattgatatgttgaaactttaattcttttatcaatcccagcattttgagatcagtctttattaataaaacctgttctctttaatcagcttaaaatccaaagtgtcatatttactggtcctggagacaaacttgttcaaaagaacatcaacgtgcaatgttttaaggtctatcttaagaagccctggccaaattttgatcctaaccttgaagtatgccttgaacttattaacatggccattataagaataaaatatgtagttgtgtcttaatggaattaataaatgtcatttcactactgggtnnnnnnnnnnnnnnnnnnnnnnnnnnnnnnnnnnnnnnnnnnnngagggggggcgcggccgccacaaaagaaatctccccggggcggggggccccccagctctagcgccacccccgctttttctggcaacaaaggagggccccctaaaggagaagcgggcgtcttaatataagagccgagggcgggggcgcgcggtaaaacaggcgggcgacggggagaacaacacgtggacacgcctggggcgaacacttttgtgggggagaggggacaaccctaaacctcgtgcnnnnnnnnnnacaacaaatctatgtgggggaggcaccaatcctcccccaaccaagagaggtttttaataaaggccgtctaaggaggagcatcttataacatagtctttataggcgtggtcttacatggcggggtacaaccaccaacagcaggcaacatttagcctggcgcggcgtagagagacatttgtgcgcaactagcggggtttattattctcgcgacaatttttttacgaacgggggttgttatatatatgt

SEQ ID NO: 69708 - DNA, 1010 bp, Homo Sapiens
cagtcgacggtaccggacatatgcccgggaattcggccattacggccgggaagattcttaatagctggctgtaaatactgcttggttttttactgggtacattttatcatttattagcgctgaagagccaacatatttgtagatttttaatatctcatgattctgcctccaaggatgtttaaaatctagttgggaaaacaaacttcatcaagagtaaatgcagtggcatgctaagtacccaaataggagtgtatgcagaggatgaaagattaagattatgctctggcatctaacatatgattctgtagtatgaatgtaatcagtgtatgttagtacaaatgtctatccacaggctaaccccactctatgaatcaatagaagaagctatgaccttttgctgaaatatcagttactgaacaggcaggccactttgcctctaaattacctctgataattctagagattttaccatatttctaaactttgtttataactctgagaagatcatatttatgtaaagtatatgtatttgagtgcagaatttaaataaggctctacctcaaagacctttgcacagtttattggtgtcatattatacaatatttcaattgtgaattcacatagaaaacattaaattataatgtttgactattatatatgtgtatcgcattttacctggctcaaaactacctacttctttctcaggcatcaaaagcattttgagcaggagagtattactagagcttgccactctccattttggccttggtggtcatcttaatggctaatgcacccccaaacatggaaaatttcacccaaaaattacttaattagtccacacagaggcaagaattgcccttagaaaattctaggacagggttggagaatactaaagggtctcagagaaaggtagcttgtggactggtgatgaacccacgtgttggcatccaaaggtggtaacataggaatttaatatataccacccaagcgcgaaatagttaataggtcac

SEQ ID NO: 69709 - DNA, 1192 bp, Homo Sapiens
  misc_feature (87)..(121): n is a, c, g, or t
  misc_feature (971)..(1127): n is a, c, g, or t
  misc_feature (1135)..(1149): n is a, c, g, or t
caagaacctgatagactcactatagggcgctagcgtcgttgcagccgaacgacgagcgcagcgaagcagtgagcgaggaagcggcgnnnnnnnnnnnnnnnnnnnnnnnnnnnnnnnnnnncagtcgacggtaccggacatatgcccgggaattcggccattacggccgggcagaatttaaataaggctctacctcaaagacctttgcacagtttattggtgtcatattatacaatatttcaattgtgaattcacatagaaaacattaaattataatgtttgactattatatatgtgtatgcattttactggctcaaaactacctacttctttctcaggcatcaaaagcattttgagcaggagagtattactagagctttgccacctctccatttttgccttggtgctcatcttaatggcctaatgcacccccaaacatggaaatatcaccaaaaaatacttaatagtccaccaaaaggcaagactgcccttagaaattctagcctggtttggagatactaactgctctcagagaaagtagctttgtgacatgtcatgaacccatgtttgcaatcaaagatgataaaatagattcttatttttcccccacccccgaaaatgttcaataatgtcccatgtaaaacctgctacaaatggcagcttatacatagcaatggtaaaatcatcatctggatttaggaattgctcttgtcatacccccaagtttctaagatttaagattctccttactactatcctacgtttaaatatctttgaaagtttgtattaaatgtgaattttaagaaataatatttatatttctgtaaatgtaaactgtgaagatagttataaactgaagcagatacctggaaccacctaaagaacttccatttatggaggatttttttgccccttgtgtttggaattataaaatataggtaaaagtacgtaattaaataatgtttttggtnnnnnnnnnnnnnnnnnnnnnnnnnnnnnnnnnnnnnnnnnnnnnnnnnnnnnnnnnnnnnnnnnnnnnnnnnnnnnnnnnnnnnnnnnnnnnnnnnnnnnnnnnnnnnnnnnnnnnnnnnnnnnnnnnnnnnnnnnnnnnnnnnnnnnnnnnnnnnttgtgggnnnnnnnnnnnnnnnaaaaattttttaaaaacttttttgggggggcgggcccccaagg

SEQ ID NO: 69710 - DNA, 963 bp, Homo Sapiens
  misc_feature (80)..(114): n is a, c, g, or t
  misc_feature (641)..(685): n is a, c, g, or t
  misc_feature (851)..(851): n is a, c, g, or t
tgatagactcactatagggcgctagcgtcgttgcagccgaacgacgagcgcagcgaagtagtgagcgaggaagcggccgnnnnnnnnnnnnnnnnnnnnnnnnnnnnnnnnnnncagtcgacggtaccggacatatgcccgggaattcggccattacggccggggggcacataaatttatgatgataattttaaatgtacgatcattaagttgtatgcctcagtactataacaggtgaatctctgtaatattgactaaacagttaaaagatattttgtaaatttcaggtccatcgcatcaatgcatgaaatattagaaaaccaaattccaaagaatcaggaatttccatttccacccaaagtatactttattatcttctagcagttgtctgttaatataaaagcagcaaaatctcaggctacttatataattttcttccctttaattgaaagtttacacttagagattaatatatatgtacagagaagcttttcctgcctactctgtttataactctgtccaacttgcccacaaacactgccctccttcaacccatctgatgtgggcaaagccactgttttcttaggcccataactcagtgcagctgttttatttttataatgccggtcaacctttttgtnnnnnnnnnnnnnnnnnnnnnnnnnnnnnnnnnnnnnnnnnnnnnactaagatgtgtcttataaaataacggacaaatatatagagaatagagtaactggggtgggtacaaggggaggagactctcgtgggggatcgggaggctcagagagcgctctgtgattaaatatgctacaataatcccccacagagaatgtgtgtgtatactaggngcgagcttaaaaaactaagacgcgtactcagagaagaggtggaaaagggagggcaccaatactggtgtgtgtaaagggggtccgggggacaaaaagaccttggtgttaaaaa

SEQ ID NO: 69711 - DNA, 1013 bp, Homo Sapiens
  misc_feature (26)..(26): n is a, c, g, or t
  misc_feature (36)..(36): n is a, c, g, or t
  misc_feature (54)..(55): n is a, c, g, or t
  misc_feature (249)..(249): n is a, c, g, or t
ccggtaacattcaccccaggaacagnttgacttatnccgaattatacgactccnntagggatttgccctcgagccagaattcgcaacgaggctgttccatgaagcttgcagaattgagtccatttctagctgcctttattcacatagtgatgggtactaaaagtactggttgactcagagatcgctgtcatctgtcatgctgtactctacacttgagcacactctcccagtgcagatccccttatcatnccaagaggagcttcatcccttgctctaatgatcaggaatgatgcttattagaaaacaaactgcttgacccaggaacaagtgcttagcttaagtaaacttggctgtgctcagatccctgatccttccagctggtctgctctgagtggcttatcccgcatgagcaggagcgtgctggccctgagtactgaactttctgagtaacaatgagacacgttacagaacctatgttcaggttgcgggtgagctgccctctccaaatccagccagagatgcacattcctcggccagtctcagccaacagtaccaaaagtgatttttgagtgtgccagggtaaaggcttccagttcagcctcagttattttagacaatctcgccatctttaatttcttagcttcctgttctaataaatgcacggctttacctttcctgtcagaaataaaccaaggctctaaaagatgatttcccttctgtaactccctagagccacaggttctcattccttttcccattatacttctcacaattcagtttctatgagtttgatcacctgatttttttaacaaaatatttctaacgggaatgggtgggagtgctggtgaaaagaggtgaaatgtggttgtatgagccaatcatatttgtgattttttaaaaaaagtttaaaaggaaatatctgttctgaaaccccacttaagcattgtttttatataaaaacaatgataaagatgtgaaactgtgaaataaatataccatattagctacccacc

SEQ ID NO: 69712 - DNA, 1003 bp, Homo Sapiens
  misc_feature (891)..(925): n is a, c, g, or t
tggttgtcatcaacagcatatgctatttagtcaagatccagggttgagggctcaaacccaggaaacgattcctcaagtccttcagtagtctgatggagaccttaacctgtggactgagaacgcatttttcctcgaaccaccggcaatgtcgcatggctgctaaggcactttggcaaatactgtgatatccaaatggagtttctggatccagttttcgaagattgggtggcactgttgtaatgagaatcttcactgtagcatcagaagaactgatttcaaagccagtttcgttggtcagcatggttaaaacttcagaaggatcctgtgctcttaggctttccacgactttgttccccagggcagcaacagcttccaacgttggcagaatcttgagtatcaccaccaggtcagccacattgtgtcctgtagtcattgtcccctttttataggatcccacctgtcgaacttcttcaatttgcacttcaaatgtccctggagccacaatcagattatcaatcacattgtttatttttgtcaccagagaaaggatagatgcctgttcagcagaattgggagccaggtcctgattcctcttcagcaaggcctcactgaaggaagtttcatcaggtgctggcttgacccggggaaaggccatttcacacaaatagaagtcaaatgggatatgtggtacaaagggcctgaaccctcctcctgggcctcctctggaaccaaagcgcccaccacgaccacggcctctgtcacccctcatggcgccttaaaacacgaacaatggaggccgcaccaaccgccccttcctctgagtagcagacaactgaagaccccggccgtaatggccgaattcccgggcatatgtccggtaccgtcgactgnnnnnnnnnnnnnnnnnnnnnnnnnnnnnnnnnnncggccgcttcctcgctcactacttcgctgcgctcgtcgttcggctgaggcgagctagcgccctatagtgattatcatt

SEQ ID NO: 69713 - DNA, 904 bp, Homo Sapiens
  misc_feature (573)..(573): n is a, c, g, or t
gctggtaccgggtccggaattcccgggatatcgtcgacccacgcgtccgaggggcggttggtgcggcctccattgttcgtgttttaaggcgccatgaggggtgacagaggccgtggtcgtggtgggcgctttggttccagaggaggcccaggaggagggttcaggccctttgtaccacatatcccatttgacttctatttgtgtgaaatggcctttccccgggtcaagccagcacctgatgaaacttccttcagtgaggccttgctgaagaggaatcaggacctggctcccaattctgctgaacaggcatctatcctttctctggtgacaaaaataaacaatgtgattgataatctgattgtggctccagggacatttgaagtgcaaattgaagaagttcgacaggtgggatcctataaaaaggggacaatgactacaggacacaatgtggctgacctggtggtgatactcaagattctgccaacgttggaagctgttgctgccctggggaacaaaagtcgtggaaagcctaagagcacaggatccttctgaagttttaaccatgctgaccanacgaaactgggctttgaaaatcagtttctttctgatgcctaccagtgaagattctcatttacaacagtgccacccccatctttcgaaaaactgggatcccagaactccattttggaatatcaaaggatttgcagaagggcccttaacaagccattcccaacatgccccggctgggttccaaaggaaaatggccttctccacgccccaccggttaaaaggtctcccctttcgaaacttacttggaagggacttttggagggatttcgcttttttccccggggggttttttagagacccccctttttaaaaacccctgggggaatcccctttg

SEQ ID NO: 69714 - DNA, 1066 bp, Homo Sapiens
  misc_feature (26)..(26): n is a, c, g, or t
aaaataacgctaggtacgaggctggngtgtgaattccggacgaggggcggttggtgcggcctccattgttcgtgttttaaggcgccatgaggggtgacagaggccgtggtcgtggtgggcgctttggttccagaggaggcccaggaggagggttcaggccctttgtaccacatatcccatttgacttctatttgtgtgaaatggcctttccccgggtcaagccagcacctgatgaaacttccttcagtgaggccttgctgaagaggaatcaggacctggctcccaattctgctgaacaggcatctatcctttctctggtgacaaaaataaacaatgtgattgataatctgattgtggctccagggacatttgaagtgcaaattgaagaagttcgacaggtgggatcctataaaaaggggacaatgactacaggacacaatgtggctgacctggtggtgatactcaagattctgccaacgttggaagctgttgctgccctggggaacaaagtcgtggaaagcctaagagcacaggatccttctgaagttttaaccatgctgaccaacgaaactggctttgaaatcagttcttctgatgctacagtgaagattctcattacaacagtgccacccaatcttcgaaaactggatccagaactccatttggatatcaaagtattgcagagtgccttagcagccatccgacatgcccgctggttcgaggaaaatgcttctcagtccacagttaaagttctcatcagactactgaaggacttgaggattcgttttcctggctttgagcccctcacaccctggatccttgacctactagggcattatgctgtgatgaacaacccccacccagacagccctttgggccctaaacgttgcatacagggcgctggcttgcaaaatctgggctggcaggactgtttcctgcccaggttccggggggtaatcactgacccctggggagagtgggcaattttagaagtacacaacggtcctgaaccctaaaacagcaaggacatgggcctggctaaaaagcttcagaatctccgcccgaa

SEQ ID NO: 69715 - DNA, 1064 bp, Homo Sapiens
tcccggggccttgggtctcgtggcactgtccccgcgttgcgctggccccggggttcccctgggtcggggttggtgccccctcgtttgggccacctgggctgagccttccgggcgtaaccctgcggcgccgtgccccgccgtcgcccgcccttatccactttaggccaagcctttttgtggttttcatcccaccatattggcctattagttcaagatccggttgtaagggctcaaccaggaaaacgatcctcatcctcagtagtctgatgagaactttaactgtggactgagaagcattttcctcgaaccagcggcattcggatgctgctaaggcactctggcaatactttgatatccaaatggagttctggatccagttttcgaagattgggtggcactgttgtaatgagaatcttcactgtagcatcagaagaactgatttcaaagccagtttcgttggtcagcatggttaaaacttcagaaggatcctgtgctcttaggctttccacgactttgttccccagggcagcaacagcttccaacgttggcagaatcttgagtatcaccaccaggtcagccacattgtgtcctgtagtcattgtcccctttttataggatcccacctgtcgaacttcttcaatttgcacttcaaatgtcctggagccacaatcagattatcaatcacattgtttatttttgtcaccagagaaaggatagatgcctgttcagcagaattgggagccaggtcctgattcctcttcagcaaggcctcactgaaggaagtttcatcaggtgctggcttgacccggggaaaggccatttcacacaaatagaagtcaaatgggatatgtggtacaagggcctgaaccctcctcctgggcctcctctggaaccaagcgcccaccacgaccacggcctctgtcacccctcatggcgccttaaaacacgaacaatggagccgcaccaaccgccccttcctctgagcgacgcgtgggtcgacgatatcccgggaattccgaccggtaccagcctgctttttgaccacttggtctatatgacatgcc

SEQ ID NO: 69716 - DNA, 1468 bp, Homo Sapiens
  misc_feature (1248)..(1256): n is a, c, g, or t
  misc_feature (1289)..(1292): n is a, c, g, or t
  misc_feature (1294)..(1294): n is a, c, g, or t
  misc_feature (1307)..(1341): n is a, c, g, or t
  misc_feature (1435)..(1435): n is a, c, g, or t
aaggtagcgaggcctgggtggcgtatttcggcacgaggttgaagtgcaaattgaagaagttcgacaggtgggatcctataaaaaggggacaatgactacaggacacaatgtggctgacctggtggtgatactcaagattctgccaacgttggaagctgttgctgccctggggaacaaagtcgtggaaagcctaagagcacaggatccttctgaagttttaaccatgctgaccaacgaaactggctttgaaatcagttcttctgatgctacagtgaagattctcattacaacagtgccacccaatcttcgaaaactggatccagaactccatttggatatcaaagtattgcagagtgccttagcagccatccgacatgcccgctggttcgaggaaaatgcttctcagtccacagttaaagttctcatcagactactgaaggacttgaggattcgttttcctggctttgagcccctcacaccctggatccttgacctactaggccattatgctgtgatgaacaaccccaccagacagcctttggccctaaacgttgcatacaggcgctgcttgcagattctggctgcaggactgttcctgccaggttcagtgggtatcactgacccctgtgagagtggcaactttagagtacacacagtcatgaccctagaacagcaggacatggtctgctatacagctcagactctcgtccgaatcctctcacatggtggctttaggaagatccttggccaggagggtgatgccagctatcttgcttctgaaatatctacctgggatggagtgatagtaacaccttcagaaaaggcttatgagaagccaccagagaagaaggaaggagaggaagaagaggagaatacagaaggaaccacctcaaggagaggaagaagaaagcatggaaactcaggagtgacattcccttcactccttttcctacccaagggggaagactggagcctaagctgcctgctactgggctttacatggtgacagacatttccgtgggatagggaagatagcaggaagaaaagtaaactccatagaagtgtcattccactgggttttgatattggcttagctgccagtctcccatttgtgacctatgccatccatctataatggaggataccaacatttcttcctaatattctataatctccaactcctgaaaacccctctctcaactaatactttgctgttgaaatgttgtgaaatgttaagtgtctggaaannnnnnnnnctaagaaaaactattaaagtaccttcctagttnnnntnacccactcaccannnnnnnnnnnnnnnnnnnnnnnnnnnnnnnnnnngtaaccatcgtactttgtacttccccccttcgttcaccgcccattctagtggcccctcgggtttctttttccactgcgtgtttgccacaaattntttttttggcgccccccctctccccctagaaaa

SEQ ID NO: 69717 - DNA, 1103 bp, Homo Sapiens
  misc_feature (17)..(17): n is a, c, g, or t
  misc_feature (48)..(48): n is a, c, g, or t
  misc_feature (67)..(67): n is a, c, g, or t
  misc_feature (154)..(154): n is a, c, g, or t
ggagggactgagagggncctgacgtacagaattatatatcgccatggnctatgtgctagtgttaaanttgctttgccggtgttttaagaaagccagatgccatggattggacctctggggtgttctctcgagggacacacttcatcatacaaanctctgtacgttcctggaatcgatacttgtatttttctagtaccaagttacgtgcaccaaattataaaacacttttttataatattttctcactgagactcccagggcttttactatctccagaatgtatttttcctttttccgtaagactcaaaagtaatataaggtctacaaaatctactaaaaagtctctgcaaaaagtagatgaagaggactctgatgaagaaagccatcatgatgagatgagtgagcaggaagaggagcttgaggatgatcctactgtagtcaaaaactataaagacctggaaaaagcagttcagtcttttcggtatgatgttgtcctgaagacggggctagatattgggagaaacaaagtggaagatgctttctacaaaggtgaactcaggctgaatgaggaaaaattatggaagaaaagcagaacggtgaaagtgggagatacattggatcttctcattggagaggataaagaagcaggaacagagacagttatgcggattctcttgaaaaaagtgtttgaagagaagactgaaagtgaaaaatacagagtggtgttacggcggtggaaaagtttaaagttgcctaagaagagaatgtctaaataaatggattgctttttagcaatagagctgctttctagtggtaaaggaaggggtcacctgaaaaataggacatttttattaaaataaagttctcttagcgtttgtggaatctgccgagccattttgtggaaattgggatccatatctggagacacttcccaaggcctgcctcacctccaccccctgcccaccttgatccatgctcctttgacctcgtgtgagaacccctttgccagagtgagacgtgtgcagaatgaactaagccccagagggttttaatggcttgcctgctgtttcccacataaactacctcaggagtcacagtaaaat

SEQ ID NO: 69718 - DNA, 851 bp, Homo Sapiens
gcggccgcagccctggctgactgcacagcttccccgtgcctccctccctgctccactcccacattatagtcctttcctaacacggtcggccgggtgctttgtgtcagtgctgcagcactggggagccaggcgaggggggcttgggggcatggggccggaaagcaggcagaagcccgtcctgggtggtgctggcccagttggtgggacccctgtccacacccaccctatttatttccgttgtctctctgctgtgtcgcccaacacttcccagggtgctgctgccacccgccccagccagccacctgctcctgacagccagcagctgtgtatttgacaaagtcattggtatatttttacttactggattctccttgcactttacctgttcttttccagagctgacagcacgggctccggcgcagtgtgcctggcttggcttcccttccccatggctgggggctggggtaggactcacccattctaatttattttgtcttttggcttctcagtagctaaggggaaggctgatgtcaggagagggagagggggctgaggaggtagtgctgtaggcccagggggtcagggaaagggaggggggcatgtgagggatggaaatgacctcctggcaccaggctcacccacccaaggccccctgccccagcactgaatcccagcgctgccctgaggcccccagccactccctccagcagcctggttcaccacacaaactctgcctggaccccattgtctgtctgcttcccacctgccctccccaccccctgcccctcgggcaccagcctgcatatgtgttcacttttatttaaataaacttgtgtggtaaaagcaaaaaa

SEQ ID NO: 69719 - DNA, 624 bp, Homo Sapiens
atgcttctgagagccttacttagaagatgctgctggagtcacagctgaggagaggaatactatcaacatggactatcctgggaaagagctaggaagtagatgctgaggtccccatccaaacagcaagctaggaaaaagcctgccttgaaaatatttctagacatcaaagataacttacaacccaaagtgaataataagtaaatagtctgatgaccctcttaatagcattgcaattgtattgaatcacataatgattcataagtaactagggaaccaactgattttgctaagcagtcttccccttataacaccacaggcccttctgacacacaaaaaaatgaaagttaatcctgggtacagcatacagttttacatttaaacgcacagtcttacgtggacaaatgcaagcacaagcctaaagcaaggtcaagcagatggcaaaaacgaatttgcctgcaaagaaatctatttaactgaatcagcccataatatttgaggcacgaggttactgtgattgataggaaagataaaaatgatgtctgttttagtagacgaataaccatcaacatgacaacaaaattcactggggtctcacagcgtgcattccgtactccccaccgggga

SEQ ID NO: 69720 - DNA, 446 bp, Homo Sapiens
cagcaccagagaatccacacaggagagaagccctacaagtgcagcgagtgtgggaaggccttcccacaacagttccagactcattccaccaccagaggctgcaccacgggagagaaaccctacagatgcagcgattgcaagaaagccttcagccagagcacgtacttgattcagcaccggaggatccacaccggggagaagccctacaagtgcagcgagtgtgggaaggccttccggcacagttccaacatgtgtcagcatcagcggattcacctccgggaggacttctccatgtaacagtggcgcggtgtccgagggcagagtccagctgagcacttcctgcatgcgcccccggcacctgactctgccctttatgtattatccacacgatgttttcacagagtgaaaggacgtttctcattaaacaaacctcttttcttaaatca

SEQ ID NO: 69721 - DNA, 762 bp, Homo Sapiens
  misc_feature (26)..(26): n is a, c, g, or t
  misc_feature (47)..(108): n is a, c, g, or t
ttaatatattctaccaatgtattttntaatttaagacttctgtatgnnnnnnnnnnnnnnnnnnnnnnnnnnnnnnnnnnnnnnnnnnnnnnnnnnnnnnnnnnnnnncttgagcccaggaattcaagcctgggcaacatagtgagtcctcatctcctaaatttaaaaaacaaacaacaaaaacttctacgtgtggtaaagggttaactcagcaagcttgggttgcttaaaccttgcacattccaaagaaaggtctgaccccagtgctgacctttgactggctactgggaaatgagctctgagcccctggataggaatgtttctgtttgcctgaggcctttgaccatgccagatagtttatgctaacaatgtgatttatagtgaatacctgttttcctgtgtctaagaccctgggctgcactgtattaatttgaccttgggtatttggggagctgagactgagtagctgaagtgagtcacataagcactaaatgcttacctgactgacccccagtaaaactctggacatccagacttggatgagcttccttgggtggcaacacttttacgtattgtcacacaccattgctggggggattaagcactgtctgtaaaactccactgtgaaatgacaactggaaacttgcacgtggtctctcctgattctgctctattcaccttttccctttgctgattttaatctctattcttttgttgtaataaaccataatggtgaataaaacagcttgtctgagttctgtg

SEQ ID NO: 69722 - DNA, 624 bp, Homo Sapiens
gctattcatatgcactaagtagtttatggtgtgctttgtggctggcaattgtgacagattctattcttctattggtatgtggtttctttggggcatttgtttggatactgatggcatcttcgggggtctgaggcacctacacaaacctcaggtcactatcacgtgatactggagttgcctgttaaattatatttcttcttccacaaaactgcaggttccctgagggaaaggtctatgtcctgctcatttttggatccctaatggctggcacagtacctggtgcataatatggttcaacaaatatttgtaaaatgaatgaatcaaatagtccttcaaagcatcttcagaatcaagattgtcatctagattgcacccgaagtttatctttctagtattcagaatataatcaatcattgcttaaattattccatttcatcattcttgaataaaagctactaattttaaatactaatatctgagatatcttcgaaaagaagattagtcgttgtatgtgttgcttataaattttctctatggtggaaaatattcccaaaccatgtctaagcaatgaaaaaccagtgttctggcaggaaataaactgatgtttgttgaatttaataaaaa

SEQ ID NO: 69723 - DNA, 945 bp, Homo Sapiens
  misc_feature (46)..(84): n is a, c, g, or t
  misc_feature (88)..(122): n is a, c, g, or t
taacaagatgatagatcatatagggcgctagcgtcggcttattctnnnnnnnnnnnnnnnnnnnnnnnnnnnnnnnnnnnnnnnccgnnnnnnnnnnnnnnnnnnnnnnnnnnnnnnnnnnncagtcgacggtaccggacatatgcccgggaattcggccattacggccgggggacgggagtggcggccgcgcggaggaggccaagatggcggcagctgcggcttcgcttcgcggggtagtgttgggcccgcggggcgcggggctcccgggcgcgcgtgcccggggtctgctgtgcagcgcgcggcccgggcagctcccgctacggacacctcaggcagtggccttgtcgtcgaagtctggcctttcccgaggccggaaagtgatgctgtcagcgctgggcatgctggcggcagggggtgcggggctggccgtggctctgcattcggctgtgagtgccagtgacctggagctgcacccccccagctatccgtggtctcaccgtggcctcctctcttccttggaccacaccagcatccggaggggtttccaggtatataagcaggtgtgcgcctcctgccacagcatggacttcgtggcctaccgccacctggtgggcgtgtgctacaacggaggatgaagctaaggagctggctgcggaggtggcaggttcaagacggccccaattgaagatgggggagatgttcatgcaggccagggaagctgttcgactatttcccaaaaacaataccccaaacagtgaggctgctccgaggctgccaacaacggagcatttgccccctgacctcagctacatcgtgcgaagctaggcatggtggtgagggactacgtcttctcactgctacacgggctactgcgaagcacagccaacggggtgtcacttgcgggaaggtcttctacttcaaccgctacttcctggccaggca

SEQ ID NO: 69724 - DNA, 1063 bp, Homo Sapiens
ccttacgggctaggtagcgaggcctgggtggtgaattcggcacgaggaggaggccaagatggcggcagctgcggcttcgcttcgcggggtagtgttgggcccgcggggcgcggggctcccgggcgcgcgtgcccggggtctgctgtgcagcgcgcggcccgggcagctcccgctacggacacctcaggcagtggccttgtcgtcgaagtctggcctttcccgaggccggaaagtgatgctgtcagcgctgggcatgctggcggcagggggtgcggggctggccgtggctctgcattcggctgtgagtgccagtgacctggagctgcacccccccagctatccgtggtctcaccgtggcctcctctcttccttggaccacaccagcatccggaggggtttccaggtatataagcaggtgtgcgcctcctgccacagcatggacttcgtggcctaccgccacctggtgggcgtgtgctacacggaggatgaagctaaggagctggctgcggaggtggaggttcaagacggccccaatgaagatggggagatgttcatgcggccagggaagctgttcgactatttcccaaaaccataccccaacagtgaggctgctcgagctgccaacaacggagcattgccccctgacctcagctacatcgtgcgagctaggcatggtggtgaggactacgtcttctccctgctcacgggctactgcgagccaccaccggggtgtcactgcgggaaggtctctacttcaaccctactttactggcaggcattgcatggccctccatctacacagatgtcttagagttgacgatggaccccagtaccatgtccagatagcaaggatgtgtgaaccttctggctgggattgagcagagaagacatgaaaagcatggtcaaaagtgaagaaatggtcgtgtgccgggctaccataagggccagggcccgaaagtgaagggattggcgcaaggacggcagttgtgcctgggaagctaccaagacaggggggcgaactccttggaaagggggaagttcgctcccggaattgaaaacgtgg

SEQ ID NO: 69725 - DNA, 1239 bp, Homo Sapiens
aaaattagctaggtacgaggcctgggtttgaatttcggcacgaggccaagatggcggcagctgcggcttcgcttcgcggggtagtgttgggcccgcggggcgcggggctcccgggcgcgcgtgcccggggtctgctgtgcagcgcgcggcccgggcagctcccgctacggacacctcaggcagtggccttgtcgtcgaagtctggcctttcccgaggccggaaagtgatgctgtcagcgctgggcatgctggcggcagggggtgcggggctggccgtggctctgcattcggctgtgagtgccagtgacctggagctgcacccccccagctatccgtggtctcaccgtggcctcctctcttccttggaccacaccagcatccggaggggtttccaggtatataagcaggtgtgcgcctcctgccacagcatggacttcgtggcctaccgccacctggtgggcgtgtgctacacggaggatgaagctaaggagctggctgcggaggtggaggttcaagacggccccaatgaagatggggagatgttcatgcggccagggaagctgttcgactatttcccaaaaccataccccaacagtgaggctgctcgagctgccaacaacggagcattgccccctgacctcagctacatcgtgcgagctaggcatggtggtgaggactacgtcttctccctgctcacgggctactgcgagccacccaccggggtgtcactgcgggaaggtctctacttcaacccctactttcctggccaggccattgccatggcccctcccatctacacagatgtcttagagtttgacgatggcaccccagctaccatgtcccagatagccaaggatgtgtgcaccttcctgcgctgggcatctgagccagagcacgaccatcgaaaacgcatggggctcaagatgttgatgatgatggctctgctggtgcccctggtctacaccataaagcggcacaagtggtcagtcctgaagagtcggaagctggcatatcggccgcccaagtgaccctgtccagtgtctgcttgccatcctgccagaacaggccctcaagcccaagagccatcccaggcctgttcaggcctcagctaagcctctcttcatctggaagaagaggcaagggggcaggagaccaggctctagctctgggccctccttcagcccccatcatgggaataaattaattttctcaatgcctcgtcttgagtacgccacccag

SEQ ID NO: 69726 - DNA, 1082 bp, Homo Sapiens
tggggggggaaacaaacatacggctaggtacgaggcctgggtgttgaattcggcacgagggatggcggcagctgcggcttcgcttcgcggggtagtgttgggcccgcggggcgcggggctcccgggcgcgcgtgcccggggtctgctgtgcagcgcgcggcccgggcagctcccgctacggacacctcaggcagtggccttgtcgtcgaagtctggcctttcccgaggccggaaagtgatgctgtcagcgctgggcatgctggcggcagggggtgcggggctggccgtggctctgcattcggctgtgagtgccagtgacctggagctgcacccccccagctatccgtggtctcaccgtggcctcctctcttccttggaccacaccagcatccggaggggtttccaggtatataagcaggtgtgcgcctcctgccacagcatggacttcgtggcctaccgccacctggtgggcgtgtgctacacggaggatgaagctaaggagctggctgcggaggtggaggttcaagacggccccaatgaagatggggagatgttcatgcggccagggaagctgttcgactatttcccaaaaccataccccaacagtgaggctgctcgagctgccaacaacggagcattgccccctgacctcagctacatcgtgcgagctaggcatggtggtgaggactacgtcttctccctgctcacgggctactgcgagccacccaccggggtgtcactgcgggaaggtctctacttcaacccctactttcctggccaggccattgccatggcccctcccatctacacagatgtcttagagtttgacgatggcaccccagctaacatgtccagatagccaggatgtgtggacttccggcgctggaattgagcagagtaggaccatgaaaaggcagggggccaaaagttgacaagaagggccgacgggcccgggttaccaaaaggcggacagggcgcctaaatcgaagggaatagggcaggacgccacggtgtgcactgaaaagccagcaggaccaggtaggccaaccccgaaaagaggggaacaaaggccaccccgaaaa

SEQ ID NO: 69727 - DNA, 1849 bp, Homo Sapiens
gggcctccggcttgccgtcctcgcagccatggcggccgccgcgctcccagcatggctgtctctgcagtcgagggcaaggactctgcgtgcattctccactgccgtctactcggccactccggtcccgacacctagcctgccggaaagaacacccggaaatgaaaggccaccaagaagaaaggcactacctcctaggacagagaaaatggctgttgaccaggactggcctagtgtttacccagttgcagcaccatttaaaccctctgcagtacctcttcctgttcgaatgggttatccagtaaaaaagggcgtgcccatggcaaaggagggaaatctagaacttttaaagattcccaattttctgcatttgactcctgtagcaattaaaaagcactgtgaagcccttaaagatttttgcactgagtggccagccgcactggacagtgacgagaaatgtgagaagcattttccaattgaaattgacagcactgattatgtttcatcaggaccatctgttcggaaccccagagcacgagtagtagtcttaagagtaaagctttccagtttgaatttagatgatcacgcaaagaagaaattaattaaacttgtaggagagcgatactgcaagaccacagatgtgcttaccatcaaaacagataggtgccctttaaggaggcagaattacgattatgcagtgtatctactaacagtgttataccatgagtcttggaatactgaagaatgggaaaaaagtaagactgaagcagacatggaagagtatatatgggaaaatagctcatcagaaagaaatatcctggaaacgcttctccagatgaaagctgctgagaaaaatatggaaataaataaagaagagctccttggtactaaagaaattgaagagtacaaaaagtctgttgttagtcttaaaaatgaggaggaaaatgaaaattccatttctcagtacaaagaatccgtgaagagactattaaatgtgacatgaattatggagtagaaaaatctgcttgatttattaattttatgatatatgtgatcagtatctaatttgatataaaattgaaaatgttaaaaaatcattttttttcctcagagttaaaattatttccctcatactaatgcttaatggcaatgattactccagagttttttaatttttacactggggcaatagactaggaggtctctgatttcttcttggtctaaagtgttttgattttatttctacataatagctttggtattcatgtatatacatgcatttaattgtgattttatcacctttcccatttctttccccacaagctggcatttcagtagttgcttttgaataatggttttggttacctgggaaggcaggcccagaacccatttccttgacttgcagttccgggctgtgttcacatgactgctgtctagctgatgcatttttcacatttgtcaactctggttagaaacaggtcctcaggagtattctctaacctgatattttctaaaaagatatgttgattcaactttgtttagcatcctactttctagattgtggggctcattttgccagggccaagctaccagaaaagtagaagtggagattacctggtatgtatctctctgggtgccccagttagagctgccacagctcaggaaaaagatgaggcataacgaccttgaatgtaattggagtaagtgacaaaataagaactaccctgggaaaccctgcattcaatgtagctgtcaattcagtatttttaagtacacctgtcagctgtttcttaccacttcgatggttgtgattaatttaaaatcaaaataaaggaattactgagtttaaaaa

SEQ ID NO: 69728 - DNA, 599 bp, Homo Sapiens
tccgtcactatagtaattgggagacagtcctcatcctggaagaactcagaggggatgaaggcacgaggagtcagaggcctgaggagtcagagcctctagagaagaaaggaaaatatgagggaccaaaagcaaaacctttaaatacttcatctaaaaaatggggctctttttttattgattcagttttgggactggaaaatacagaagactccttggtttatacatggtcttgtaagagaatcagtacttacagcactattgcaattccaagtattgaagcaatcgcagaattacctctggactacaaatttacaagattctcttcaagcaattcaaaaacagctggctactatccaaatcctccactggtcttatcaagtgatgagacactgatatccaaataagttgtctttactgaaaaatgaagtgaagacccatatatgcagttaaaaaaaagttaattttcaaaaaatactgtaaaagactttaaggaacaagttttattgaccaataagttgatatttgtccataggtctcctttctataaatcatcttgatgtttaacaactcttattatattaaaatctcagtatcctaaa

SEQ ID NO: 69729 - DNA, 688 bp, Homo Sapiens
  misc_feature (183)..(193): n is a, c, g, or t
tccatgcattagctgtttgtaaataatgcatctgcatactgaaaaaggaatgccacctgccacagttgatggtgaggaagctcctttgacgtggtgcaattttgatgagatgtctctggggacacgaggatgccctaatgatgctgacttgtcatggttgcagcatttgaacttttggtgttnnnnnnnnnnncctgtaagtctgtaacctggcaacattttacaaccctgtatttttaaagatggctttctaataaaaaatccagaaccacacagccctatggtcaaacaatcctacgtttgtgcctctgcttttaaaggtgctgtgctggacagttggcatgccagggttcgagaagagtgaatggcttgacgtacttgcagttaactgtgcaaaattggctggctgcctctgttcctactgtactgtaactttgatcatgtctgttcctgttccattctcccaggagcttctctgcagactgacacaccctcccccaccccgggtagtggagatgctggtgtctgggtagtcatggatttctgctggacatttgaatgtgataaacaatccagcattacttaggaaatgctacatgcggaatgtgcacgtttccaggggcgagtattgtcaatcaaaaggtttgcaatgatttccttcctgccaaaaataaacatgtgaaactgc

SEQ ID NO: 69730 - DNA, 480 bp, Homo Sapiens
  misc_feature (314)..(315): n is a, c, g, or t
  misc_feature (437)..(437): n is a, c, g, or t
cggcgcggcggacggacgtgggcaggagggctggaaaaaccggcgctggagcgggaacgggagtagctgcctgggcgccaaaggccgcggcactcccacgcggaccccgaagtccgcaacccggggatgggcccgcggttgcgaggacaaagcaacaataattcagatacctgtgcagaatttcgaataaaatatgttggtgccattgagaaactgaaactctccgagggaaaaggccttgaagggcattagacctgataaattatatagacgttgcccagaacatggaaaagttgccttttgttcctccggannaagaaatttattatgggagtttcaagtatggcataaaagtatcaacatcagatcaatatgatgttttgcacaggcatgctctctacttaataatccggatggtgtgttacgatgacggtctngggggcgggaaaaaagcttactggctctgaagaccacagatgc

SEQ ID NO: 69731 - DNA, 946 bp, Homo Sapiens
ggaccggtccggaattcccgggatatcgtcgacccacgcgtccggtagctgcctggggcgccaaaggccgcggcactcccacgcggaccccgaagtccgcaacccggggatgggcccgcggctgcgaggggatcttctctggatcaagcaatggtggtgaaaaatgtttcgcaagggcaaaaaacgacacagtagtagcagttcccaaagtagcgaaatcagtactaagagcaagtctgtggattctagccttgggggtctttcacgatccagcactgtggccagcctcgacacagattccaccaaaagctcaggacaaagcaacaataattcagatacctgtgcagaatttcgaataaaatatgttggtgccattgagaaactgaaactctccgagggaaaaggccttgaagggccattagacctgataaattatatagacgttgcccagcaagatggaaagttgccttttgttcctccggaggaagaatttattatgggagtttccaagtatggcataaaagtatcaacatcagatcaatatgatgttttgcacaggcatgctctctacttaataatccggatggtgtgttacgatgacggtctgggggcgggaaaaagcttactggctctgaagaccacagatgcaagcaatgaggaatacagcctgtgggtttatcagtgcaacagcctggaacaagcacaagccatttgcaaggttttatccaccgcttttgactctgtattaacatctgagaaaccctgaatcctgcaatcaagtagaagtcaacttcatctgaaagttcagctgttttcaaactgcaatgctgaaatgttatgcaaataatgaagttatcccttgctctagattttctgaagaaaatggattgtgtaaaatgctgatcatttgtttattaaaatgtgtcctattacacagtgaaaaaaa

SEQ ID NO: 69732 - DNA, 469 bp, Homo Sapiens
tcactgggtaataggatacattttaataaacaaatgatcagcattttacacaatccattttcttcagaaaatctagagcaagggataacttcattatttgcataacatttcagcattgcagtttgaaaacagctgaactttcagatgaagttgacttctacttgattgcaggattcagggtttctcagatgttaatacagagtcaaaagcggtggataaaaccttgcaaatggcttgtgcttgttcctacattacatgaaagatagagtaagagcaacattcatctgtctcttcgtgaacttaatttggctagcagaggcacacacctgaccctcttaagacctctcctaagcaagccgaccacacatgcctgcctgggtcaatggaacccatactatgagcttccctgcacgtgggccctttctgccctccttcagaggaaagcaaacagcgactgcagcctgcaaag

SEQ ID NO: 69733 - DNA, 464 bp, Homo Sapiens
cttgcctcttcctctgccccgcttcggccgcctcccgcctctcagggtcggggttgtctgtccccttcgctgtcacatcctccgcacccagcgcttggaaggtgctccatcacggtgacagacaggtgccaagcaggctggcgtctgggaggaacttcggagccggctctccctaggccccgagcttggccgcatccgtccttactctggtgaccctgggcaggtcactgactcttcgggcgctttggcatcctcgtttgaaaggggctgttatcctgcagccttgctggtcggtgagggtgagggtgagagggatctgtgcacctagcaccgtgcatggcacgtggtaggcgtttggtacatgggaatcgctgttggggtgtcacctccccagaaagttctcggcttcagtaagcgcgtcccctgccaggcgccctggcaatgcagaggagtcaccgagctcc

SEQ ID NO: 69734 - DNA, 534 bp, Homo Sapiens
cagtcgacggtaccggtacatatgcccgggaattcggccattacggccggggagcaaaaataaatgaagaaaaacaagcatataaaagagagaaggcacagcaaatgatttaggagtcacaaaagagaccacaactatagatgctgcagagattaaaccagcaaaaacaaatattgtataaactaattataacaaaattggaaaattttgatggaattgatatattccaagaaaacatgtcatcaaaattgaaccaagaaaatactttaaaaatctaagcagtcctttgctcattaaaggataaactcagtagttaacactttttctacaacagaaatggtgtgcctggatggtcgtgtaggtgagttttaccaaggattatggtaacaacatgagtgagacctctatggagaaaatattgaaggacattaaagaagacctcataaatggagagagatatatcattaatggataggaagcctcaatggcataatattcttgttgagaagattcaaggcgatcccgggttggtcc

SEQ ID NO: 69735 - DNA, 558 bp, Homo Sapiens
gggtacctgcgcagttttaaaaatattttccaagatcccttcagtgaacatgggatgcttccataatgaagagagagacacaccgtgatgacctccacataccaaatttgatgacagtcttccttgagccagctgtgatgtaaagaagtttgtgctgcatgagagagatagcacctgaagaaaatgaggccctggaggatgagagactctaaaggaaaagggaagggcctgctgtcttccagccacgccagcccccaactgagaagctggtgcccttggtgtggtggaagcaaggtgccatgtgataagtaagcctccagagaggcctgcatggcaggatccaatgtctttagccaacagcatctgggaacctgagacctgccaacacccttgtgagtgagcctggaagtggacctcctgctcttgaaccttgaggtgactatagtgctggctgacaccttgactgcagtccctgagctggggggcccagctgatctactcccagaatcccccctactaaaacagtgatataataaatgcttattgtttcaagctggt

SEQ ID NO: 69736 - DNA, 1025 bp, Homo Sapiens
  misc_feature (21)..(21): n is a, c, g, or t
  misc_feature (44)..(44): n is a, c, g, or t
  misc_feature (83)..(84): n is a, c, g, or t
  misc_feature (91)..(91): n is a, c, g, or t
  misc_feature (146)..(146): n is a, c, g, or t
  misc_feature (149)..(149): n is a, c, g, or t
  misc_feature (163)..(163): n is a, c, g, or t
  misc_feature (187)..(187): n is a, c, g, or t
  misc_feature (193)..(193): n is a, c, g, or t
  misc_feature (230)..(230): n is a, c, g, or t
  misc_feature (254)..(254): n is a, c, g, or t
  misc_feature (259)..(259): n is a, c, g, or t
  misc_feature (275)..(275): n is a, c, g, or t
  misc_feature (292)..(292): n is a, c, g, or t
  misc_feature (339)..(339): n is a, c, g, or t
  misc_feature (507)..(544): n is a, c, g, or t
agactctaatgaactagtgantaaatgatcccaaatatctgtcntgccaaaagtattgtggagcgccagcatcattagaggtnntagaaantatgtaaaatgatgcatttatatactatggatcttgtacatattctaagtatcantantaattggtacttcntaaacccataacctgctgcccttntagtgntaaaaaaaatacaacattgtatatagagattcttctntatgaaggaagagctgacgtaatntatangcagtgatctgagaangacattaaataagttcntgagagtgatacattttcaaacatgaagagtgacaaccaccaaatanagaaaaggaaacaactcagacttggaattttatacgaatttcatttctatatgtgcctggtattgcctctggcataacttagaggaaattgttctacctatatgtcctcagtttcttcatctacaagttgggaaaaacattttcctcttaaaattgtgaagaggattnnnnnnnnnnnnnnnnnnnnnnnnnnnnnnnnnnnnnntaaattgcttagagtttctagcacatagcaaataataaatattagttattagtataaacataaggcttaaagtcttggatttgatgcatatgacttaatttgtatttgtgctagtagctgtaatgtcagtgacaggataacaagcaaatgattagaaatctaatagtaatgcttgttcctttgctatctatgctaacaagtacatagatagcctaagataaattatacttaggatgaagctaaaatgcataactgagacaccttaaaattgtactaccttgtgctgttcactgccatcagggaggtagcataaaatgaaagataaagtctgaagactggatccaggcaaattcatgttctttctttgtaactcactttcttcgtcaacatttctgtgactcaatggatagcatatttccatcaagtagcacgtataacgtgatgctttcatgtttctgccttaaataaaataaccctcaaa

SEQ ID NO: 69737 - DNA, 992 bp, Homo Sapiens
  misc_feature (105)..(105): n is a, c, g, or t
  misc_feature (188)..(188): n is a, c, g, or t
  misc_feature (277)..(277): n is a, c, g, or t
  misc_feature (296)..(296): n is a, c, g, or t
  misc_feature (308)..(308): n is a, c, g, or t
  misc_feature (313)..(313): n is a, c, g, or t
  misc_feature (331)..(332): n is a, c, g, or t
  misc_feature (433)..(554): n is a, c, g, or t
  misc_feature (587)..(642): n is a, c, g, or t
  misc_feature (673)..(691): n is a, c, g, or t
ggtctggggaggagcccatccacctttccgggtgcgatatatcatgcagcagtccgatgagcgcgtggccaccatattgatgtcatctagcacccagttacattntctccgtctatgttgtgattgagcgatacattcaccaggaacactagacagatacgattatacgatcacttaggaattgcctncgagccagaaatcgcacgaggaaacccctcacagagaactgtattcttgataccttctgttgccaggcacttcaccaggcatttacaangtaaggaaattggcttcangagaaaataatngcagnaggttactcaactacaannaggggtgaagccaggaatgttaactaggtctgttgagctacaaaaacttttatgtctctcagactatacagcctctatacaaaattgagatgggggttggnnnnnnnnnnnnnnnnnnnnnnnnnnnnnnnnnnnnnnnnnnnnnnnnnnnnnnnnnnnnnnnnnnnnnnnnnnnnnnnnnnnnnnnnnnnnnnnnnnnnnnnnnnnnnnnnnnnnnnnnnntaagaattagctgggtgtggcatagcacacacnnnnnnnnnnnnnnnnnnnnnnnnnnnnnnnnnnnnnnnnnnnnnnnnnnnnnnnnagccttggtgacagaacaagaccctctctcnnnnnnnnnnnnnnnnnnnggtgggtcatccattctcctttaccaaacaggctttgaaatgacacattccattcatttgcatctttttaaaaaacttctgattccttactgagtgtccagcagcctcaaagtttttaatggtagctgatgcagacataaacagtgctcaatttggcccttaaactataaaatcaagaaagagtatttcaatcccatccacctgcctgcaagatttcttaatgttcactagttataaccattgtttaaacagtgctttttgtgtaatttaaaaataaactttaatgctttttaaaacaaaa

SEQ ID NO: 69738 - DNA, 1246 bp, Homo Sapiens
  misc_feature (42)..(76): n is a, c, g, or t
  misc_feature (668)..(676): n is a, c, g, or t
aaacgacgagcgccgcgaagtttgtgagcgaggaagcggcgnnnnnnnnnnnnnnnnnnnnnnnnnnnnnnnnnnncagtcgacggtaccggacatatgcccgggaattcggccattacggccgggatgtgatcttattgcatgtttccatggggtgtacctatactttaagccaatcctgctgcattcactgctaagttaaataaaaagccaagaagattttgcactgtgcagatcctttgctatctgacttgcatctcttcccccacctgtcagctagccacctgcttgtttgtgttgggatattttttagcacctgaagcaccatctgaaaggggcaccattttcttcttccctttgatctcacatatgctccctaaaaatccttaagttgtcaatctgatccccagtgtgaggttaatgagcaaaattggtctttggggccctttttgtccaagccccactgaaaggcctcttcagaaaactattatctttaaagccctactttaactccttaattccagcatacagctaaaactggatgtatattctggcaagtaaaggctgaggactcctctttaatcctcagatctagataactcatgacattttatttgaccaacatagcacatgatgagatatcaaggtaattaaaatagcatgcttgnnnnnnnnntacgtaatctgtttcacctgtaactgtttaagccaataaacttttcaaaatttatgtaatgtggggcttttatgtagcactttacgttttcatgctgcttattgttttattctactgaaaaaaatgaatttcaagattctcaacttttttaatttcaaaaattgtttattgttttgactataggaatacaaaatttcctattttgggagaataagaactctttttgtcatttttggctatgaataaactttctggtcttttgagaccacccatttttatagatcagaatcagaaaacaggtaaacctcactcacacatttggactcatttgaacaaaaatctaggccaaaatactgaaaagcctatgtgtttttttaattggaagtatatgtaaggttaatacattttagtgaacgtgactaacaaagactaatgtgcacattaacagatgtactttttaagggtttatgggaagctgttgcattgctcaaaagctgttgggaacgccttctgaacagttgccttcagaactagtttgagctgctcaataaaaccagtgactttactctt

SEQ ID NO: 69739 - DNA, 929 bp, Homo Sapiens
  misc_feature (79)..(79): n is a, c, g, or t
  misc_feature (97)..(97): n is a, c, g, or t
atgtttcttacctagaaaaaatagtctcttcccctacttcttttcctgacttcttactttttcctaagattcagtgtanagcatcatgctccacagnaaaccttcctaggccctattctgggcttgccttccctctcaaaacctacataatagattgtatttacctctcctgtcaaccacattgttttgaaaatatatttctatttgtgtctcctctactgcagtataatgtctccatgggcaagaactgtgtattcatcattgcattcctaaacccaaaccaaggccaggaatggagatatcattgataaatagttgttgaattgaggccaagcccttttgataacagaagcctcaaggggtacccagatagtccttgttttaatgatgggttctctcaccactgtcttgatgctctgagcaagttacctcttccctctgaccctcagtttccatatttgtaaaatgagaataaacataccaacttaataaagatattgtgaggattaatgggtacagagtgactagaatgatatttgatagaaattaaatggtagcagtataactattctgatcactgacattaatattcctattgttattattctttactcacgagggtatacaactcttgttttgctgttgggctgccctctttatgtaggtttactgttaatgctgaggatatactcggactcaaatgtctcagcagaaggctgagagacaccaaatgaagtggtcatctagctgaatgtaggaaaaatgaaatgtagtagcaaatcagtatattctaaggaaattttcaaggaatattaatcttcacccaaattttgaatttttatgtaaaaaattataatttaagggtaaacatagatgacacagctttcgagtgatttcattgaataaaattctactgacttctatgaaaa

SEQ ID NO: 69740 - DNA, 685 bp, Homo Sapiens
acagcacagccacccatctcccattcacatggcccacctcctgcttcccagaggactggccctacgtgctctctctcgtcctacctatcaatgcccagcatggcagaacctgcagcccttggccactgcagatggaaacctctcagtgtcttgacatcaccctacccaggcggtgggtttccaccacagccactttgagtctgtggtccctggagggtggcttctcctgactggcaggatgaccttagccaagatattcctctgttccctctgctgagataaagaattcccttaacatgatataatccacccatgcaaatagctactggcccagctaccatttaccatttgcctacagaatttcattcagtttacactttggcattctctctggcgatggagtgtggctgggctgaccgcaaaaggtgccttacacactgcccccaccctcagccgttgccccatcagaggctgcctcctccttctgattaccccccatgttgcatatcagggtgctcaaggattggagaggagacaaaaccaggagcagcacagtggggacatctcccgtctcaacagccccaggcctatgggggctctggaaggatgggccagcttgcaggggttggggagggagacatccagcttgggctttcccctttggaataaaccattggtctgtcaa

SEQ ID NO: 69741 - DNA, 1143 bp, Homo Sapiens
cagtcgacggtaccggacatatgcccgggaattcggccattacggccgggtactggcttcctcttcacctccttggctttcatgctggtggaggggaactttgtcttgttttgcacctacacctttgggcttccgcaatgaattccagaatctactcctggccatcatgctctcggccactttaaccattcccatctggcagtggttcttgacccggtttggcaagaagacagctgtatatgttgggatctcatcagcagtgccatttctcatcttggtggccctcatggagagtaacctcatcattacatatgcggtagctgtggcagctggcatcagtgtggcagctgccttcttactaccctggtccatgctgcctgatgtcattgacgacttccatctgaagcagccccacttccatggaaccgagcccatcttcttctccttctatgtcttcttcaccaagtttgcctctggagtgtcactgggcatttctaccctcagtctggactttgcagggtaccagacccgtggctgctcgcagccggaacgtgtcaagtttacactgaacatgctcgtgaccatggctcccatagttctcatcctgctgggcctgctgctcttcaaaatgtaccccattgatgaggagaggcggcggcagaataagaaggccctgcaggcactgagggacgaggccagcagctctggctgctcagaaacagactccacagagctggctagcatcctctagggcccgccacgttgcccgaagccaccatgcagaaggccacagaagggatcaggacctgtctgccggcttgctgagcagctggactgcaggtgctaggaagggaactgaagactcaaggaggtggcccaggacacttgctgtgctcactgtggggccggctgctctgtggcctcctgcctcccctctgcctgcctgtggggccaagccctggggctgccactgtgaatatgccaaggactgatcgggcctagcccggaacactaatgtagaaaccttttttttacagagcctaattaataacttaatgactgtgtacatagcaatgtgtgtgtatgtatatgtctgtgagctattaatgttattaattttcataaaagctggaaagcagcaaa

SEQ ID NO: 69742 - DNA, 1923 bp, Homo Sapiens
  misc_feature (1767)..(1776): n is a, c, g, or t
tttttttacacaagacgtggttaagaactgtttgtgaactgaagttcctcatagtgtcatttgtatgagagaggatcatggacaatgaataaatgcacacttctgactataattttgagcagtgaaggaaggatgactgcctgttacacagaaacaggaataccatgttaagatagaggaaaaaaattttgtttatttgggggaacactgtaaataacgtttataatacttaaatacatttggttgttactagagagttctaatatgaagggtagtttttcattatttaaaaacacatggaaaaatatgagacatatttctaacatacgaactatagtgcctggatacattcttcagcatttggcagttaatctgctgaaaccaaagtaagaactgaatgacagtgacagttgtgttttatagtaatagaatgtgagagttagaatctttggacaaagttaggctttgtcatttgcctattcagacttttaccaagttgtacctcgagatcacatgtccgttttctttcactggttatattaaagggagagctattatttctaaatactttacacctttgacaaaatgagctgcttgtgttgaaatcagttgaattcactaaattataatattgccagtgttttcaacacgttagaattgataacaggtatttttcttttgttaccaggccttgttcatcaaaacaggtgacagtgagtaaccaaatgcagaccagttctatgcaggataatgataaattcccttctagctctattgtaaattgttgtacagatgtcatatttcaattactaagtttcagcagcttattcttgtacaaatgtttaaaatatggcttttctaattggatattgtattttttttaagtcttcttgaaggcactctaattgctgctaaatgatgttgcttctttgctaaaaaattaaatgacctagaaggtgcaagttgactgtacatcatagatattaaaaagcagacagtcattaacaatcaagatgtaaaagtgatccatgttggacataattgagtttttaaatcagtttattgggttctagggctgtagaacacatagatactagatttttaatttgttcatggttattctacatttctagaaagttcttatcagcaagatggtcccataagcaaatttcttgtggtttgtacagatttgttaaaatgtgaacgttttctaactgcctcgtagggtagaaaccaatatttttcaggatgctgtatttcactcctgtaaggactttttctttattgtcacattcataatgctgatacttacatgtaagttgttcatgttgcagaaaaaggttatacgtaccacggattctctttaatattgtacagttaaactgtatttctgatgttgcaagccattttgttttttcattgtacatagacacattgtctctttaaaatgctgctgaaattgtagagagtatagccaaaacagtaataaacaatgacagttaaaatgtaaagactatgaaaattacattggaagggagctttcaagatggtaggatattgactaactgagctccttcacttaaaaatcagctgaataaattccttaagtatacttcaagacaagtgtaaattgtttcaagctgttaaagttaaacctaataaccattatcaaggcaactcctgggtaagtaacacttagaaccatcaagagtggtttaaggggctggctatacccattcctctgtagagcacagagaaatcctattnnnnnnnnnntactacatggtaatgaaatcttagcattgattgagtgctttacgtgctgcctgcaagttttcagttttgttgttagagttttcgtctttatgaatgataaagtcctatgttcataaagtaacatttaaattcctgaactaaaaggat

SEQ ID NO: 69743 - DNA, 1158 bp, Homo Sapiens
  misc_feature (71)..(109): n is a, c, g, or t
aggtacacatatagggcgctaccggcgctgtcgaacgacgagcgcagcgaagtcagtgagcgaggaagcgnnnnnnnnnnnnnnnnnnnnnnnnnnnnnnnnnnnnnnncagtcgacggtaccggacatatgcccgggaattcggccattacggccggggtttgctggctaaccataagggctgtgacggtgatggtggcatggatgcctcagggacgcagagtgatcttccagaaggttaaagagtggtctctcatgatcatgaagactttgatagttgcggtgctgttggctggagttgtccctctccttctggggctcctgtttgagctggtcattgtggctcccctgagggttcccttggatcagactcctcttttttatccatggcaggactgggcacttggagtcctgcatgccaaaatcattgcagctataacattgatgggtcctcagtggtggttgaaaactgtaattgaacaggtttacgcaaatggcatccggaacattgaccttcactatattgttcgtaaactggcagctcccgtgatctctgtgctgttgctttccctgtgtgtaccttatgtcatagcttctggtgttgttcctttactaggtgttactgcggaaatgcaaaacttagtccatcggcggatttatccatttttactgatggtcgtggtattgatggcaattttgtccttccaagtccgccagtttaagcgcctttatgaacatattaaaaatgacaagtaccttgtgggtcaacgactcgtgaactacgaacggaaatctggcaaacaaggctcatctccaccacctccacagtcatcccaagaataaagtagttgtctcaacaacttgaccttcccctttacatgtccttttttgtggacttctctctttggagatttttcccagtgatctctcagcgttgtttttaagttaaatgtatttgacttgtgttctcagcattcagagagcagcggtgtaagattctgctgttctccctggatcttctgacattactgctgtctgagatttgtatatgtgtaaatacaagttccttgataccctaaaaccttggattaaacagaatgtgcattgtacatctttaaacaaaatgtatattaatttattaaatctagttgtcacttt

SEQ ID NO: 69744 - DNA, 492 bp, Homo Sapiens
ttgtaaatatttgtgtttataaatgtacagcagagtaagagtgttttttagattatttaattcccatatttctaaactatttactacacagtaatccatgcctgttagtttggaggacttgactgtctcattttttaattcattgtcagtcatgcttggaacagcatttccactagagaatccagcgttctggcagtagcaagagtacacatctggagcatgagggactctagcatgactcgtcagatgcacaccccaagagacaagaatgtgtagtttaatgaccggcgtggaccatacgaaattgagattctaactttcctgcaggagtgctcatgagcccagaatgtgattgggataaggccatttgcccacaaatttagctttcatgtaactcctagtgtgttatatcataatgtattttgttcttcctttttaatgtaagttttgctttgggtcaatttgaattaaaaaaatcaaatctgatttaaa

SEQ ID NO: 69745 - DNA, 614 bp, Homo Sapiens
cttttttaatttaaaaaagttttacttaattgcttaaataaaaaataacattaaaataatttctacatatagttacaaagcatggtagagcttgaaaaagcctcttgtaattttgaacagatgaacatgatgtctccatgatgttctaacaatatggaaaagttaaaaccaaaagacttctaacccttggtaagaccagagggattaaaagaccccactatggacatattcactttagtcaaccacttttatggaatgaacacttgtgagagactgggtgtgagctgatctggttccaagtgatctggaagctgaggtactactttcaggatgaatggtccggggatattttgctgcagttgcttgaggaatggtttgcactgtgactggatgatgtttttccacaacaactgagctcatgggaggagaaactcccattatagctaaactgctgctaattctattttttgaagcaaaatcacatcttcctgtgatccgggctgtaatagttcttcctgctttctgttgtgcagaggttacaactcttggcacatacatttcttctgatgcagcagtagctgcagatcctgcaccaagagcagaaacaggaaccc

SEQ ID NO: 69746 - DNA, 728 bp, Homo Sapiens
gagaagtgtacctctgtaaatccctggtcccatttagagagtatcagtgtcatgtggactcctgtctccagcttgcaaaggctgaccaaggagatggacctgaagggagtggaagagcatgttcaactgtggaggggaagtggcagcagaggctgaagaacccaaaggaaaaaggccacagtgaaggccgactccttagtttcttggaacagtctgagcacaagacttcagatgcagacatcaagtcttcagaaacaggagccttcagggtgccttcaccagggatggaagaggcaggctgcagcagagagatgcagagttctttcacacgtcgtgacttaaatgaatctcccgtcaagtcttttgtttccatttcagaagccacagattgcttagtggactttaaaaagcaagttactgtccagccaggtagtcggacacggaccaaagctggcagaggaagaaggagaaaattctgaatttctagggtccaaaagttgacaaaaccattagtaggaggggtgggccatgttcattaagccatagtggtccctagttcattgttgagcaagttttagccctgcagttttcaccaccagcacctacccagcattctggtttttatgttttttatgatctatgcagacaactgtgtattctgttttataacagtttgtttgaatttacttacagttaaaaaatttaaatatatttatgtttgtacgaaa

SEQ ID NO: 69747 - DNA, 694 bp, Homo Sapiens
gacatgagtagtgtggtggggagggcccgctggcctgcctgggtgggggctgaggagcagaggccggatgctgaggaggggcaggagccacattcgaggcctcctgccggctgaggggctgggtgggttccacctgaggaggcgccacgactctgcccaccccggctcccatctcttccaggctcctctggacccttcccgctgcccagcgctggggacgccttcctcaccctgcggactctggcctctctccagcctcctcctgggggaggctgcctgcagtcccaggcccagggtagctggcagggggccaccccccaacctgcaactgcctcacctgctggagaccctggcagcatcaactccagtacatctaattaagtttgggggataagcaggaaagagcgctgcgtgagctgccatgtatcgccagccgttgctttgttactgaacgtgccgccgacgacctcagaaaacccagatgggtggtggtgcccatgagcccctgctcctcagccaggcccgtggcgccggctcatgtgtctgctgcgactcgagatggcctgaaacgccactcattctcccacttcagttcgtttttttgacagtaattttatggtaacgctatgaattgaattgtctgttctaggactgggcacagattttcccattaaaatttttgacttattttaaa

SEQ ID NO: 69748 - DNA, 560 bp, Homo Sapiens
gggactcagaagcttggaccgcatcctagccgccgactcacacaaggcagagttgccatggagaaaattccagtgtcagcattcttgctccttgtggccctctcctacactctggccagagataccacagtcaaacctggagccaaaaaggacacaaaggactctcgacccaaactgccccagaccctctccagaggttggggtgaccaactcatctggactcagacatatgaagaagctctatataaatccaagacaagcaacaaacccttgatgattattcatcacttggatgagtgcccacacagtcaagctttaaagaaagtgtttgctgaaaataaagaaatccagaaattggcagagcagtttgtcctcctcaatctggtttatgaaacaactgacaaacacctttctcctgatggccagtatgtccccaggattatgtttgttgacccatctctgacagttagagccgatatcactggaagatattcaaaccgtctctatgcttacgaacctgcagatacagctctgttgcttgacaacatgaagaaagctct

SEQ ID NO: 69749 - DNA, 1884 bp, Homo Sapiens
  misc_feature (199)..(199): n is a, c, g, or t
  misc_feature (274)..(284): n is a, c, g, or t
  misc_feature (316)..(316): n is a, c, g, or t
  misc_feature (322)..(322): n is a, c, g, or t
  misc_feature (715)..(725): n is a, c, g, or t
  misc_feature (800)..(814): n is a, c, g, or t
  misc_feature (889)..(890): n is a, c, g, or t
  misc_feature (960)..(1026): n is a, c, g, or t
  misc_feature (1028)..(1029): n is a, c, g, or t
  misc_feature (1063)..(1073): n is a, c, g, or t
ggaggggggaggcgagaggggtacgaggggcgccccccgtcggtgcccccaccagtgcggggcagactcatttacctcaacacacagcaccatggcgggcgcccagcagtgacaaattcggcgagggacccaagtatgatgtgaagggcacatcttgtatgtgttttgataagacgtggagacttattttttgttcacnttggtgtgccgccggggggataaataatgtgtttatttttcccccgcacgacacggaggggacgggaaacaaaannnnnnnnnnnaaaggaaaaaacccagcccaaatggtgcgagnggattntgcgatcgcgatctctttctaactctgcgtacggcgcctgcatgtggtcggggtgcaggagcatttcgcattccgggaatagcgccaagcggcgcgcgaatacggtgctcgtggataggcgggtggtgtctattctggcccccggctctcacggggcgttcgcgggggtataatggggataaggctccccggcgggcgcagaacggcggcacctaaaatagccggggtgtgtgatgaagggcagcctactcggatgcgggataccacccgcgttgttcgggttggtagacgcccaaggggggaggagcggcccggcaaaggagcacgtcacttggggggaggttttttgttacgagagccgcttaggggtagcagcgccccccgggcggtggnnnnnnnnnnngtggggaagagccgccggccccgtttcttttctgccgccgagtttcccttttgggaaaggccaggatccgcgtgnnnnnnnnnnnnnnnggggcccgggcggcccccaggggaggtttgggaaaatttttttgggggcggggaggggccgccccaagaaccccnntcgatgtatggtgggcgggttatgggtttctggggttttgtctcctgtgtgttccgggtagtttttttgnnnnnnnnnnnnnnnnnnnnnnnnnnnnnnnnnnnnnnnnnnnnnnnnnnnnnnnnnnnnnnnnnnngnnggtggagaaaacagaacacccccaaaacatttannnnnnnnnnnagaaaatcatggctcactatggtagtatacaatattgttttcacacatgtacacttgaaaccaaatttctaaaacttgtttttcttaaaaaatagttgttgtaacattaaaccataacctaatcagtgtgttcactatgcttccacactagccagtcttctcacacttcttctggtttcaagtctcaaggcctgacagacagaagggcttggagattttttttctttacaattcagtcttcagcaacttgagagctttcttcatgttgtcaagcaacagagctgtatctgcaggttcgtaagcatagagacgatttgaatatcttccagtgatatcggctctaactgtcagagatgggtcaacaaacataatcctggggacatactggccatcaggagaaaggtgtttgtcagttgtttcataaaccagattgaggaggacaaactgctctgccaatttctggatttctttattttcagcaaacactttctttaaagcttgactgtgtgggcactcatccaagtgatgaataatcatcaagggtttgttgcttgtcttggatttatatagagcttcttcatatgtctgagtccagatgagttggtcaccccaacctctggagagggtctggggcagtttgggtcgagagtcctttgtgtcctttttggctccaggtttgactgtggtatctctggccagagtgtaggagagggccacaaggagcaagaatgctgacactggaattttctccatggcaactctggatttcctcacccacctgccttgtgtgagtcggcggctaggatgcggt

SEQ ID NO: 69750 - DNA, 366 bp, Homo Sapiens
  misc_feature (343)..(343): n is a, c, g, or t
acttgagctgtggtcacagctgccaggtacctaagcaagtcagttgggtacagcaggacacgccaccattccagggtagctggtaccgccagaaacaggagtgggtcttgtcctgttgcaggcacactgcaggggttttcctgcagctctccaacaaacgcctgagtcacaggccaaagctgccttggtatgttgttaagtccaaaacttcttctctgggctacctatcttccttcatgaagcaggtgctcaggacccggaagaatcatctacctcccagctttgtgagacagaaccaagtaaaaggaaacatgctaggaaacgtgcctagagaagacacttnaacctttgccttatccaacccct

SEQ ID NO: 69751 - DNA, 507 bp, Homo Sapiens
cagtgataaaaatgtcctaaaattgactgtagcgatggtcacacaactctgaatatgcttaagaccattgaattacacactttacgttggtgaattgtatggtatgtaaattatagttcaataacatagttacaaaagataatcaaaagcatgaaagcactattgatgtggtttggatctgtgtcctcaccgagtctcatgttgaaatgtaagccccctggtgggaggcgatgggattatggggcagagtcctcacaaacggtttagcaccacccgctcagtgctgttctcctgatattgagtcctcatcacatctggttgcttcaaagtgtgtggtgcctcccctctgtctccctcctgctctggccatataagatgtgcctgcttctccttcgccttctaacatgattgtaagtttcctgaggcctccctagaagcaaaagctgctgtgcttcctgtaccatctacaggaccgtgagccaattaaacctcttttctttataaaaa

SEQ ID NO: 69752 - DNA, 304 bp, Homo Sapiens
aaagagcaaaacgccatctcaaaaaatatacatatataaggagataaagtttcccattttccaatacagtttcacatttgaacagccctaattgatacaactttatggcagggttttagtgtgtgagtgggatccaaaacactcaatcctgtaaaagggtacagtcctattgtatgttaacacactgatgatgtgagcctgtgagatgagccaatcaccagttgttatgttcgaatctgctttgtgttgggacgctttaatgtcagggtttcactaaataaatgaattttcatatactgaactg

SEQ ID NO: 69753 - DNA, 472 bp, Homo Sapiens
ccacactctttgagagttacaagtgtagtatggaacaaggtctgtaccccacttttcctcctgtgagcagtctggacttctcactgctacatgatgagtatcctcccctttccggatctgctgagccggacagcagtgctggactgcacagccccggggctccacattgctgtacgcacagagatgatatgcaagttcctggtacagctcagcatggatttcagctcctactacaaccgggtacacatcctgggggagcctcgaccacacctctttggtcagatgttcgtccgcctgcagcttctgagagctgtgcgtgaggtgctccatactggcctggctatgctgggtctccctccactgagccacatttaaggccacagaggctccaatacctgggaatgttcacaaagtcatcaactggaaaaaaagcaaaaacccacggccaaaataaattggtactgtttgttac

SEQ ID NO: 69754 - DNA, 808 bp, Homo Sapiens
gaacccacattcatgaatagcactgtgttccatgtgcctgatgtggctgacatggactgctggcctgtgagccatgagtttggccaccgttgtgcccttgggggtcaggggcttgaggtttacaactggtatgactgaggtatcctgcggtggctggcgtgctgggcatggggcctgctcacagacagcatggagcagggaagggctgtctgtgcccatgctcagcatgccttgaggggaggaggtggtggccgtgggttcctgatgtcggtgcaggagctgaaggtgagtggagtgctgccaagaatatgcccgactccccatgacaagacagaactttgtaacaaacagtaccaatttattttggccgtgggtttttgctttttttccagttgatgactttgtgaacattcccaggtattggagcctctgtggccttaaatgtggctcagtggagggagacccagcatagccaggccagtatggagcacctcacgcacagctctcagaagctgcaggcggacgaacatctgaccaaagaggtgtggtcgaggctcctgaaagagaaagggcctgctggtctcatcctctgcttcctttgcctttaccctatacctctctgcacgtcccaccccgttttgctgtgtgctcacccccaggatgtgtacccggttgtagtaggagctgaaatccatgctgagctgtaccaggaacttgcatatctagagacagagactgagtcactggcccatctctttgctcttgtgccccaggccagaataaagaatagagtgtagagtgaaaaaaa

SEQ ID NO: 69755 - DNA, 532 bp, Homo Sapiens
gcacagctggctatgaccccaacctggacaactgtctggtgactgaggatctcctctctgtgctggctgagctgcaagaggctctatggcattggcccgaggacagccacccaggcctggctggggcctcagatactggtacaggcggctgcctggttgtacatgttgttagctgtgaggaggagttccagcaacagaagttggacctgctttggcggaagttggttgacaaggctccactcagacagaagcacagagatgatatgcaagttcctggtacagctcagcatggatttcagctcctactacaaccgggagcctcgaccacacctctttggtcagatgttcgtccgcctgcagcttctgagagctgtgcgtgaggtgctccatactggcctggctatgctgggtctccctccactgagccacatttaaggccacagaggctccaatacctgggaatgttcacaaagtcatcaactggaaaaaaagcaaaaacccacggccaaaataaattggtactgtaagttac

SEQ ID NO: 69756 - DNA, 1535 bp, Homo Sapiens
  misc_feature (1448)..(1448): n is a, c, g, or t
ggtaccggtccggaattcccgggatatcgtcgacccacgcgtccgcccacgcgtccgaccatggcgaccaggcgccttggggtcggggagacgctgggggccctcaacgcggccctggggccaggcggtccggtgtggatcaaggagacgcgcacccgccacctgcgttcccgagactttctggcaccgcaccgcgcgctgcaggcgcgcttcgatgacggccaggttccggagcatttgctccatgccctcgcctgcctgcagggccccggtgtggccccggtgctgcgctgcgcgccgacccccgcgggtctgtctctccaactgcagcggtccgccgtcttcgagcgcgtcctcagcgccgtggccgcctatgccacgcccgcctcgcctgcctcgctgggccagcgcgtcttactacactgcccagcactgcgcagctccccctgcgcactccgcttgagccagctgcgtacggtgctcgtggccgatcacctggcgcgagccctgcgcgctcacggggtgtgcgtgcgcctagtgccagctgtgcgggatccgcacatgctgaccttcctgcagcaactgcgggtggactggcccgctgcctcggagagagcttcctcccacaccctgaggagccacgcccttgaagaacttacctctgctaatgacgggaggacactgtcccctggcatcctaggcagactgtgtctgaaggagctggtggaagaacagggccgcacagctggctatgaccccaacctggacaactgtctggtgactgaggatctcctctctgtgctggctgagctgcaagaggctctatggcattggcccgaggacagccacccaggcctggctggggcctcagatactggtacaggcggctgcctggttgtacatgttgttagctgtgaggaggagttccagcaacagaagttggacctgctttggcggaagttggttgacaaggctccactcagacagaagcacctcatctgtggccctgtgaaagtagctggtgcacctggcactctgatgactgcccctgagtactacgagttccggcatacccaggtgtgcaaggcctcagcactgaagcatggtggggatctggcacaagacccagcctggacagagatctttggtgttctctctgtggccaccatcaagtttgagatgctgagcacagccccacagagtcagctcttcctggctctggctgacagcaatatctccacgaagggcacaaagaatggcacctttggccattgataaattgggcccggcttgccacatttttttgaacagttacaaggtgtaaatatggaacaaagggtctaatacccccctttttcccctcccagagaacacaagcctcgaacttccccccctgcctacaaaggatagggggtggcaggggagactgggcaagtccgcaaacacanccatcctcaccccgcctatcgtgtgatcattgctgtgtgcccattaatacagtactgtttcttgtaactgttgcgacataaccaccc

SEQ ID NO: 69757 - DNA, 841 bp, Homo Sapiens
ttgggtcataagccagctgtcggccctgtttttccaccagctccctccaagacacaggtctgcctagtatgccagggtaacagtgtcctcccggtcattagcagaggtaagttcttcaagggcgtggcttcctcaggctgttgggaggaagctctctccgaggcaccgggccagtccaacccgcagttgcctgcaggaaggtcagcaatgtgccggatcccggcacagctggccaactaaggcgcaccgccaacacccccggtgagcgccgcagggctcgcgccaggtgatcggccacgagcaccgtacgcaagctggctcaagcggagtgcagcagggggagctgcgcagtgctgggcagtgtagtaagacgcgctggcccagcgaggcaggcgaggcgggcgtggcataggcggccacgggcgctgaggacgcgctcgaagacggcaggaccgctgcagttggagagacagacccgcgggggtcaggcgcagcagcgcagcaccggggccacaccggggccctgcaggcaggcgagggcatggagcaaatgctccggaacctgcagggagaacgggcgtgtaaaagagccacaggcacaggggcccatctcccggccgcacaggccccgcccggctcacgcccacctggccgtcatcgaagcgcgcctgcagcgcgcggtgcggtgccagaaagtctcgggaacgcaggtggcgggtgcgcgtctccttgatccacaccggaccgcctggccccagggccgcgttgagggcccccagcgtctccccgaccccaaggcgcctggtcgccatgatcccaaaattccgggccagtacagccg

SEQ ID NO: 69758 - DNA, 774 bp, Homo Sapiens
  misc_feature (514)..(529): n is a, c, g, or t
  misc_feature (531)..(622): n is a, c, g, or t
  misc_feature (626)..(637): n is a, c, g, or t
  misc_feature (683)..(691): n is a, c, g, or t
tggaccggtccggaattcccgggatgtgagtggttgttgctcttcaacagtatcctcccctttccggatctgctgagccggacagcagtgctggactgcacagccccggggctccacattgctgtacgcacagagatggtgaggcatagacaaccaggacactctacactctattctttattctggcctggggcacaagagcaaagagatgggccagtgactcagtctctgtctctagatatgcaagttcctggtacagctcagcatggatttcagctcctactacaaccgggagcctcgaccacacctctttggtcagatgttcgtccgcctgcagcttctgagagctgtgcgtgaggtgctccatactggcctggctatgctgggtctccctccactgagccacatttaaggccacagaggctccaatacctgggaatgttcacaaagtcatcaactggaaaaaaagcaaaaacccacggccaaaataaattggtactgtttgttacaaaannnnnnnnnnnnnnnnannnnnnnnnnnnnnnnnnnnnnnnnnnnnnnnnnnnnnnnnnnnnnnnnnnnnnnnnnnnnnnnnnnnnnnnnnnnnnnnnnnnnnnnnnnnaaannnnnnnnnnnncccctttaaaatttccccgggggggccccatttttcgcgccccccnnnnnnnnngtaaaagagggccccctaagggggggccttttataaaaaaggggcggggggcggcgtttttttcaacacccccgggtcggggg

SEQ ID NO: 69759 - DNA, 1452 bp, Homo Sapiens
  misc_feature (83)..(117): n is a, c, g, or t
  misc_feature (1317)..(1345): n is a, c, g, or t
aatctatacgatcactatagggcgctagctcgtctgagccgaacgaccgagcgcagcgaagtagtgagcgaggaagcggccgnnnnnnnnnnnnnnnnnnnnnnnnnnnnnnnnnnncagtcgacggtaccggacatatgcccgggaattcggccattacggccggggagaaaacgcaggcaaacctgaggtcctcagaatggcgggcacaggtttggtggctggagaggttgtggtggatgcgctgccgtattttgatcaaggttatgaagcccctggtgtgcgggaagcggctgcagcgctggtggaggaggaaactcgcagataccgacctactaagaactacctgagctacctgacagccccggattattctgcctttgaaactgacataatgagaaatgaatttgaaagactggctgctcgacaaccaattgaattgctcagtatgaaacgatatgagcttccagccccctcctctggtcaaaaaaatgacattactgcatggcaagaatgtgtaaacaattctatggcccagttagagcatcaagcagttagaattgagaatctggaactaatgtcacagcatggatgtaatgcctggaaagtatacaatgaaaatctagttcatatgattgaacacgcacagaaggaacttcagaagttaagaaaacatattcaagatttaaactggcagagaaagaacatgcaactcacagctggatctaaattgagagaaatggagtcaaattgggtatccctggtcagtaagaattatgagattgaacggactattgttcagctagaaaatgaaatctatcaaattaagcagcaacatggagaggcaaacaaagaaaacatccggcaagacttctgaaaagacaatttagcaggtagaagaaaagttgggctttcacaaaaggcatctgaacttttaatgaactgtgaaggacaacagcatcttcccaaaaccattgatgtttaagtgtttagaaatcatagaaggtgtaggctgctgtggtaattctatttgtatatctcaacagaattaaaatgtctagcttggtggtatttttatagccataaaagaaaatctttaggctttcaaaataaggatgactttagaataatattgtgtcatagaattaattttcagccatgtggaccatattttgtatccaaggatccttatttaaagctttcaacatgtacaggaagttggaaatttttggtttatgactttgtctaataaagagatagttctaaacacattcttgatcaccaaacaacttcagaaagacagtgactgtacagttnnnnnnnnnnnnnnnnnnnnnnnnnnnnnaggtaacagttatatcaagcttaatatgtgctgaacattgttctgaacactttaggtagatgaactagatgtatgtgaataaaaattatttggtcctcacaaaaaaa

SEQ ID NO: 69760 - DNA, 562 bp, Homo Sapiens
gcagccatatggcgaactgatattcttatggccacttaacaaccatgaggcctgaaagaggaattgtccaaaggccagcggaactgaaatggagtaaggggaagaagctacatgagacgaggtggcagagcaggggctggctcagctgtggattttgatgccacggacaaattttactctttattcgaagtgtaattagaagtcattaaagggttttcgaatgtggaagaacaagatctgattgacattatggaagcttacctgggtgtggagaatgggaaggatgggataagagtggaagcagcacaatctttgtggtatgccagggcagctctggcaggatggggccaggggcctcacgcacgccatgtgtggtgctgaaagcagtggaaactgcagctgggttgcatttgaataagagaaaggaatggtctcaaaaaagatcctcaggggtctagtgcaggggtgtccaatcttttggcttcctgggccacactggaagaagagtaatgtctcgggccaaacataaaatacactaacacaaatgacagctgatgaactg

SEQ ID NO: 69761 - DNA, 909 bp, Homo Sapiens
  misc_feature (143)..(165): n is a, c, g, or t
  misc_feature (476)..(699): n is a, c, g, or t
  misc_feature (712)..(712): n is a, c, g, or t
  misc_feature (716)..(716): n is a, c, g, or t
tgagccaccaggcccagccagtctcattcatatgtctgtgtggaaaagcagttctaagcgcagccaggggctcttggtcaagcagagcctttggctgcaggatccctgagtccattgcatctttccattagactggatcttcnnnnnnnnnnnnnnnnnnnnnnncctccaagccacctttgtttccctatctttttattaagaaaatttcaaatatttagaaaattgaaaggatgatgcattgaacacctatagaaccatctactttgtcatattagttttatgagtggatttgtttttatttttgctagaccatttaaaagcaagtaaatctgtgtgcctctctgaagaatagaggcattctcccttataaccacaatcccattattgtacctaaggcagttaacaaatttctattaacattagtaggtttgggtcggacacagtggccagtttttcctcgtgccgaattcttnnnnnnnnnnnnnnnnnnnnnnnnnnnnnnnnnnnnnnnnnnnnnnnnnnnnnnnnnnnnnnnnnnnnnnnnnnnnnnnnnnnnnnnnnnnnnnnnnnnnnnnnnnnnnnnnnnnnnnnnnnnnnnnnnnnnnnnnnnnnnnnnnnnnnnnnnnnnnnnnnnnnnnnnnnnnnnnnnnnnnnnnnnnnnnnnnnnnnnnnnnnnnnnnnnnnnnnnnnnnnnnntcggcacgccggngagngcggttgcgtatgggcgcctccgctcctcctcctgatcgctggccggtcgtcggtgcgggagcgtacactactcaaggcgtatcggtatcaagatccgggaacgcagagacagtggcaaagcacaaagcagaccgtaaaggcgtgctggtttcaaagtcgcccgggaataaaatcactcatcaaggggaccaa

SEQ ID NO: 69762 - DNA, 1265 bp, Homo Sapiens
cagtcgacggtaccggacatatgcccgggaattcggccattacggccggggattagttgggttttcacatgcaaacattcaaaatgaatacaaaattaaaatttgaacattatggtgattatggtgaggagaatgggatattaacataaaattatattaataagtagatatcgtagaaatagtgttgttacctgccaagccatcctgtatacaccaatgattttacaaagaaaacacccttccctccttctgccattactatggcaacttaagtgtatctgcagctctacattaaaaaggagaaagagaaataacctgtctctcattcctaagttgcctcattaattttcatgaacaagaatatgtacctttttgatgctatattactgcgattaaaaagttcttgcaggtaatgtttatgatatgttaaacgttgtaatttcttatcgtaattataacattcccattcttttgtagatgaaacttctacatattgaaccacagattttctgagcttctaaatgtagcctttcattgcacatttcagtgatcagaatagatatccttttacacgcacaaaagcaatagattcattcagtggacaagttccttgtttaactacacagctatgatggaatgatatatccaagttccttgcctcagtgaaatatgcatatgtatatcatgaaagtgggatgccaagtaagcttaaaatggcattctctagcaaagagattagacttttaaataactcttataaaacaggttggcgatcatttcccaagattggtttcccttgagtttttgctaaaacaaatcttagtagttttgcccgtttaaaacaactcacaatcgtaaatgctactattcctaagatatcttacctttttatttcagtttagccatgtattgtatgagtgtattagtctaagcagtgagaatcttttctatgcctctattccagcaaaaagtagaagtatcaaataaaaagggcaacttttaaaatattaagcctgaagacttctaaaaagacaagaaacatggcctaaataaccaacatagatttacatagtaagtttcacactaccttattaccaaaagcaaacacctcttactttaaactacattatcatgtatatctattgtatgctggtctttactttttgccaaaatcaacatataatgaagagatgcctttgtttcatgagattcaaacttgatgctatgctttaaaataaactcagtacttttagaaacataaaaaa

SEQ ID NO: 69763 - DNA, 1051 bp, Homo Sapiens
  misc_feature (42)..(82): n is a, c, g, or t
  misc_feature (86)..(120): n is a, c, g, or t
agactgtatagactcactatagggcgctagccctctattatnnnnnnnnnnnnnnnnnnnnnnnnnnnnnnnnnnnnnnnnnccgnnnnnnnnnnnnnnnnnnnnnnnnnnnnnnnnnnncagtcgacggtaccggacatatgcccgggaattcggccattacggccgggggccaaccgctgtttcagcccctagctggattccagccattgctgcagctgctccacagcccttttcaggacccaaacaaccgcagccgctgttcccaggatggtgatccgtgtatatattgcatcttcctctggctctacagcgattaagaagaaacaacaagatgtgcttggtttcctagaagccaacaaaataggatttgaagaaaaagatattgcagccaatgaagagaatcggaagtggatgagagaaaatgtacctgaaaatagtcgaccagccacaggttaccccctgccacctcagattttcaatgaaagccagtatcgcggggactatgatgccttctttgaagccagagaaaataatgcagtgtatgccttcttaggcttgacagccccacctggttcaaaggaagcagaagtgcaagcaaagcagcaagcatgaaccttaagcactgtgctttaagcatcctgaaaaatgagtctccattgcttttataaaatagcagaattagctttgcttcaaaagaaataggcttaatgttgaaataatagattagttgggttttcacatgcaaacattcaaaatgaatacaaaattaaaatttgaacattatggtgattatggcggaggagaaatgggatattaacataaaatcatactaataagtagatatccgtagaacatagtggttgtacctgccaagccatccctgtatacaccaatgaattttacaaagaaaacacccttcctcccttctggcattcttatggcaacttaagtgtaatctggaggtctacccttaacaaggagcaacgcgaataaccgggcctcacatcctaaggtgccccttaattccctggacccgaattgtcccttg

SEQ ID NO: 69764 - DNA, 1686 bp, Homo Sapiens
  misc_feature (79)..(114): n is a, c, g, or t
  misc_feature (1505)..(1505): n is a, c, g, or t
aagatgtatcgatcaccataggggtagtcgcgatagacgaacgacgagcgcagcgagtcggtgagcgaggacaggcggnnnnnnnnnnnnnnnnnnnnnnnnnnnnnnnnnnnncagtcgacggtaccggacatatgcccgggaattcggccattacggccggggggggtttgggctggaactgcagcgcttagagagctcggtggaagctgctaaaggcggaggcggggctctggcgagttctccttccaccttcccccacccttctctgccaaccgctgtttcagcccctagctggattccagccattgctgcagctgctccacagcccttttcaggacccaaacaaccgcagccgctgttcccaggatggtgatccgtgtatatattgcatcttcctctggctctacagcgattaagaagaaacaacaagatgtgcttggtttcctagaagccaacaaaataggatttgaagaaaaagatattgcagccaatgaagagaatcggaagtggatgagagaaaatgtacctgaaaatagtcgaccagccacaggttaccccctgccacctcagattttcaatgaaagccagtatcgcggggactatgatgccttctttgaagccagagaaaataatgcagtgtatgccttcttaggcttgacagccccacctggttcaaaggaagcagaagtgcaagcaaagcagcaagcatgaaccttaagcactgtgctttaagcatcctgaaaaatgagtctccattgcttttataaaatagcagaattagctttgcttcaaaagaaataggcttaatgttgaaataatagattagttgggttttcacatgcaaacattcaaaatgaatacaaaattaaaatttgaacattatggtgattatggtgaggagaatgggatattaacataaaattatattaataagtagatatcgtagaaatagtgttgttacctgccaagccatcctgtatacaccaatgattttacaaagaaaacacccttccctccttctgccattactatggcaacttaagtgtatctgcagctctacattaaaaaggagaaagagaaataacctgtctctcattcctaagttgcctcattaattttcatgaacaagaatatgtacctttttgatgctatattactgcgattaaaaagttcttgcaggtaatgtttatgatatgttgaaacgttgtaatttcctatcgtaattataacattcccattcttttgtagatgaaacttctacatattgaaccacagaatttctgagccttctaaatgtagcctttcattgcacatttcagtgatcagaatagatatccttttacacgcacaaaagcaatagattcattcagtggacaagttccttgtttaactacacagctatgatggaatgatatatcccagtttccttgcctcagtgaaatatggctatgtatatcatgaaagtggggatgcccagtaaaccttaaaatgccattctctanccaaagagattaagacttttaaataaactcttataaaaacaggttgtggcgatcactttccccaagaattggttttcccctgggagtttttcggtaaaaaaccaaatctttaattaagttttttggcccgcgtttaaaaccaacctcacccagtccggcaaacggccatcctaatttccct

SEQ ID NO: 69765 - DNA, 649 bp, Homo Sapiens
gaataactcaaaaggcagaacgaagagcctagaggtcagagatgagaggcatgaataattattcacaggcgttgaatataatcaaatgacttgcaacatttaccactgggatggtaaaatgtggtggaccaatcattcttttagtctgtgcattttcccatttttttcaacaggaatgtctagagacattattcctgttttgccactgtatttttggtgaatgtgtagtaagtaactggcctctttagtatcacaaagctggatgaagaaaatgtggtacatatacaccatgaaatactatgccgccacaaaaaggaaatgagatcatgtcctctgcaaggacatggatgaatctggaagccattatccttagcaaagtaacgcaggaacagaaaaccaaacaccacatgttgtctcttagaagtgggagctgaacagtaagaacacatggacacagggtggagaacaatacacactggggcttgatggggggtggaggggagggatggggagcattagaaaaaataactaatgcatgctgggcttaatacctatgtgatgggttgataggtgcagcaaaccaccctggcacatgtttatcaatgtaacaaacctgcacatcctgcacaggtactccaaaactaaaagt

SEQ ID NO: 69766 - DNA, 432 bp, Homo Sapiens
cagggacatggatgaagctggaagccattatccttagcaaagtaacgcaggaacagaaaaccaaacaccacatgttgtctcttagaagtgggagctgaacgtatagacaaaatgacctacgaatcaagcattttgttccacggtctctactgttagctgcatgtctcagaaacagcttctttctcaagagagaacaagagggataatgctggatctaaaggcatcatctgaagaagacaaagatatcaacaatcgcaactatttggctttctgtccatcactgagacttttcataatcttcccttcataaataggatctcttgatcagaacagaaaagttgagtcttaaatttcctgtatttatttctgactgatactgagggaagtgcaaatttggttgctatgattaaactccttgattgttcttaaaaa

SEQ ID NO: 69767 - DNA, 511 bp, Homo Sapiens
aatcatcacattactatatagaaataggccctaacttgctaaaagaacgtgcatatggtgatttagagaactgtacctttccaatcgtagctaaaccacacagtatgtctttctatgacaaatggggtatttattatacacatagactttatgtatttatgtatagcatagaattgtcatatataatgtttacctatcatgatatgtatatgtatattttaatggtcatatataatgtttgctttagtttccaaagtttgaaatacgcttttcagataaaagttgtatcctattcaaaaaatagctaatgcatactggacttaatacctaggtgatgggttgataagtgcagcaaaccaccatggcacatgttcacctatgtaacaaacctgcacatcctgcacaggtaccccggaactttaaataaaataaaataaaatattttaaaaggttgtattctattcagctaaaagaacatgtaactctcactaaataaatggtattttaattt

SEQ ID NO: 69768 - DNA, 1057 bp, Homo Sapiens
  misc_feature (109)..(192): n is a, c, g, or t
cagataggctaggtacgaggctgggtgttgaatcggcacgaggcagagaattcgagaagagaagcgagaagaacggaggaggagagagttagaaaagaaacgtttgcgnnnnnnnnnnnnnnnnnnnnnnnnnnnnnnnnnnnnnnnnnnnnnnnnnnnnnnnnnnnnnnnnnnnnnnnnnnnnnnnnnnnnagtaaggattaagcttcttaagaaaccagaaaagggagaggaaccaaccacagagaaaccaaaagaaagaggagaggagattgatactggaggtggcaagcaggaatcctgtgcccccggtgcagtcgtaaaagccaggcccatggaaggctcgctggaggagccccaggagacgtcacacagcggcagtgataaagagcacagggatgtggagagatctcaagaacaagaatctgaagcacaaagataccatgtggatgacggcaggaggcacagagctcaccacgagcctgaacggctttccagaaggagtgaggatgagcagagatgggggaaaggacctggccaagacagagggaagaaggggagccaggacagcggggctccgggggaggccatggagagactgggaagagcgcagaggtgtgacgacagtccagcacccagaaaagagcgactggcaaacaaggaccggccagccttgcagctgtatgatccaggagctcgcttccgagcgcgagagtgtggcggaaacaggaggatctgcaagggcaaaaggttcggggactggtcctgagaacgagggaagaggcagagtgagtccactgcacgcacctggcctccatggacgagcaagggcattccagaaacgtgtaaataacccgatgtgatgcgaaggagaacttttcctttacaggaaactgggagctaaaatacagagggggcgctgaaaaccggcggaaacctctaagaaagttgaacctgtctaaaaaggagcaagaaattctccacaattttacaccccccgggggtaacatagcaacgtgtggggtgtgcccacacacaaaaagaatatacccgcagg

SEQ ID NO: 69769 - DNA, 475 bp, Homo Sapiens
ccatgccaaacttctatattcagtaatgtagtttgttaatgttttccttctcattcaggtattgtcagcagatctcatggatagaggtttaaatggcctctggtaatagtgacaatgcaagggcgagaaaggttccgctttcttttttgtgtctctcttttagatgtcagcatcataattctgccaactcagttagctaagtatttggctagttattttcattctcagctaaccagaatgtgttttaccttttaggtttaccgacaagactgtgaaactttcgggatggtggtgaaaatgctgattgaaaaagatccttcattagaaaagtctatacagtttgcattgaggcagaatttacatgaaataggtgagcggtgtgttgaagaactcaagcatttcattgcagagtatgatacttccactcaagattttggagagcctttttagatttttctgctcaggctaaaaaaaa

SEQ ID NO: 69770 - DNA, 1199 bp, Homo Sapiens
  misc_feature (1090)..(1124): n is a, c, g, or t
agcctgagcagaaaaatctaaaaaggctctccaaaatcttgagtggaagtatcatactctgcaatgaaatgcttgagttcttcaacacaccgctcacctatttcatgtaaattctgcctcaatgcaaactgtatagacttttctaatgaaggatctttttcaatcagcattttcaccaccatcccgaaagtttcacagtcttgtcggtaaacctgttcaatctctttggtttttgatgctattgctttagagcgagtggttagctgactatcttcaaataattctatcccatgtgttgtgtttgactcaggttcctctggctggtcagtaaacaatggtgctgtggatcccgcctcatactcagaaatttcaggcaagttactttcatctgatttctctagcttttcagcagcccacttgcttgcagcctcagcaagttccttttcagttagcctactgggtttgtctaacacctttgatgaagaaactgctgaaccacttgagggtgaagtatctcttgatgttttcaaagactggacaggcctctctttatctctttcaggatttccttcattctgccgtttgtaggaggcaccaggacgcacggactttctatgttgagactgatggaaagagtatgatttgctcctttctggagagtagcttctgctactgacactggaaccagatctgctgtgtggagaatcctttcggccaacaggtgattctctgaaaaaagtattgtcccttttataaggagaccgctctctcgcataatgggaagagtagaaactttttcttctaaagccatctctcatgtccctgtattcaggttgcctgcttgcagaatgatcgtctcttgtccatctataaccagattcatcactgggatgacttcgaggaggtgctcgttctctcggaattctttcatattcatatcgtccctcagaccacatttcgtctcttctgtaagccacgactctggccctccgggagaccccgtaaatgcagccgtccgctcgccgccgttatcccaggtcccggccgtaatggccgaattcccgggcatatgtccggtaccgtcgactgnnnnnnnnnnnnnnnnnnnnnnnnnnnnnnnnnnncgccgcttcctcgctcactactcgctgcgctcgtcgttcgctcggcgagctagcgccatagaattattcaaaagg

SEQ ID NO: 69771 - DNA, 1319 bp, Homo Sapiens
  misc_feature (963)..(984): n is a, c, g, or t
  misc_feature (1045)..(1045): n is a, c, g, or t
  misc_feature (1233)..(1233): n is a, c, g, or t
catgtctctcctcttcaaagctaatgaatacaatggaaacagacgatattccagtagcatccagatccctaagccagaggtgcatgcgtctttcaaagtaatgagcatttgttggtcacactgggagaggtttcaccaccgcattctgacctctcctccctaaaggtgctaaacctctctgactctgtgtacagttcacaaaccacagctagaattcctccacctaggattaagctggagagaagtaagtaatcttaggtttcatggtactgtagaggccaggctgaaatgtcatatctgaaggaagaaagcagcagctggacaatgtttctttgcaaagcaacactcgaaccaaaagatgcctcaatcccattttgatattcattttagtgaaaggatgcatcagacctgttccacatcatgcacatgggaaagggtggttatcattttccttctaacaagtaggtacagatattcggttactacacgtgcacctgtagcagtatttctagaaacatccctttttgttgagaacctcccttgaatgtctgtcacactcacacctgacgggatggttactggattagagagtagatttggcacatcttttcttagtcttttgattcaaattcaaaacttaacagcacaaaccaggtcagagttactttcggttagaatttattgccatttattcctttttataaatttctatagattatactgttatttttatgttattggcctagagctacacgtatatgggtttgtcctgagtccgttttcaaatgaccttgtgattgatagggaaatggttttgtccatgttcttggaaatacttgtgtatgtacagaagggagggaggattatttttctacaaagtaatttatgatttctaattttctaatgtgccttggatatgtgccaaatgatggaaaagaaacagtaaactttatgataaaaaannnnnnnnnnnnnnnnnnnnnnccatgtcggcccgcctcggccccttcgagaagctttctagaaccattcgttttggcgcgcngggccccagtagggtaaagtgaacatgggtcatagcctggtttccctagggaggatcctgggtcaatgactaagtgctttggaattctcccccaataaaaaaacgccccgggcggccaacccgaggcggttctgaaccaaaattccagaatgggagttttctggaggcccctttaacctgggatcctnatccaacagggaattccccagcccgaagcttcgaataatcaaaatttacaggcccccggccctgtggcccccttttattttgcaag

SEQ ID NO: 69772 - DNA, 995 bp, Homo Sapiens
  misc_feature (970)..(970): n is a, c, g, or t
aagtccttataaatatgtttgtatcagagaaaacaaggcacttttgggagcattatggcttactctactacatgtacatcattctagacagaaagtaaaaactggttagttcctcaagtgaattaactgaataaacttaatacaataacaaaattgttccctaacccacactgaggcacagttaaagggaacatggtaggaggcacagaaggaggcacagaatgaggcacatctctgcgcgacacctggtcccaggtcagttggaccccagcagggctcaaagcctgatgcctccaggaagcctgacatctctcatgagcaaagccccctggccttggagcactggctccctccctccccataccctgaagtcaggtgaggggccgcagtgggaggcagtcctagagcagagctgggacacggtgggaatgcttaagcagggtcaccaaagccacagagacctcaatctgtccaagctggcactgcagagtcagaggatgggcgccacgggaagagatttcacattagccgtgacaacaccgcctcggctctgcgttgacattggccagggtcgtttctgagggcgctcgggcttccactggaggcgagctggagcctgggccagctgctctgagcctccaagggctggctgagcctgccccctcccccaggctgctcctttggaatgtacccatctcacaaccaaggcaaagccacaagttgcttctgacactattggaagctgggccccagggccacaggaatgggggcaggtcccttgggcggggtgaaccaggaagggaggaggctccttggcttcggcgcttaggagtccttatgggccattgttccatactctcactagcttaggcccagattaaataatcactaaactttgcattctacattacgtgagtccaaaaacaggattacctgcattgggtcctttatcatcttaaaggctctggtntaaagaagcctacagccgcggccgc

SEQ ID NO: 69773 - DNA, 991 bp, Homo Sapiens
  misc_feature (46)..(76): n is a, c, g, or t
  misc_feature (834)..(834): n is a, c, g, or t
acgaggcctgggtggcgaattcggcacgagggaactagtctcgagnnnnnnnnnnnnnnnnnnnnnnnnnnnnnnngagtggctacaaagactttatcaaattattttaaatgttggcatttaagtattcatgtgtatacagttacatggaaccttcaggtcagtggggcacaaatgtggtatacacacgatgagcctggcagggaagcaaatgagaccaggcttggagctacagggatttaaaaaaattggatgtctttctgagggtctgagaagaatagggcagaagaggaaagggtcactttaggggtctggcttaacccactgcctagatctccaactgaagagctcctttcccatcctcaggggaagagtgcctgttttcaaacggcatccctactacacatataccccccttccctaaaatcttgatgtggcaaacacacccaagaacccacaggaatatgtccttataaatatgtttgtatcagagaaaacaaggcactttgggagcattatggcttactctactacatgtacatcattctagacagaaagtaaaaactggttagttcctcaagtgaattaactgaataaacttaatacaataacaaaattgttccctaacccacactgaggcacagttaaagggaacatggtaggaggcacagaaggaggcacagaatgaggcacatctctgcgcgacacctggtcccaggtcagttggaccccagcagggctcaaagcctgatgcctccaggaagcctgacatctctcatgagcaaagccccctggccttggagcactggctccctccctcccatacctgaaaanccaggggaggggcccccagtgggaaggattcctaaagcaaaacttgggaacggggggaaatgctaaacaggggtccccaaagccacgaagaacctcattctggccaaactggacctgcaaaaatccaaaggatgggcgcccccgggaaaaaaatttt

SEQ ID NO: 69774 - DNA, 804 bp, Homo Sapiens
  misc_feature (788)..(788): n is a, c, g, or t
attattgtaaacttatattttatttaattaataatgttttggtgtgttagtaatttctgtaaagtagcactccttaaataagttcctaaaaataatattggagccttgaacatttaatctcagctaaaaaaattattctaaaactgtcatgataaaaaaggttacaaaatttctctttattctagtcctgaattccttctccagaattttaatacaaaacgaattttcaggcacaaatagtcaccagataatgcataccgtaatttagcagacttaaccaaacaataaacacccctacaaaagtgtcactattttatcactttgtgctgtactcttctccctatacatctttaatagtggtcacttctactttacttctagcattcaatttagacatctcaaccccaaatttaataatctgttttatcaaacatttgttttgagaacaaaatttctataaattatctgacaaatcaaagcagaacctttaattgtagaacacaaatgaaaaataatatacaagaaaccttatctcttcaacttcaaggctaatacctgggtgttggaaaactggccaaagataaataaattttactatatttatttttctgcactgggtcaagatttctattataaatgatatgttacttacgatactgtcgtttcaaaaaagggctttccaagaagcctttagtaaagttcttctatgctgggtatgtacttggttcctgtatgttttaatctgaactattcgagaattacttatttgttgaacatagtctattagnaaaaaatactaaatcg

SEQ ID NO: 69775 - DNA, 1737 bp, Homo Sapiens
ataggctaggtacgaggctgggtttgaattcggcacgaggagggtgcggcgcaatccggagaggacgccaggacgacgcccgagttccctttcaggctagaactcttcctttttctagcttggggtagaaggcggagccggagccccggaacccccgaccctcggggtgctgaggcggcagcagggccgtcccctacatttgcatagcccctgggacgtggcgctgcacccaagcctcttctcagttggagggaactccaagtcccacagtgccacggggtggggtgcgtcactttcgctgcgttggaggctgaggagaattgagcctgggaggcgggtccggagagggctatggaaagccgccggcggggaatcccggccgtagagggacagtggataggtgcccgaggcctacagctggcctggggctcgtgtctgggcttcggacgttggggcccggtggcccaccctttccgtagttgtcccaaatggagctggaattggatgctggtgaccaagacctgctggccttcctgctagaggaaagtggagatttggggacggcacccgatgaggccgtgagggccccactggactgggcgctgccgctttctgaggtaccgagcgactgggaagtagatgatttgctgtgctccctgctgagtcccccagcgtcgttgaacattctcagctcctccaacccctgccttgtccaccatgaccacacctactccctcccacgggaaactgtctctatggatctagagagtgagagctgtagaaaagaggggacccagatgactccacagcatatggaggagctggcagagcaggagattgctaggctagtactgacagatgaggagaagagtctattggagaaggaggggcttattctgcctgagacacttcctctcactaagacagaggaacaaattctgaaacgtgtgcggaggaagattcgaaataaaagatctgctcaagagagccgcaggaaaaagaaggtgtatgttgggggtttagagagcagggtcttgaaatacacagcccagaatatggagcttcagaacaaagtacagcttctggaggaacagaatttgtcccttctagatcaactgaggaaactccaggccatggtgattgagatatcaaacaaaaccagcagcagcagcacctgcatcttggtcctactagtctccttctgcctcctccttgtacctgctatgtactcctctgacacaagggggagcctgccagctgagcatggagtgttgtcccgccagcttcgtgccctccccagtgaggacccttaccagctggagctgcctgccctgcagtcagaagtgccgaaagacagcacacaccagtggttggacggctcagactgtgtactccaggcccctggcaacacttcctgcctgctgcattacatgcctcaggctcccagtgcagagcctcccctggagtggccattccctgacctcttctcagagcctctctgccgaggtcccatcctccccctgcaggcaaatctcacaaggaagggaggatggcttcctactggtagcccctctgtcattttgcaggacagatactcaggctagatatgaggatatgtggggggtctcagcaggagcctggggggctccccatctgtgtccaaataaaaagcggtgggcaagggctggccgcagctcctgtgccctgtcaggacgactgagggctcaaacacaccac

SEQ ID NO: 69776 - DNA, 617 bp, Homo Sapiens
  misc_feature (453)..(453): n is a, c, g, or t
  misc_feature (534)..(534): n is a, c, g, or t
ggtcgagctaccttctgtcccagctcatgtgtgttaagagttccagcccaagatgactatgctggactagtcctcttgcctaggatgctttctctctgcctagaatgctttcccaacccaaccccagaatcctaactactatgaaagcccatgacgtctttcttaccccctttctttttcttggtacttaacttattcttagttacttgtaaatgtattcctcactactgggagcttcttggaatcagagacctagtgaaggcagctgcccagttagaaatcaagtgtagggcaggggaaagagtgagaaagcattaaatgaggggcataggaagggaatggtttggagggatacttacaaattctgttcctccagaagctgtactttgttctgaagctccatattctgggctgtgtatttcaagaccctgggggaaataacaaagatacggngatatggcctgtatcctcccttcaaaaacctaatacttacaacagagtccctctccctttcatacctgctctctaaacccncacatacaccttccttttcctgcggctctcttgagcagatcttttatttcgaatctgctccgcacacgtttcagaatttgttc

SEQ ID NO: 69777 - DNA, 705 bp, Homo Sapiens
  misc_feature (666)..(666): n is a, c, g, or t
gggggcaaagtaggaggcaaatggaagttgaaaaacaggctttgagtaacaactaattttgttagaatcatgaccctcattgagaacattcacctcccaaacattggtatacgcactgcagcctggtcattctaatttgattcaacatttaatccattattaatgcaagtaggggaagctcttaaaaataagtttctatcttcttaacttcctttaagacttcaagctaaaagggtctaaaattcctttaaatcactgtaagtcaaaatcgttttctgtgttgtcaaagagtcaccaatgatttgtttattgagcccttcctgtgtacaaacacggtggcaaacacacaatggtgtaaagcctcatccagtcatctttaaggagcttgcaagagaactgagatctctttgagtgcctatacaaccaatctgtttttcactttcaatacagtattcaataaactacatgagatatttgatgctttaatacaaaataggctttttgttacatgattttgcccccattgtaggctaattgcaggtcacaactgctacatcagccagccacaggcccccttggaaggaactgtgcccccaaccctctcctgcactaagcaggtccagagtgaatgataactggaagggtccattcactggaactcttganatgtggcttgatgacaagacatcctgggacatctcttca

SEQ ID NO: 69778 - DNA, 907 bp, Homo Sapiens
  misc_feature (22)..(23): n is a, c, g, or t
ccaaaatgcatttctatatttnntctggcctctgggtccctaccactttaatttcatacccaagtcggctggtcaggtagaggactcttgtggcatgaaagtggtttctggcactgcccattgtgacgtcatggaaaccggaaaggaagaaggtgttggttttcctgcttcttttcccatggcttcgagagttacactgtgtgatccagcagtctgactccatgattgaaatcacaattgggataaagttggtagagatgcttcttaatttacagtggggtatatcctcataaacccctcataagttaaaaatattgtaagtggaaaatgcatttaatacacctactgacatcatagctcagccttgtctgccttaactgtgcccagaaatgcgcattagcctacaatgggggcaaaatcatgtaacaagaagcctattttgtattaaagcatcaaatatctcatgtagtttattgaatactgtattgaaagtgaaaaacagattggtcgtataggcactcaaagtacggtttctactgaatgtgtattgttttcacaccattgtaaagtcaaaaaatcaaaggtcataggtcaaacagttgtaagtagggaaccgtctgtgcttgttacatgcttagggattttctatttctaattgactcactgtcattgtaggatttaaagagggagacctcaaatagtgtatctgtgacctgcatctcctttgggtggttcttgatgtccatgatttcttggcctagatcacgtttggctgctaaggcctggactacgttctttgtggagttgtgagggggctgcttgtgatcgcctaggagtggagaggatgccttatttaccccttgatgtactaatgcctgcataaataaaactcattgcaaacatcctg

SEQ ID NO: 69779 - DNA, 1340 bp, Homo Sapiens
tgctgaggaatatgaacagtggttcaaaaagcaggctggtacggtccggaatcccgggatatcgtcgaccacgcgtcgtttaagttcaatctaaaggcttcaggtccacatttttttatacgttgtattttaaaaacgtttgaaaggagtcttacacctgtatcatgaaaactgaatccttttgaaataccactatatgaagagagagatgaaatttagtgaacagaattgaaaaggtgctcataatttcactatgcaaacttaccccagtctctaaaaaagtaatttagatttaaagttctttgatgtatttgattttctaaatctttatggttatgatttggaataaaatgtgcctaatcctgtgttacattctgttcttaaatctgaatgccttctcatttaattctgaggaaatatcacacaagtgtcttcattgaccttgaagaaatgtatatacagttgccttataaaacaacataaatttagaccataacttttatagagaaagggttttgtcaaatgttttctgaaaatctgagtaattcaaagcatgcctctgcccctttaatatttgtaataacctgcattggtgctgtctgccaaatattaaattgaaatcttcatttcaattttattatctggaaagggcactggattgctctgcaaccaaagaaagcaatatggaatgaaaaaactcattcacttttgtcttattttcttttaaggtgtattggcatgtaatttgcatagagaaggtcctctggttagtctctcaaattgaggctgtttagggaaatccttattcagttggtggcagtggttggtttaaagtagaaggaaataagatcgccttaataccagaaatgattagaagtgctgatttagattcaacaaataccatatgtccttatcattttttgtaagaagaaattggttaagtcctaactttcaatgtgtacccaaatacttgtatttatgcttttgataaaatgtattttcagcattaatacacatccgattatgccttatttatatatgaagaataaagttaccatgttatactgttatgtcctaaaattcaaatcactatttgagaaaccctcaaattggtgctttcattatataatgatacatttagacaaaaccccaaactaagccatttgaaacaagattctctccattgcagtttgtagcaatgttatttctgtgtatgtcatgagaaggctaaatatcagtgttaatttcttgtttgaatccgtgaaatcatgcctgtaaagcccaaacatttgtaacaaactccctaataaatttagagaaagtcactctgttaccaaaac

SEQ ID NO: 69780 - DNA, 1124 bp, Homo Sapiens
gggcaccagaagaaaaaatacggctaagtacgaggctgggtgtcaaatacggcacgaggccgagcagcggcggcggcggcggcagtggcggtcccactggcaggcgggcaagaggggagtccgggcggcggccggcgtgggagccgggggaccaccatggtaaagaagcggaaaggccgcgtcgtgatcgactcggacacagaggacagcggcagcgacgagaacctggatcaggagctcttgtccctggcaaagcgaaagcgcagtgactctgaggagaaggagccgcctgtgagtcagcctgcagcctcgtcagactcggagacgtctgacagtgacgatgagtggacatttgggagcaataaaaataagaagaaaggaaaagccagaaaaatagagaagaaaggaaccatgaagaaacaggccaacaaaactgcctcctcaggcagttcagacaaagacagttcagctgagagctcagcccctgaggaaggtgaagtgtcagactctgacagcaacagctcctcttccagttcagattcagactcttcctcagaagatgaagagttccatgatggctatggagaagacctcatgggagatgaggaagacagggcccgtctggaacagatgacagagaaagagagagagcaagaactgttcaatcgcatagagaagagggaggtgttgaaaagaagatttgaaatcaagaaaaaacttaaaacagccaaaaagaacaacccacaccaacagaaaatccggggactattcgggttgcggcacaaagacggacgactggccagggccaaacgtggtcccgtagccaacgttttgtcggcacaagggggcaaacccgcggggcccacataaagggagcgcagcaaaaggaaaaaccaggggttacccgctggtacgaacagagcggaaaaaacgggcgacaggcagagacgaacaacacgcacgagacaccagaggagctgcacaaagcagagagagaaagcgagagagcatacaggacaagaacagcaagacaaggcagagcgcgagagaggaagagagaaaaagagtaaagaacggacaagacgacagacaagaaggcaagaaatcaaggtagaaccaacaaa

SEQ ID NO: 69781 - DNA, 767 bp, Homo Sapiens
  misc_feature (685)..(685): n is a, c, g, or t
atgagccatcgtgcttggccttcttgattcttgaatacggggttttgaggtgaaagcatttcatgaaaacttaagttcatacacaagagcatcatgaatattctaaaagaggtatctgtgctttttttgtgaccacaaaatattacttcttatgaaatgtttacactaggtgaggaaaagttcattaattacctttaaaccgttccttattttttttaagattttaaattgtattttggcttttgcctccagtatcctttctggttgctctggtttgaattaagttcctattatgctgcagcacatatcaaccttccctaagtaaccatttcctggaatgtgaagcatcggtgccattagcagaccatatgcagaaatgtcgtgtacttgcatttcttttttgtgcactctataaggctggttgtgactcagatcagcttaactttttatattatgttatttcactaactgctacagtcaaaatgatcaaatctttgtacaatagaaaattatttaaattttatttttctactgacatttctaattctagtgtaaatgtttatcaataaaaaattactttcaattctgagttggaattatatttctttttggtggctaatgagtttaatcttttgtaataaaattgacttcagttttcattttttaaataacttaatatcgagcnatgtgtaactttttttatgttctacttcttactaatttatgataaaattcttgttcaaagttgtgattaaaccgtacttaac

SEQ ID NO: 69782 - DNA, 1364 bp, Homo Sapiens
attccctaaccaggagggacgataaggagaggcccctttcatccctgaaggagtggtggctcgcaggaagaggatggaaactgaggagtccaggaagaagagggaacgagatcttgagctggaaatgggagatgattatattttggatcttcagaagtactgggatttaatgaatttgtctgaaaaacatgataagataccagaaatctgggaaggccataatatagctgattatattgatccagccatcatgaagaaattggaagaattagaaaaagaagaagagctgagaacagctgctggagagtatgacagtgtatctgagagtgaagacgaagagatgctggaaatccgacagctggcaaagcaaattcgagagaaaaagaagttgaaaattctggagtccaaagaaaagaatacacagggacccaggatgccgcgaactgctaagaaggttcagaggacagttttggagaaggagatgcgtagtcttggtgttgacatggacgataaagacgatgcccattacgcagtccaggcaagaagatcccggagcatcactaggaaaagaaagcgggaagactctgctcccccgtcctctgtggcccggagtgggagttgctctcgaactccacgtgacgtttctggtcttagggatgtcaagatggtgaagaaagccaagactatgatgaagaatgctcagaagaagatgaatcggttggggaagaaaggggaggcggatagacacgtgtttgatatgaagcccaagcacttgctgtctgggaagaggaaagctggtaaaaaggacaggagatagtatccgtttggttggcgtggcttcgctagagtgttgctgtttatttcctggtttggcacagtatggtttcatgaaattggagctctgtataaactgaaaaagacaaaataagtaaagcacttgttgctttgctgaaaactatggttaaccctatataggtgtgggaaatttttgtcactgcataatattacaaatattttgagtagacagtgtttccacatttaatggagtatcagttgcttcagattttcagaactgggaagatttactggtgtaactgggttgtttttgatggagaaaaaccttattttcttttgtaagagctgggagcaaacacgtttatgagtgtgtcggaatcccgtgcttaaaatacgctcttaaattattttctagtcttattttacaatgtctcattgtagtctgtcttcaactattttatccaaaataaacctccagaagaaagtagttttcatttacttagctcatgttttggtttaaatatagcccctatggatttggccaaataaaaaggcaaacaacataaatt

SEQ ID NO: 69783 - DNA, 548 bp, Homo Sapiens
agagaagagagagaaaaatggcagatggaagtgggagacaattccacacaccagggggtggagaatgatgtggaggcagcagtgggtgtaaggacaatggtgccaagagatttatttggctagaacacaaggggcagctgggtagttaggagtgggaggatggtaggacagtctgacagaaaccttggaaacagttgaactctgaaaagctgatggcaaatcagatttcatgaggaaaatggcatggttgaaaatagtaatagaaaaataagactgaagttttaaatgactggatttttgaaagtaggattattatttctttggtataccgaactttgcaaagatacgtagcattgcatccttcctctttgcttctagacagggttggccataaaccaactacactgatagaggtctctccagattgtctcagaagagagagtttaccctgaaacttaatgacatgaataaaacctgtttactgaaatttttattgcaatttaacgttaaaagtttctgctggagttttatgcatatttttctctcga

SEQ ID NO: 69784 - DNA, 1372 bp, Homo Sapiens
gatccccatcatcacaactgtcatcactctgccgcacgtgattgtggagaatatccctctccatgtgaatgcagatctgccgtcatttgggcgtgtcagagagtcgttacctgtcaagtatcacctacagaataagaccgacttagttcaagatgtagaaatttctgtggagcccagtgatgccttcatgttctcaggtctcaaacagattcgattacgtatcctccctggcacggagcaggaaatgctatataatttctatcctctgatggctggataccagaagctgccatctctcaacatcaacttgcttagatttcctaacttcacaaatcagctgctcaggcgttttatacctaccagtatttttgtcaagccacaagggtcgactcatggatgatacctctattgctgctgcatgatgttcaagacaggcccttggctgttgttacagagatgttgggcagagctatgcaggtgtttcattgtgaactctagctttgatcatggtaaaaagttaaccttttctattttttcaatggatgttataccaactattcagaggaactcatacttcaaaaatattaggaaaatctgtcttatagtttctctaataaatatctgaaatctcagtacgacatgaaagaatgtcagaccattgttattgttgaaagtcatttgatgaatggtaaattctatgaaaagtaagtgatttgcatgtataatatcaggaaaattaagcatcccaagtgtgactggacaacagagagcagatgcaccagtgcctgtgccataaagttccgaatcccccatgtgtctctttcagagctggccagaccggaacataaatcattctcataaattcagtgtgtactcagaacacatacacaacaacatagggagttgtatgactgatacggaaaacttccagaaagttttaatcaaagcagtttaattaaggtatcaaaaatatctttgcttactatcaagaagtgtcaaataggttcagcttgctgccaaaatatggatcatttatgaagcaggttcatattttagaggtgttaataaaatcctcatcggaaaagatccaaagtgcaaggatttgattataaacataatttcctagactgaaagtttttggaaaagatgcagggtctgagtcaggccttctggttatattgtgcagtttcaaaagaactatttaaaactcttgaaaactcatgtaaataaaaatcatagggtgaaaattgtatttgttaaaataccttaataatttaaaatgacctgatttcctggaaaattttattattcaaaaggtggaggcattgtaaaaaggaaatagtgatgtaaataaacatgttctctttcaagt

SEQ ID NO: 69785 - DNA, 1919 bp, Homo Sapiens
ggctggtaccggtccggatattcccgggatatcgtcgacccacgcgtcgccacgcgtcggagatagttgccggaatggagaaaaacacatgctgcctggcctgtcacacaacaaggagcacttaacagaacaaatcaatgtagaggaaaagttgtgttctgcagagaaaaactcgtgtgttcagcagagtgacaatttaaaagttgcacaaaactcaccatcagtagaaaacatacagacttctcaagcagaacaagcaaaacccttacaggaggatattttaatgcaaaatattgaaactgtgcacccatttcgaagaggatcagcagtagcgacatctcattttgaagttggaaacacatgtccatcagaatttccttctaaaagcatcacctttacttccagaagcaccagccccagaacaagtacaaacttttcacccatgaggccacagcagcccaaccttcagcatctcaagtctagcccacctggatttccatttccagggcctcctaattttcccccacaaagcatgtttggatttccaccacatttgccacctccattacttccccctccaggctttggctttgctcaaaatcccatggttccctggccacctgttgttcatctcccaggtcagccacagcgtatgatgggtcctctctcacaagcatcaaggtatataggcccgcagaatttttaccaggttaaagacattcggaggccagaaaggcgccatagtgacccttggggtaggcaagaccaacagcaactggataggccatttaataggggtaaaggggaccgccagagattttatagtgattcacaccatttgaaaagagagcgacatgaaaaggaatgggagcaagaatctgaaaggcatagacgcagagacagaagccaagacaaggacagagacagaaaaagcagggaggaagggcacaaagataaagagagggcacggttatcacatggtgatcgaggaacagatggaaaagcaagcagagatagtaggaatgtagacaagaagccagataaacctaaaagtgaagactatgagaaggacaaagaacgagagaaaagtaaacacagagaaggagaaaaggacagggataggtaccacaaagatagggaccacactgacagaactaaaagcaaaaggtaaaatttgcaggctgcttcaggattacatttaaataactgttaaaatgttgtatcttgtaaacaaaagaaagattgcctgctaggattgtgccatctttaaaatttttactattggtcatttgcagaacagtaaattctgtgtgttggtacagagtgctctgtaccagtgctcatcatcccttcttcataccaacggtccctagttataggaatttaatatttttaaaagttttacattgctgtatattcaaagatttgttttattaatatgcaataaaggcttagaaattttagttttattccttaattggtaaatatggttaactatggaatatatttacttcctctagtgaatgtcctttatataatgactaatttgggagtaatgtgtgctctgtaagtttgttttaaattgcactgtttttaaagaaactgtagaggagcaacaaaaatccaagcaacttcataatcagattatgctaatcatttagttgagcagtttttgaccaagaatcagaagcccaaggggtacatttattgctttaatctgcactcattgaagtcatttattaccatatactacagctttgtggtaggccattattttcattttcatttttggctcttcagaaacttgaatacttaagcttgtacatgatcttgtgttttgctatcctttttactgtaaaatgtaaatattttaagggatattttgattctaaatatgataaaataatttctcacctaaa

SEQ ID NO: 69786 - DNA, 587 bp, Homo Sapiens
cagaaagagtatgttaaaagaaaaatattaggtagaatgttgtaaaacttttaatttacccatcatatttaacatttccaagactattttcctccgcaggtgaggagcccatggggcgggcagcccccagaaagcgggcagcaggccccgataccgggaagagccgacacagccacgaaccagacaagcagacaatcagcggacaatcggttctggactcacccctcatccgggcccccagccccgccagagcctccgtggctgcgggtgttgggaaccatgcctgccagccagtatgtgcccctcacccaggcctggctgggccctggagagtcctgtttgcacagcccaggggtgtccggcctctggcccgccccggagcagggagggtggctggggccaagccccgagggcccctgcaagcactttacttcctgttcctccccagccttaaccccaaagccctcctgcaccccaaagaagccactgaggctgaccgagccacactgtctccccaggggcgtcgacctggcccagctgggtccccagggccagcacatggaataaaatagccagggccacactca

SEQ ID NO: 69787 - DNA, 1044 bp, Homo Sapiens
  misc_feature (881)..(905): n is a, c, g, or t
gggacgcctgcggcgctgctggttgaggctgtgtgggtgggggacgggccgaggcgatggcggagaagtttgaccacctagaggagcacctggagaagttcgtggagaacattcggcagctcggcatcatcgtcagtgacttccagcccagcagccaggccgggctcaaccaaaagctgaattttattgttactggcttacaggatattgacaagtgcagacagcagcttcatgatattactgtaccgttagaagtttttgaatatatagatcaaggtcgaaatccccagctctacaccaaagagtgcctggagagggctctagctaaaaatgagcaagttaaaggcaagatcgacaccatgaagaaatttaaaagcctgttgattcaagaactttctaaagtatttccggaagacatggctaagtatcgaagcatccggggggaggatcacccgccttcttaaccagctcaccctccctgtgtgaagatcccccgggactgcgatgcggcgtgaggctgggactgcgagtgctgacgccaccttcctgctgaggtgggactgggccctggacacacccctcagcccctctgtcctcattgtttggcctcatgggaccgaggggctggaggagaggcggagctgtgccccagctgttccagcagcttgtctggcgtcaactggctttcagagtgctgacccctcatcactgtggggatcattctctctgagggcagatgaggcgcaggaaaatagtcttggaaatgttaaatatgatgggtaaattaaaagttttacaacattctacctaatatttttcttttaacatactttttctgttctattgtattatggtgtccgaaagctaaataacgactaggnnnnnnnnnnnnnnnnnnnnnnnnntcagtttaatgtgggaagtacttaagtggtattatattttacattttcaagtatagtgcataaagaatgttttaaatgtaactgttttcatggatttcaattagacatgcctataataaactaagtatgtggcttaaaa

SEQ ID NO: 69788 - DNA, 1027 bp, Homo Sapiens
  misc_feature (357)..(398): n is a, c, g, or t
ggcgggtggggtcggggatttcgctgtgtggggtctcctcgtgtggtgggtgtgctcccgtgtggttttgtccctcgtcagcagctgttcgttgggcatgctgtcggccagacggtgtgtcgctgtcgtcgtctcccgggcgggcgagtgtttgtgtcgtctggggttgtgtgctaattctccacggcgctatctgttctctcttggtcccgcggtggttgtgctgtttgttggttggcgcggcattgggcgctctttgtgcgcgtgtcagcgtttagtggggcggctggtgccgcgcacgtagtggttgttggcggcgtggttgtcgtgacgcccacgcgggtgcgcgccccgaannnnnnnnnnnnnnnnnnnnnnnnnnnnnnnnnnnnnnnnnnagtgcaccattgaataaagtgagcatctgtgtattgtgtgctgtgccctactttatttcatttgttcaaataaaatttaaatctgtacaaagtatactgttacagtatatattttgtaagaatcaatgcctaaaataatcacaatacttcaataagcagtacagcagacctcgctagttttcagctttgatattgaacaaactcaagccggctgatgcacaacacgtttgcttggtttccacatggtgatttcccagcactgagatgggagaacatgacagcaaatatggtaatattacagcccgacacactgcgtttcttcatgtgataataactgcacatatttaatacagaatgctcaaatttactttttaaattgcatttgcttacttcttagttggcaaaattcagcattcttaaatggggtccccaatacagtgcaaattaatgatattctaactgtatattggcacatctccaataaggattaacttgtaaactcaaagaatatcaacaacttagtcctaaattttaactaatatacatctggtccatttaaccaaagtcattttggaaagatattaaagaacaattctatttctgaaaggatattgttttgaccattcttt

SEQ ID NO: 69789 - DNA, 604 bp, Homo Sapiens
gtcagatattctggggttaaagtcacatcatatgtgaggaggaaaagtttaacatgaactaacatttctgcactgtaacgtgccgggcacacactaaactcagttactgtacctacaggtaagtctacatcctctctgacagccacagcactacatcaatcccttgacgttagggatacctcatgacattttcctgtttttatggaaactctgagaagctgaatgatacatgcaggggatattttttgagatgatttaaatgtaaaccaaaagatggaagacaaaaagacaaacacacccacacgcagtctttgcagtatctgacagagaactcacaggaagttacttcaagcacttgccagtactatgatattcaagtaccttgcagcatttctctgccattgctttcaatgaggccagaggcatcctggatattagacctattatactgtaagaatataagtataaagtgcgttcatatacatgtgaggttttcttttgcttgagtggacagtagcacctgtatcattgaactcattttgtatcagagcaattttgcttgcagaaagctatgaaataaaacacgtcccttaactgcaaaaaa

SEQ ID NO: 69790 - DNA, 790 bp, Homo Sapiens
gctggtcagaaagccatttaatccataaacacaaagacacatgaatgggcaaattctgtaaatgaaagcaatctggcaaaagcccttggtggtgagcttggtctccctcacaggcaatgacagtcttggccatgggtctagacaacacacaattccaatgcagcctaggaggacattatggaagtgagctgggagaaccaatgatgcagaaagtagactcaggagaggcacagagaatgcaccccctgccccaagtgcagtggatcagagagctcagaacagagaagagatgaggagctcatggcctctcgtagcctagcctagagcacacttactgctcactatcttattgtccatcattttaagtcaaacatccccagttcagtgagagtgtacattctccaatattacacacataaggaaagatggggtaacccctaaagcctgaatgagaaaaagcttccaggagctgtttttcagatacaccaacatatatttgccaagggcaggcactgtgtttctccaggcaggcggtaaggcctttgacagggtttccaggaagacacatagcagccagagagttgtgcagccccaaccctggctccacacagagcaaacatgtaacagattaaatatttatctattgtcctgtctacctcaataaaatatcacactcctttaagcggttgccttaatgacatttgtgtgtcttggaatgacagcctgtgctaacaaattgcatctcaagatgtgaaaacatgaagatcaataaaaagaaatgaaaagttgg

SEQ ID NO: 69791 - DNA, 1595 bp, Homo Sapiens
  misc_feature (70)..(70): n is a, c, g, or t
  misc_feature (74)..(74): n is a, c, g, or t
  misc_feature (104)..(104): n is a, c, g, or t
  misc_feature (113)..(113): n is a, c, g, or t
tgtccttttgcttttgacacagtttcaggatagggagaagcctttagtccgtcttcttgacacagcctcntacntgtacgcttgtgcttcgcttgtttagacanccagacacnttgagatatgctgtcctcagaatgtctgatgaaaagaacagattcacttttttgacacattgcccattagccatctttggcagtgtttctgatcaaaggttccccatgcctgctctaggaaagtaaacttttttcagaataaatcctcaaatggattactgagtagtctttgcaccattcccatcagcctaatcagactgaatggtcacgctcagtgcaaaaagctgttttgctgttaggatgtttcagtgtttcttgtctttcctggaacagttcagttgtttaaatttagtaattcaatcctgaccagtgtaaacccacttaattattgcagcctaaagaattcagctacttctactcttcataaatgtgcccaagtaaatatgtgtttttaatattcaaccctggaaaattagtaattcagatgataaaagctcatgttttggtgtctttgtactcagattgtgaacaggcatatttcactgatttagacttagtatacttgatgagaatgctcaggttgaagagatagttctgtcagcaatccaacatctatagcaatgtggaaaaagtaatcaactcatatttcacgaatttgatgtatgttgtgatttagagggcatgagataaagtttatatttgaactgtgtggggtagggggaagaagaggttgcttaagcaaatagtggggtgattgtggaacaagatgtctctaagatgagaagttattttcttgcatcatagaagcactctttttacccgtgagtgattgtgttaactataaatcatttatatctgtacattaaagcagattccctcaattaggcaaatttggttagccaagcccaagttattgtttgtacttgaaagtaataaagctgcatttccttaaaaatatattctgtagttaagactttgtcttgctttccccccaaccacttcagacattttatccaaccaatgcagggacttttcaaaagtcagtgtgtttttgaaaatagaacaaccccttgagtgatctgaggtggctctgtttttttactgtttctgcatcttctagaaggtaaactcaacagatataaccatttctgaaggtgatccaaaaagcaaaacaataaaggtaaaacacaaggaaataattttggtgaatttcatgaatagttgcaaatgaacgggatggggtgggtaaaagtcccattgtgcttccagaccttggaatagtcgttcctctcttatgcccaaggatgtgtcgatccagcacatctttgcagtgagttgctttgcttactaacttaaacttacggggcttctgtgtcgatttgagtaccacaggcctgcacctttgatcccctgacagcatcattaagggcagatgtcattcctgttttacagatgagaaagctgtggcttggtaaagtgattcatgcctagaggagttatagtaagtggtgaggctgaagccctgatatagacccaagactg

SEQ ID NO: 69792 - DNA, 836 bp, Homo Sapiens
  misc_feature (443)..(481): n is a, c, g, or t
gtagacagttttctctcctgctgtaaccattgtcctcatgctgccatgaatccttggtcatggcatgacttttactggcttcatagttgggtggttctggcttggccatgaccaaccgatgctgtgtctgtccctcatccttgcaggcattcgtccctacaaatgcaacgtctgcaataaagccttcacccagcgctgctctctggagtcccacctgaagaaaatccatggggtgcagcagcagtatgcctataagcagcggcgggacaagctctacgtctgcgaggattgcggctacacgggccccacccaggaggacctgtacctgcacgtgaacagtgcccatccgggcagctcgtttctcaaaaagacatctaaaaaactggcagcccttctgcagggcaagctgacatccgcacaccaggagaataccagcctgagtnnnnnnnnnnnnnnnnnnnnnnnnnnnnnnnnnnnnnnncagacgttcacactgccacgtatgtctacgtggatttttggttttcagcttcccccaccccactggctcttcttaattagaagtgaccagttcacctctgtgtccttttgaaacatcagcagtagggtccattccaagattgtcagttaccgttagtgacgtcaggccctgtaacctgtgtcctgtctggcgcagttgctcacattcaccaaagtttgttttcatgatcctgatggccaagaacaccgtgtgggattttttttcccccaaggattttcacacacggaaggagaggtatttcttagagagatcatcattttatggtgccttgaaataaaaatacttctacttgaat

SEQ ID NO: 69793 - DNA, 1024 bp, Homo Sapiens
  misc_feature (257)..(320): n is a, c, g, or t
gtgaggctgggtgttaatcggcacgagggctgttgggtgagcctgggctccagggcatccctgaccagacgcgcccccgcagcacccggcagctggcacacgtctgacgacctcctggaggagggcgaccgcagcgacacaagaggctgtgccggttgtcctgggcgcacccgaacaaggccttgggaagggcagcgcgccccgcaactgggcctaggccgcctgctccacgacccccccgaggactgccgcagcgnnnnnnnnnnnnnnnnnnnnnnnnnnnnnnnnnnnnnnnnnnnnnnnnnnnnnnnnnnnnnnnnctcgtccccgcacgcccccgagagcgaaacccccgagcccggcgacgccgagggccccgatggacacctggcgaccaagcagcgcccggtcgccagatcgaaaatcaagttcaccacaggcacgtgcagcgactcggtggttcacagctgtgacctgtgtggcaagggcttccgtctgcagcgcatgctgaaccgtcacctcaagtgccacaaccaggtgaaaagacacctgtgcaccttctgcggcaagggcttcaacgacaccttcggacctgaagaggcacgtccgcacacacacaggcattcgtccctacaaatgcaacgtctgcaataaagccttcacccagcgctgctctctggagtcccacctgaagaaaatccatggggtgcagcaagcagtatgcctataaagcagcggcgggacaaagctctacgtctgcgacggattgcggtacacgggcccacacaaggaggacctgtacctgcacgtgaacagtgccatccggcagctcggttctcaaacaggattcttaaaaatggccgcctcttgaggaagctgactccgccacaggaaatccacgctaattacgagagacgactcagcgaagaggcgccacttccctgcagtatttcctggtttcgtttcatccccccggctttttaagcactccccgtcttgcatggcctccgatgtcaaaacgccc

SEQ ID NO: 69794 - DNA, 1150 bp, Homo Sapiens
  misc_feature (340)..(340): n is a, c, g, or t
acggcagtactctaacggtttaaggtagcgaggcctgggtggcgaattcggcacgaggatggccctgttcaagctgctcaacacccacgccaagttctcactcctctctgaggtgagaggcaccatttccccgcaagacctagaacgcttcgaccacctggtgctgaggcgtgagattgagtccatgaaggcgcggcagcccccaggccccggggctggggacacctactccatggtctcctacagtgacacgggttcatccaacaggcagccacggcacctccaccaccgtcagctcggccaggaacactctggacctggaggaaactggcgaggctgntccagggcaatatcaacgccctcccagatgtgtccgtggatgatgtcagatccacctcccaggggctgtcaagcttcaagccactgcctcgcccaccacctctggcccaaggcaacgacctcccactaggccagccaaggaagctggggagagaggacctccagccaccttcctccatgccttcctgctcgggcactgtcttctcggctccacagaaccgcaagcccgccagcgggcaccgcacccaccccagggacctcctctgcacaggacttgccctcttcccccatctatgcctccgtctcccctgccaaccaccagatccaagaggccgctggacgcccatctggccctggtcaaccaacaccccatcggacccttcccacgggtccagtcaaccccgcacctgaaaagccccttctgaagaagccacaggtggctgggggctgccttctgcccccataaccctctggccacccaaaccagacaggcacaaaccagcactctgtcatggtggaggtccaccgccccgacagcgagccagacgtcaatgaagtgagggcgctgccccagacgcgcacagcctctacgctctcccagctctcggacagcgggcagactctaagcgaggacagtggtgtggatgctggcgaggcagaggccagcgccccaggccgaggaaggcagtcggcgtccaccaagagcaggagtagcaaggagctgcctcggaaagagaggcccacagatggggccaacaaaccgcctggacttctggagcccacgtccactctggtccgtgtgaagaaaagt

SEQ ID NO: 69795 - DNA, 1004 bp, Homo Sapiens
  misc_feature (704)..(704): n is a, c, g, or t
  misc_feature (713)..(713): n is a, c, g, or t
  misc_feature (722)..(723): n is a, c, g, or t
  misc_feature (728)..(728): n is a, c, g, or t
  misc_feature (732)..(925): n is a, c, g, or t
aaatagcagcaatccaactttaaaaaaatgcagcactaaaaaaataactagtccttattcccatgcaggactaactgcaggcagcacatttgtatcttgcttaagttttgactttggagtcaagtttttattacaggtgtcatgattgccaatactgtcttctctaggtgaagtatggttgctttgactttggatctaatcaagatagggaaagatcaaaagatttatttctgaagcttgctacagttttctagggtcacattacatctgactttattcccagtcctcttatcctgtgaaggctggtacactaggaaagggatatttaaaaatgtcaagtgtgcatagctaatgctacttaaaagcatgcaacaaaatttgggtaagcatgcttgttaagagtcagtagaagctcttgcatttaagaaaaagatgcatgaaaacattcagacttatttctggcaactggattcactggcacaacataaaataatggtactatactgtaccaacataatggtgaaacaagagtattctccgatcaagtctttgaggaatccacatcaggaggttaaattcctaaatcccttaataagttctcagctaccgaataactacttcaaaaatacatttatgcttcaattttctcttttcttcattaacataatgaaatatttctctttctttctgatttcccctcgtgncgaattccntggctcgannggcanattnnnnnnnnnnnnnnnnnnnnnnnnnnnnnnnnnnnnnnnnnnnnnnnnnnnnnnnnnnnnnnnnnnnnnnnnnnnnnnnnnnnnnnnnnnnnnnnnnnnnnnnnnnnnnnnnnnnnnnnnnnnnnnnnnnnnnnnnnnnnnnnnnnnnnnnnnnnnnnnnnnnnnnnnnnnnnnnnnnnnnnnnnnnnnnnnnncattatgaatcggcacgcgcgggagagcggttgcgtatggcgctctcgctctcgctactgatgctggctggtcgtcggt

SEQ ID NO: 69796 - DNA, 803 bp, Homo Sapiens
agagggatgactatgaccctgactgcaagcttggagtacagcgaggaagatacctaccgacagttccttagacttctatgaggactgtggtgcccgagttcaagaaacgtggggtaaagtgattcagttcaaggtcagctgcaatttggaacctcacctgaggggcaatgtatatgttcagtaccagtcggaagaagaatgccaagcagccctttctctgtttaacggacgatggtatgcaggacgacagctgcagtgtgaattctgccccgtgacccggtggaaaatggcgatttgtggtttatttgaaatacaacaatgtccaagaggaaaagcactgcaactttcttcatgtgttcagaaatcccaacaatgaattctgggaagctaatagagacatctacttgtctccagatcggactggctcctcctttgggaagaactccgaaaggagggagaggatgggccaccacgacgactactacagcaggctgcggggaaggagaaaccctagtccagaccactcctacaaaagaaatggggaatccgagaggaaaagtagtcgtcacagggggaagaaatctcacaaacgcacatcaaagagtcgggagaggcacaattcacgaagcagaggaagaaatagggaccgcagcagggaccagggccgccggagccagaaccgcaggagccaccgcagccggagccaaagttcctctaggtgccgaagtcgtgggaggaggaagtcgggtaatagagacagaactgttcagagtcccaaatccaaataaactagttttgttctt

SEQ ID NO: 69797 - DNA, 852 bp, Homo Sapiens
aaaaaaaattatcaaatttattttaatgtctagtttcatttttaaactgtagctgctagacaattttttgtaatttaaaattcattaatgggtacagaaaacattaataagctgacagtgaattaaatactaacagtgaataaaattattggaccatgcatttataaaagccatgtttaatagtaaaacgttccagttctactaaactgaaagaaacatcctttagctccctacttccaattacagcacattctcattttgatataatttatccttttcacccaatcactactatgcccaacaaaatgtttccaaattttatacctttctttaccacttatgaagtatggcgtaactgttacactttaagagttctttaaaagaaatgtgaaatttaacgttttactttgaacctgtttgatcagaaagtattaaatatcactaccacatgagttaaaacaaagaatgaaataaaaaacaaatggtgtctttgtaatcggcgaattacttgataagacattttaactattttacagttctgcttagcacaagaataaactgggttccaaggtactacagtgtttggcatttttactgcaagctttaaaccatagtgttactcctctcaagccatctctaagaaaatggcagtgtttgtgagtacaaaaattgttctgtccagtaggtggtattctacatagtcgagataagagaattctttataaaattatgttttaaaaaatggaaaatgacttataattaccagctgtctcaaaggctgtaataagaaaaatgcagcaaatagaagtactcattaatattattttgttttgagaaagcagaaatgattct

SEQ ID NO: 69798 - DNA, 745 bp, Homo Sapiens
  misc_feature (483)..(514): n is a, c, g, or t
gcactcattggagaaatagtgagtgtaaaaagagatttattttgtacagacagcaaagtatcctgtgtaatgttgctgacataaagcactttgggggaaaaaagtggaaatctgttttccataaatcacacagactcttgtacatagttatatacactcacgtagagaaatgaactgcatatatcatactggatatggggccgattttactctagaggcacatctggtgcttattgtcataaatcttttaaagaattaggtacacttttttctattaatatgtatagttttgtgatttgtcacagttatgtttcatataatcataagttattttgtcttgttcatgaagtcctttttttatgtcaaaagtaaaatgaagggattgtgcacttggtacagaataaaactggaaatagagaagacgccctcctgcctaaaatcctccttcagcctgtcggtttaaaacacaatggcaaccatcannnnnnnnnnnnnnnnnnnnnnnnnnnnnnnnaccatcagcctcttacatactgggaatggtaattataattaaaggcagatgatgcgggagggaatgttcaagtccagctttaaaatgctgcattgctttgggccagagctgtagcctggatttaattatagatatgaggaggaaatggcagtaaaaatgaatgtctccctgagtcctttacatgttgggagtgtccataaataaaacatgaagttttatttcatcagattt

SEQ ID NO: 69799 - DNA, 1038 bp, Homo Sapiens
ggccggtgtgaatcggcacgaggaaatggcggcaggggtggccgggtggggggttgaggcagaggagttcgaagatgctcctggatgtggagccgctggagcctacacttagcaacatcatcgagcagcgcagcctgaagtggatcttcgtcgggggcaagggtggtgtgggcaagaccacctgcagctgcagcctggcagtccagctctccaaggggcgtgagagtgttctgatcatctccacagacccagcacacaacatctcagatgcttttgaccagaagttctcaaaggtgcctaccaaggtcaaaggctatgacaacctctttgctatggagattgaccccagcctgggcgtggcggagctgcctgacgagttcttcgaggaggacaacatgctgagcatgggcaagaagatgatgcaggaggccatgagcgcatttcccggcatcgatgaggccatgagctatgccgaggtcatgaggctggtgaagggcatgaacttctcggtggtggtatttgacacggcacccacgggccacaccctgaggctgctcaacttccccaccatcgtggagcggggccgggccggcttatgcagatcaagaaccagatcagccctttcatctcacagatgtgcaacatgctgggcctgggggacatgaacgcagaccagctggcctccaagctggaggagacgctgcccgtcatccgctcagtcagcgaaacagttcaaggaccctgagcagacaactttcatctgcgtatgccatgctgagttcctgtcctgtatgagaaagaaaaggtgatcacgagcgggcagtgcagatggccgcgcaatataattgtacagtcgtttcccgaccgaaacctgaaaggtgagcgtcacaaatcgcagttggcaatgggcgttagattccatcggaggcgtgtacctgagggggggcagcaccttcgcccgggctaacccgcaagggccacgaccccccccgggagaccaaacaaggacggggcccaaacaggggctcacaggagcga

SEQ ID NO: 69800 - DNA, 1354 bp, Homo Sapiens
ggttggcgctaccggaacataagagtgattggtgttcttcgtatggtgcgctccgctggatcacgtgagccagttccaaaatggcggcaggggtggccgggtggggggttgaggcagaggagttcgaagatgctcctgatgtggagccgctggagcctacacttagcaacatcatcgagcagcgcagcctgaagtggatcttcgtcgggggcaagggtggtgtgggcaagaccacctgcagctgcagcctggcagtccagctctccaaggggcgtgagagtgttctgatcatctccacagacccagcacacaacatctcagatgcttttgaccagaagttctcaaaggtgcctaccaaggtcaaaggctatgacaacctctttgctatggagattgaccccagcctgggcgtggcggagctgcctgacgagttcttcgaggaggacaacatgctgagcatgggcaagaagatgatgcaggaggccatgagcgcatttcccggcatcgatgaggccatgagctatgccgaggtcatgaggctggtgaagggcatgaacttctcggtggtggtatttgacacggcacccacgggccacaccctgaggctgctcaacttccccaccatcgtggagcggggcctgggccggcttatgcagatcaagaaccagatcagccctttcatctcacagatgtgcaacatgctgggcctgggggacatgaacgcagaccagctggcctccaagctggaggagacgctgcccgtcatccgctcagtcagcgaacagttcaaggaccctgagcagacaactttcatctgcgtatgcattgctgagttcctgtccctgtatgagacagagaggctgatccaggagctggccaagtgcaagattgacacacacaatataattgtcaaccagctcgtcttccccgaccccgagaagccctgcaagatgtgtgaggcccgtcacaagatccaggccaagtatctggaccagatggaggacctgtatgaagacttccacatcgtgaagctgccgctgttaccccatgaggtgcggggggcagacaaggtcaacaccttctcggccctcctcctggagccctacaagccccccagtgcccagtagcacagctgccagccccaaccgctgccatttcacactcaccctccaccctccccaccccctcggggcagagtttgcacaaagtcccccccataatacagggggagccacttgggcaggaggcagggaggggtccattccccctggtggggctggtggggagctgtagttgccccctacctctcccacctcttgctcttcaataaaatgatcttaaactgcaaaaaaaa

SEQ ID NO: 69801 - DNA, 1012 bp, Homo Sapiens
  misc_feature (68)..(68): n is a, c, g, or t
  misc_feature (159)..(159): n is a, c, g, or t
  misc_feature (196)..(197): n is a, c, g, or t
  misc_feature (223)..(223): n is a, c, g, or t
  misc_feature (232)..(232): n is a, c, g, or t
gattgagcgatacattcacacagaacagtatgacagatacgattaatacgactcatatagggaattgnccctcgagccagaaatcgcaacgaggagaatgcagcacacccaagggtgactgcagagaactgctgctcatggaactggctcctctcctcntgccacttgagtctgttcgagaagtccagggaaaacnntgaagagcaaaatacactcttgagtntgtgggttntgggagaggtgacagtagagaagggggttgtgtttaaaataaacacagtggcttgagcaggggcagaggttgtgatgctatttctgttgactcctagcagccatcaccagcatgaatgtgttcgtagggcctttgagtgtggcgattgtcatattctgttggataacaatgtattgggtgtcgattgtcatggggcaggggagagggcagtacacctggaggaccattttgtccacatcgacaccatcagtctgctcttagaggatgccctggagtattcggcgttgattgcggggcacccgaaatcagacttgccacctggactgtcgaggtgcagaccctgggagcaccactggcccatctcttacacaggctgaccgatttctcctggtgttcagagtctgtttttgtctagcaccatttgaaatcggttatgatgtagggggaaaagcagcagcctcgaagcctcatgccaactctgggcagcagcagcctgtggtttcctggaagatggatgggcagagaatagggaaggaagatcatgcttttccctactaacttctgtaactgcatgtatgatacattattgcagaggtaagagatagtttaatggatttttaaaaacaaattactataatttatctgatgttctctagttgcattttgctgaaatgtagtgctgttctaaattctgtaaattgattgctgttgaattatctttctgttgagaagagtctattcatgcatcctgaccttaataaatactatgaacaatttaaa

SEQ ID NO: 69802 - DNA, 1051 bp, Homo Sapiens
  misc_feature (25)..(25): n is a, c, g, or t
gaccagctgacatgctacgaattanacgactccttagggaaatgccctcgaggcaagaatcgcccgaggaaaaaagtgagatggacttcacagcaaagtgtctcagaacaaaaggacactctggcaacacccagataagcagaaaagcagccccggaacaaaggcaagttgtcaccaaagaccaagccaactgcagatggctgctactgagcaggaggagggcatctctctcaaggttgagtgcactcaaatggaccatgaatttccctgtgtctttgctggcaatccaacctcatgcctaaagctcaaggatgagagagtctattggaaacaagttgcccggaatctgcgctcacagaaagacatctgtagatattccaagacagctgtgaaaaccagagtgtgcagaaaggattttccagaatccagtcttaagctagtcagctccactctatttgggaacacaaagcccaggaaggagaaaacagagatgtcccccagggagcacatcaagggcaaagagaccaccccctctagcctagcagtgacccagaccatggccaccaaagctcccgagtgtgtggaggacccagatatggcaaaccagaggaagactgccctggagttctgtggagagacttggagctctctctgcacattcttcctcagcatagtgcaggacacgtcatgctaatgaggtcaaaagagaacgggttcccttaagagatgtcatgtcgtaagtccctctgtatactttaaagctctctacagtccccccaaaatatgaacttttgtgcttagtgagtgcaacgaaatatttaaacaagttttgtattttttgcctttgtgttttggaaattgccctatttttcttggatgcgatgttcagaggctgtttcctgcagcatgtatttccatggcccacacagctatgtgtttgagcagcgaagagtctttgagctgaatgagccagagtgataatttcagtgcaacgaactttctgctgaattaatggtaataaaactctgggtgtttttcagaaatacattca

SEQ ID NO: 69803 - DNA, 1959 bp, Homo Sapiens
  misc_feature (168)..(211): n is a, c, g, or t
  misc_feature (1229)..(1229): n is a, c, g, or t
  misc_feature (1231)..(1319): n is a, c, g, or t
  misc_feature (1483)..(1491): n is a, c, g, or t
  misc_feature (1632)..(1644): n is a, c, g, or t
gggcttgtgaatatgaacagtttgttcaaaaaagcaggctggtaccggtccggatttcccgggatatcgtcgacccacgcgtcgaagcggaagttaaaaaaggcagaacggggggatagactcccacctcctgggcctccccaggcaccccccagtgatacagactcnnnnnnnnnnnnnnnnnnnnnnnnnnnnnnnnnnnnnnnnnnnntggcaacagtggtagggggtgaagccccagtccctgtgctgccaacaccccctgaggctcctaggccccctgccacagtgcaccctgaaggagtccctcctgctgacagtgaaagcaaggaggtgggcagcactgaaacaagccaagatggagatgccagctccagtgaaggcgagatgcgggtcatggacgaggacatcatggtagaatcaggtgatgactcatgggatctgatcacatgttactgtcgaaagccctttgcagggcggcccatgattgagtgcagcctgtgtgggacgtggatccacctctcctgtgctaagattaagaagaccaacgtccccgacttcttttattgccagaaatgcaaggaactgaggccagaggcccggcggttaggggggcctcccaaatctggagagccctgatggcaccaactttagcctggaacttccaaatgacaacatgatttgggaactgagcctcagggtcctcagcctatcccctggagcttggatactgtctgcacttcaaggcaggaattctcaagggagacttgtttgaaaatgagtgtctcactttcccaccctatccttcctccccactctgtggacttgaaattgaatccattacggttggggatgggaggctgtctgtgtcccgacacataatctctgtctcttggacctgccaccatcactttctgggtcaggattggaattgggatggaatgggacagttgtctataaaactctagtgtaaatattagcactcccctccctcatcttttcttctatttcactccccatttattttcttctacaccggttgtatttttaattttggacttcccctattgggcatggcagctcaaaggtggagtactagagcctggccaagtgaggaaggaaagcagaaaggtgacgattctcactcacctcttttgtttttaataatatcggccgctgtttgtacagacagcctgcgtgttgtaaataaagcagagtgggctctttantnnnnnnnnnnnnnnnnnnnnnnnnnnnnnnnnnnnnnnnnnnnnnnnnnnnnnnnnnnnnnnnnnnnnnnnnnnnnnnnnnnnnnnnnnttcttgggcggccgccctcggcccttgaaaaagtttctctaaaccattccgttggggcgcgccgggccccaagaagggaaagtgaaacatgggccatagcgtgttttcccaaggaaaaacccgggggcaatgaacaaagggccttgggaattcctcacacgatnnnnnnnnncggcccgggggggaaacccgaagggttcttttgaaacaaatccccaaaatggggaagttccgaggagggccatgttcgggggattctttccaaccaggggggcccccaaggcggagcctcaaaaaattcaatatttacggnnnnnnnnnnnnngtggcgccctccctttggaaaagaaaccgggggggaaaattccctttttagaggacttttccggggcgccaaaaattgggaaaagcccccctcgcaaaaaaagggggggtgtggggtgaaaaccctcgaaaatttccgagcccagcggggggtttcccaaaccccctctttggtccgccccttgtgggaggaaataaattatttgggcccccccgggtggggggaaaacaaccgggggcggccgacaaacaaaaagtgtggcccccaaatatgtgggggccaccacgcttttaaaaagccgcaaaaaggcgcggg

SEQ ID NO: 69804 - DNA, 586 bp, Homo Sapiens
gctcaaagagaccaacatttggactgtatctgaaaaatttaatatgcctcgaggatatatacaaaatcttctcactggaactgcctcattctcatcttgtgtgttacatttctgtgaggagcttgaggagttttgggtttacagagcccttttggtagaacttaccaagaagctgacttactgtgtaaaggcagaattaatccctctcatggaagttactggagttttagagggtcgagcaaaacagttatacagtgcaggttacaaaagtctaatgcacttagctaatgcaaatcctgaagtgctcgtaaggacaattgatcatttatcaagacgccaagccaagcaaattgtttcatcagcaaagatgctgttgcatgaaaaagcagaagccctgcaagaagaggtagaagagttactaagattgccttctgatttccctggtgctgtggcttcttccactgacaaagcatgaagctatctgatgagaattttcatatatgaattatttattgtacatgtgtgttattaaagataacttatactttataaatgaaaaaatacatttcagttatacattaaaaaa

SEQ ID NO: 69805 - DNA, 768 bp, Homo Sapiens
  misc_feature (96)..(96): n is a, c, g, or t
  misc_feature (126)..(126): n is a, c, g, or t
gtaaatacgtggcacagcactgcagaaaaagcagtcacctctattcgtgagtccccaagccatagcagggcgtctgtaaaagaaggaaactgcacncaggaagtggtgggcgtcagacgcatcctntcgcccgtagttcatgaaatagttccggctttgtcttccagaaaatctcaacttcaccgtgcacaagtgttaccgggtctttttagtgtagccatggaagatactttcaaaaggacatcttcagatcataagtcttaggaccaaaggtgtttttaatgagataatctttttgattttctaacaagaaaggaaatattcactttacattttaacatcaacttttaagtgatattcagaattaattgaccatggtgatacgttgtaaaatgttttcatattaagaatgtaattatttccttattgtattttttaaaagctaaagtcatatttaaaattctctttgaaagaaacaggcaaagaaacagcaaagatttttttaaattaaatatgttagtagtgcccacttcaaatgactgtaaatatattttcactgtttctcaatgtatttaattcataaagtaaaaattttatgaaaagaaacttgcaaggaaaatcctagttttcagtccactcgccccactttgtagtagcttcactgaatttcctgctttcctggttgaattttctactgtttcacgtggtgtaaccctagactggcgcccttggcgtgcccctttgtgtatgaataaacttctctccccc

SEQ ID NO: 69806 - DNA, 2155 bp, Homo Sapiens
  misc_feature (41)..(75): n is a, c, g, or t
  misc_feature (1897)..(1906): n is a, c, g, or t
  misc_feature (2061)..(2080): n is a, c, g, or t
taacgaagagcgcaggagtcattgagcgaggaagcggccgnnnnnnnnnnnnnnnnnnnnnnnnnnnnnnnnnnncagtcgacggtaccggacatatgcccgggaattcggccattacggccgggggactccagtttatgccgccgccggagaggacgggcgccgagccggggctgcggacttcggcctgcccctcacctcactcccgctgcttgcacctcccggatggtgctgactgctccctaagcggcggctggcggcgagtcagtgaggatcgcgccgcggaggctgttcggggtcgaggcttcccgtcgccggcacttcctcttgcggcgcccgtgcgcgtgcggcccggcaggcgggatggcggcgcgtgctccagggaacgagcgcgcatcggcgccccggctgcttctgctctttctggttccgctgctgtgggccccggctgcggtccgggccggcccagatgaagaccttagccaccggaacaaagaaccgccggcgccggcccagcagctgcagccgcagcctgtggctgtgcagggccccgagccggcccgggtcgagaaaatatttacaccagcagctccagttcataccaataaagaagatcctgctacccaaactaatttgggatttatccatgcatttgtcgctgccatatcagttattattgtatctgaattgggtgataagacattttttatagcagccatcatggcaatgcgctataaccgcctgaccgtgctggctggtgcaatgcttgccttgggactaatgacatgcttgtcagttttgtttggctatgccaccacagtcatccccagggtctatacatactatgtttcaactgtattatttgccatttttggcattagaatgcttcgggaaggcttaaagatgagccctgatgagggtcaagaggaactggaagaagttcaagctgaattaaagaagaaagatgaagaatttcaacgaaccaaacttttaaatggaccgggagatgttgaaacgggtacaagcataacagtacctcagaaaaagtggtggcattgtatttcacccatttttgttcaagctcttacattaacattcttagcagaatggggtgatcgctctcaactaactacaattgtattggcagctagagaggacccctatggtgtagccgtgggtggaactgtggggcactgcctgtgcacgggattggcagtaattggaggaagaatgatagcacagaaaatctctgtcagaactgtgacaatcataggaggcatcgtttttttggcgtttgcattttctgcactatttataagccctgattctggtttttaacaagctgtttgttcatctatatttagtttaaaataggtagtattatctttctgtacatagtgtacattacaactaaaagtgatggaaaaatactgtattttgtagcactgattttgtgagtttgacccattattatgtctgagatataatcattgattctatttgtaacaaggagttttaaaagaaacctgacttctaagtgtgggtttttcttctctccaacataattatgttaatatggtcctcatttttcttttggtgcagaaccgttgtgcagtggggtctaccatgcaattttctttcagcactgacccctttttaaggaatacaaattttctccttcatcacttaggtgttttaagatgtttaccttaaagtttttcttggggaaagaatgaattaatttctatttcttaaaacatttccctgagccagtaaacagtagtttaatcattggtcttttcaaaactaggtgtttaaaaaaagagacatatatgatattgctgttatatcaataacatggcacaacaagaactgtctgccaggtcattcttcctcnnnnnnnnnnaattgggtaggacacccaatataaaaacagtcaatatttgacaatgtggaattaccaaattaaaagagaatactatgaatgtattcatattttttctatattgaataaacaatgtaacatagataacaatataaataaaagtggtatgaccagtnnnnnnnnnnnnnnnnnnnngcctacagccgcggccgcaagcgtattccctttagtgaggataatttgagcatgacactggccgtcgttaccacc

SEQ ID NO: 69807 - DNA, 797 bp, Homo Sapiens
  misc_feature (131)..(131): n is a, c, g, or t
  misc_feature (270)..(281): n is a, c, g, or t
  misc_feature (447)..(461): n is a, c, g, or t
  misc_feature (611)..(622): n is a, c, g, or t
aatggatataacagtgttaaaaaagcaggctggtacggccggaatcccgggatatcgtcgaccacgcgtcggctcaacttacacttggttactcaaaagaacaagagtcaatggtacttgtcctagcgttntggaagaggaaaacaggaacccaccaaaccaaccaatcaaccaaacaaagaaaaaattccacaatgaaagaatgtattttgtctttttgcatttgtgtgtataagccatcaatattcagcaaaatgattcctttctttnnnnnnnnnnnntgtggaggaaagtagaaatttaccaaggttgttggcccagggcgttaaattcacagatttttttaacgagaaaaacacacagaagaagctacctcaggtgtttttacctcagcaccttgctcttgtgtttcccttagagattttgtaaagctgatagttggagcannnnnnnnnnnnnnnaataaaaatgagttggaaaaaaaataagatatcaactgccagcctggagaaggtgacagtccaagtgtgcaacagctgttctgaattgtcttccgctagccaagaacctatatggccttcttttggacaaaccttgaaaatgtttatttnnnnnnnnnnnngatgacaaagaaaaacagagagagagaatattggagatgtcctgaattttaatagggtacgcgccattagggctttttgcgctaaaggatgaacatgtactggtttatgtggacaagccattataccaccagactgcaatgccagtttcctctactgcaaacagtgttctgtgac

SEQ ID NO: 69808 - DNA, 509 bp, Homo Sapiens
cgcgcatcggcgctccggctgcttctgctctttctggttccgctgctgtgggccccggctgcggtccgggccggcccagatgaagaccttagccaccggaacaaagaaccgccggcgccggcccagcagctgcagccgcagcctgtggctgtgcagggccccgagccggcccgggtcgaggtgagcgggccgggatggggcgagcgaggctgcagggccggctgcgccgagtaccaggctccaggcctttgaaagcgccgcactccgccggcctcggctgggggaggggagcccggcccctgctcccggggtggagggcggtcggctgcgctgttttccggtgaggcctggtcttgcccgctcctttagggaaagggagagggagagtccaagaggagcccgctataaacgttgatctccggagggccaagatgctgctccgggatgggcgttttattgatcagatgtgtcttagagtagctagaaagactcatccctaccaaaaagtt

SEQ ID NO: 69809 - DNA, 798 bp, Homo Sapiens
  misc_feature (519)..(549): n is a, c, g, or t
gttgcccaggtaatcatagagaagctaaggctgaagtctgcatcaggctctgaggtccgggacaagctagatactcatcaggacttgatcatgcatcagcaggaagaggagcagaagccccggctcctcattggtttaagtgtgggcgacaaagaaccctggcaagaagtccatctttggcaggcgcaaatgatttggcgattcgagtggctgcagtacaggatctgactctggctcaggctccagggacttgtggggtgggaggggcttcccgttatccacgaggatttgtgggtgtcagagcccataggcatcactcttcagcacctggtctgttcgctgcagggcatggtggacagtaatgctgagttctgtctcacactgatcaggctcagggccagagaggcaacaagagagcaagacccagggaatgggcccagggcaggaccctattcccttggggtcaagtgaaagggtagggggatagtcctgatcaagtgtgataaatttttatagacnnnnnnnnnnnnnnnnnnnnnnnnnnnnnnnttctaagtgtaactgtccttcctctgtgccaggaaacgggagggggctgatcctctgatcctcactccactgtcatgtttgaaagaggtattggtgttctggagtgggggtcaacccctccccagtctctgtgctaagttcacttgggaggatggcagtaggagccagggctggccatgggtcccctacccttccccgtaggatataccctggagaatggcaaaatgatttaaagagaaaaaatatgat

SEQ ID NO: 69810 - DNA, 1266 bp, Homo Sapiens
  misc_feature (177)..(207): n is a, c, g, or t
  misc_feature (1202)..(1203): n is a, c, g, or t
catcctttccccaaggggaacttagcccccggaggattgggggaaggggtttgacccccccctttccggggacccccaatacctttctttcaaaccatgacagtggagtgaggatcagaggattcagccccctccacgttttcctggcacagaggaaggacagttacactttagaannnnnnnnnnnnnnnnnnnnnnnnnnnnnnngtctataaaaatttatcacaccttgatcaggactatccccctaccctttcacttgaccccaagggaatagggtcctgccctgggcccattccctgggacttgctctcttgttgcctctctggccctgagcctgatcagtgtgagacagaactcagcattactgtccaccatgccctgcagcgaacagaccaggtgctgaagagtgatgcctatgggctctgacacccacaaatcctcgtggataacgggaagcccctcccaccccacaagtccctggagcctgagccagagtcagatcctgtactgcagccactcgaatcgccaaatcatttgcgcctgccaaagatggacttcttgccagggttcttgtcgcccacacttaaaccaatgaggagccgggctttctcctcctcttcctgctgttgcatgttcaggtccgatttagtttctagctttccccggacctcagagcctgttgcagacttcagccttagcttctctttgattacctgggcaaccagggctttgcggctgtcccttttgacagccatggcaaagtctagccatgtccatgtgttgttgtggtactccagacagggcagcaccaggttaaggtcaccccagtccacactgttcttctcacccttgtagctgacacacagtggaacctgtggaatctttatgtagatgaaggagttgttcatggcagctcgctctttcatcttgtcaatgtcatccacagggtgctctggcgatttgcgaaatgaccttctgaccccagaactccgagtcaaaccctgtgccacacccttcccagggcccagtggtactgcatcatctgttgcaatcagctgccgaggcttcaccactggtattccagtagtcaccagtttggacttatcctcttcatcaccaacttcatcatcttccacacttcggccaggaaagaaaaagcccatcattctgtggaagaactggtgtgtcagctggatggnntgagaggcaccaccatttacctcaaaatgctccttaacagagatacccccaacagggggcccc

SEQ ID NO: 69811 - DNA, 891 bp, Homo Sapiens
tcattatataagcttcagtggtacagatgaaccagaatgaatgtttatcttctcagaaacactccttcaatattatattggatcatgctgctaatgtaacttgggctacaactcttcatggtgctacaaacttctctgtctcattcagtcgtatttttttatccatagaaaaaggactacattaggtgtaaaagtgtacaatatatttttatactgtgacttaatttgtcattaacaaacttttacaccaccacaatgtattcatgtgcacttgcaaaaggagatctcggacatgcaaatgttaccagaacaaacccagcttttgtccacaaggtgactgtaactcagaatggaaagtgggctttataatagggtgtggagtgaagaacatgctgtatgttactaacagccctttgaatttaacaaaaactgggaatccattaggaaacggattgcatcatacctgaacataagctggactgctgaaattgtatttttagctaatgaaaaagtgtttggactagtactctaaaaatgttctaatgataaagttttgagtcaaaatagaaaagaaaaaaatctgcattccaggccgaattttgtatatttttattgcatttaaaattgctattctgtaatattgggaaatcaagtggcttatcatgtatatcgtgtacttaaaatgtattcacaaactactgttgtatttgtataaaatatagacaaagatcatattttttgtgtgtgtataagctctgtaaaatagcaatcacattatgaagctgcagtgatactacattttaaacattcacatccaaagaagcagactatttattgtccatataccagatttaaaatattaatttgctgctaattaaataatagtactgc

SEQ ID NO: 69812 - DNA, 1847 bp, Homo Sapiens
  misc_feature (257)..(274): n is a, c, g, or t
  misc_feature (977)..(994): n is a, c, g, or t
  misc_feature (1145)..(1145): n is a, c, g, or t
agcagctatccacaaagcttcctgccccagagctgaggctgaggccccgagagaggcggcccgtacccaaacactggctgctggcattccaccaagtgaccccaggggccaggccttcgatcacccacctcccatccatgcacacaccaggatgcagctgccaacttcacaccagccccaacccgctttgggggagcttagccccctgcgtcacccactccctgcacttctgctgcaatcaaggtggttctggtgcnnnnnnnnnnnnnnnnnngaggccttgtggccaatgggggaccccccaagagccagcttggacaatgctcttcttgccccttagttactggctggctgtggcttcagtggtgtgtaagcaggtggaatactcacccaccaagctctggggtaccccgagggcctgacaagaggatggggtgggggtggcatcctccaaagaccagcctccaccccccactccagcctcagcggggccccagcgatgttttcttgttgtacaagaaccaggtccgagtgttgcctcctcttccttccggaagccaaactgctcctttattttttagagctgctgattgtgaatctcagagtcttaagagagaagccaaatatattcctcttgtaaatgaagaaataaacctatttaaatcaccccctgggtggctccctcacagcaaaaaagcctgggggcaaagaggtggcaggcacgagagatggtcacacctgcctgcagccagcacatcaacctgcaccaacccaggcaaacaccagagccctggacatggccctggagccagggtcccagcccagaaccgggggtggggaggtctctgcaccctgggacccctgcaggaatggctcaggctgtgcttgccagagcaggatgcccgggcaggcggcaacagccaccctccccagtggcagcgccttagaaacagcttgcgtattaaaatcatggtttnnnnnnnnnnnnnnnnnntaggcgtctcaggcagatggaggcaggggctgaggggggcccgtacctgtgctcagggcttccctgccttcctcacctgtgctttcttcttggccccactctgaagcaggctgggactcctgatgaccaaagacagccttgcctttttccngtgccagcgcggacagtggtgatttgcccaagaccccctttttgggaagagccttctgatgctgcttttggcctgcaggttccgtgggggacccgggagctccattcacctgggacggcttctggtttttcttctgcagttttggggatttggcaggggtgctggggctccgggtgggggcgccaggggctggactcttggtggttggcgtcccgtttgcctgggctgggaccttagcctttgtcctgttcctcttcttcctgcccatgctggggggctggctcccgccggtggctgcaggtgtgccatcctccgctggcgtgccatcctctgacttgcgtttcttgcgcttcttcgtctctggcaagaatccctttttcttccgcttcttactgatggggctctgggtggcactggggatctccttggcatccttcttctccaacttggggcgctggactcccagggttttcatggcctgccagtagaggtcgtgcaggcggctggagccggtggagtgtgccccctgctgtaggctctgctgttgcccctgcagcacacccaggagcaccgtcaggtccaaggtcagcttctcatgtttgcaggtcctgaagagaacgttgagcagctccagggaggacagtgcctgctgatgctgcgccttggtctgcgcctcccccagcacgcgcaagttctagggaa

SEQ ID NO: 69813 - DNA, 577 bp, Homo Sapiens
agccccatcagtaagaagcggaaacgaaagggatcttgccagagacgaagaagcgcaagaaacgcaagtcagaggatgccacgccagcggaggatggcacacctgcagccaccgcgggagccagccccccagcatgggcaggaagaagaggaacaggacaaaggctaaggtcccagcccaggcaaacgggacgccaaccaccaagagtccagcccctggcgcccccacccggagccccagcacccctgccaaatccccaaaactgcagaagaaaaaccagaagccacccccggttctgggctgggaccctggctccagggccatgtccagggctctggtgtttgcctgggttggtgcaggttgatgtgctggctgcaggcaggtgtgaccatctctcgtgcctgccacctctttgcccccaggcttttttgctgtgagggagccaccagggggtgatttaaataggtttatttcttcatttacaagaggaatatatttggcttctctcttaagactctgagattcacaatcagcagctctaaaaaataaaggagcagtttggcttccggaaggaaaa

SEQ ID NO: 69814 - DNA, 614 bp, Homo Sapiens
  misc_feature (181)..(211): n is a, c, g, or t
aaattttgtagccattcttatgatgctcttgatttgttggttacacaaatcaattttattaaaaatccaaagataagtctttaggtatattttgtaccaaattaaattagaagacaaaaattgtgctttcatagttgctacaaaggtaaataatggagagatttggtacaaaacaacaaannnnnnnnnnnnnnnnnnnnnnnnnnnnnnngctgataaaattacctgaggagtgtaatgcttatttttttgtgtatatctttgcaatctattttatatatattgacaaaagagactgtgaaatacttagccatgcagaatatgtgaccagaccagagcatgtgtaggaagactttacagtaatcattaactctaccccgaaatgatggactacaagttataatgtgtgttacctacacttcaatcagtaatattagcaaatctccaaatgttagtcacattggtttgtctcccttgtacattctttattcatgatattacagtgctgtaactgggtggtcctttttaaacaaaacattatttgcaaaacagagggtattatttgtttttaaagcttttgtaaataaaggcttcaaaatgttttcttataaaaa

SEQ ID NO: 69815 - DNA, 1548 bp, Homo Sapiens
ggggtgacaagggtgaaccaggcggtccaggtgctgatggtgtcccagggaaagatggcccaaggggtcctactggtcctattggtcctcctggcccagctggccagcctggagataagggtgaaggtggtgcccccggacttccaggtatagctggacctcgtggtagccctggtgagagaggtgaaactggccctccaggacctgctggtttccctggtgctcctggacagaatggtgaacctggtggtaaaggagaaagaggggctccgggtgagaaaggtgaaggaggccctcctggagttgcaggacccactggaggttctggacctgctggtcctcctggtccccaaggtgtcaaaggtgaacgtggcagtcctggtggacctggtgctgctggcttccctggtgctcgtggtcttcctggtcctcctggtagtaatggtaacccaggacccccaggtcccagcggttctccaggcaaggatgggcccccaggtcctgcgggtaacactggtgctcctggcagccctggagtgtctggaccaaaaggtgatgctggccaaccaggagagaagggatcgcctggtgcccagggcccaccaggagctccaggcccacttgggattgctgggatcactggagcacggggtcttgcaggaccaccaggcatgccaggtcctaggggaagccctggccctcagggtgtcaagggtgaaagtgggaaaccaggagctaacggtctcagtggagaacgtggtccccctggaccccagggtcttcctggtctggctggtacagctggtgaacctggaagagatggaaaccctggatcagatggtcttccaggccgagatggatctcctggtggcaagggtgatcgtggtgaaaatggctctcctggtgcccctggcgctcctggtcatccaggcccacctggtcctgtcggtccagctggaaagagtggtgacagaggagaaagtggccctgctggccctgctggtgctcccggtcctgctggttcccgaggtgctcctggtcctcaaggcccacgtggtgacaaaggtgaaacaggtgaacgtggagctgctggcatcaaaggacatcgaggattccctggtaatccaggtgccccaggttctccaggccctgctggtcagcagggtgcaatcggcagtccaggacctgcaggccccagaggacctgttggacccagtggacctcctggcaaagatggaaccagtggacatccaggtcccattggaccaccagggcctcgaggtaacagaggtgaaagaggatctgagggctccccaggccacccagggcaaccaggccctcctggacctcctggtgcccctggtccttgctgtggtggtgttggagccgctgccattgctgggattggaggtgaaaaagctggcggttttgccccgtattatggagatgaaccaatggatttcaaaatcaacaccgatgagattatgacttcactcaagtctgttaatggacaaatagaaagcctcattagtcctgatggtttctcgt

SEQ ID NO: 69816 - DNA, 2112 bp, Homo Sapiens
gtcttgagagagtatgaagtcgacggcgcgccgaattcggcacgagggccaaaggtgctcgcggcagcgctggtccccctggtgctactggtttccctggtgctgctggccgagtcggtcctcctggcccctctggaaatgctggaccccctggccctcctggtcctgctggcaaagaaggcggcaaaggtccccgtggtgagactggccctgctggacgtcctggtgaagttggtccccctggtccccctggccctgctggcgagaaaggatcccctggtgctgatggtcctgctggtgctcctggtactcccgggcctcaaggtattgctggacagcgtggtgtggtcggcctgcctggtcagagaggagagagaggcttccctggtcttcctggcccctctggtgaacctggcaaacaaggtccctctggagcaagtggtgaacgtggtccccctggtcccatgggcccccctggattggctggaccccctggtgaatctggacgtgagggggctcctggtgccgaaggttcccctggacgagacggttctcctggcgccaagggtgaccgtggtgagaccggccccgctggaccccctggtgctcctggtgctcctggtgcccctggccccgttggccctgctggcaagagtggtgatcgtggtgagactggtcctgctggtcccgccggtcctgtcggccctgttggcgcccgtggccccgccggaccccaaggcccccgtggtgacaagggtgagacaggcgaacagggcgacagaggcataaagggtcaccgtggcttctctggcctccagggtccccctggccctcctggctctcctggtgaacaaggtccctctggagcctctggtcctgctggtccccgaggtccccctggctctgctggtgctcctggcaaagatggactcaacggtctccctggccccattgggccccctggtcctcgcggtcgcactggtgatgctggtcctgttggtccccccggccctcctggacctcctggtccccctggtcctcccagcgctggtttcgacttcagcttcctgccccagccacctcaagagaaggctcacgatggtggccgctactaccgggctgatgatgccaatgtggttcgtgaccgtgacctcgaggtggacaccaccctcaagagcctgagccagcagatcgagaacatccggagcccagagggcagccgcaagaaccccgcccgcacctgccgtgacctcaagatgtgccactctgactggaagagtggagagtactggattgaccccaaccaaggctgcaacctggatgccatcaaagtcttctgcaacatggagactggtgagacctgcgtgtaccccactcagcccagtgtggcccagaagaactggtacatcagcaagaaccccaaggacaagaggcatgtctggttcggcgagagcatgaccgatggattccagttcgagtatggcggccagggctccgaccctgccgatgtggccatccagctgaccttcctgcgcctgatgtccaccgaggcctcccagaacatcacctaccactgcaagaacagcgtggcctacatggaccagcagactggcaacctcaagaaggccctgctcctccagggctccaacgagatcgagatccgcgccgagggcaacagccgcttcacctacagcgtcactgtcgatggctgcacgagtcacaccggagcctggggcaagacagtgattgaatacaaaaccaccaagacctcccgcctgcccatcatcgatgtggcccccttggacgttggtgccccagaccaggaattcggcttcgacgttggccctgtctgcttcctgtaaactccctccatcccaacctggctccctcccacccaaccaactttccccccaacccggaaacagacaagcaacccaaactgaaccccctcaaaagccaaaaaatgggagacaatttcacatggactttggaaaatatttttttcctttgcattcatctctcaaacttagtttttatctttgaccaaccgaacatgaccaaaaaccaaaagtgcattcaaccctcgtgccgaatcgccacccaggcctcgct

SEQ ID NO: 69817 - DNA, 1642 bp, Homo Sapiens
atggacagcctggtgctaaaggtgccaatggtgctcctggtattgctggtgctcctggcttccctggtgcccgaggcccctctggaccccagggccccggcggccctcctggtcccaagggtaacagcggtgaacctggtgctcctggcagcaaaggagacactggtgctaagggagagcctggccctgttggtgttcaaggaccccctggccctgctggagaggaaggaaagcgaggagctcgaggtgaacccggacccactggcctgcccggaccccctggcgagcgtggtggacctggtagccgtggtttccctggcgcagatggtgttgctggtcccaagggtcccgctggtgaacgtggttctcctggccctgctggccccaaaggatctcctggtgaagctggtcgtcccggtgaagctggtctgcctggtgccaagggtctgactggaagccctggcagccctggtcctgatggcaaaactggcccccctggtcccgccggtcaagatggtcgccccggacccccaggcccacctggtgcccgtggtcaggctggtgtgatgggattccctggacctaaaggtgctgctggagagcccggcaaggctggagagcgaggtgttcccggaccccctggcgctgtcggtcctgctggcaaagatggagaggctggagctcagggaccccctggccctgctggtcccgctggcgagagaggtgaacaaggccctgctggctcccccggattccagggtctccctggtcctgctggtcctccaggtgaagcaggcaaacctggtgaacagggtgttcctggagaccttggcgcccctggcccctctggagcaagaggcgagagaggtttccctggcgagcgtggtgtgcaaggtccccctggtcctgctggtccccgaggggccaacggtgctcccggcaacgatggtgctaagggtgatgctggtgcccctggagctcccggtagccagggcgcccctggccttcagggaatgcctggtgaacgtggtgcagctggtcttccagggcctaagggtgacagaggtgatgctggtcccaaaggtgctgatggctctcctggcaaagatggcgtccgtggtctgaccggccccattggtcctcctggccctgctggtgcccctggtgacaagggtgaaagtggtcccagcggccctgctggtcccactggagctcgtggtgcccccggagaccgtggtgagcctggtccccccggccctgctggctttgctggcccccctggtgctgacggccaacctggtgctaaaggcgaacctggtgatgctggtgctaaaggcgatgctggtccccctggccctgccggacccgctggaccccctggccccattggtaatgttggtgctcctggagccaaaggtgctcgcggcagcgctggtccccctggtgctactggtttccctggtgctgctggccgagtcggtcctcctggcccctctggaaatgctggaccccctggccctcctggtcctgctggcaaagaaggcggcaaaggtccccgtggtgagactggccctgctggacgtcctggtgaagttggtccccctggtccccctggccctgctggcgagaaaagatcccctgg

SEQ ID NO: 69818 - DNA, 2053 bp, Homo Sapiens
agaggatcccctcctccgggagctggtcgttctcaggctctgccaagccctggtgctctggcttggactcctgggaggatagggctctcactaccatttggtgccaactcctgtccactggggtcacctcaatgcagctgaccgacctctcggccttcctggtggggacctttctgtcttttggtgcctggggctgtgaggggcttttgagagatgtggccacacagggcaaccaggccctcctggacctcctggtgcccctggtccttgctgtggtggtgttggagccgctgccattgctgggattggaggtgaaaaagctggcggttttgccccgtattatggagatgaaccaatggatttcaaaatcaacaccgatgagattatgacttcactcaagtctgttaatggacaaatagaaagcctcattagtcctgatggttctcgtaaaaaccccgctagaaactgcagagacctgaaattctgccatcctgaactcaagagtggagaatactgggttgaccctaaccaaggatgcaaattggatgctatcaaggtattctgtaatatggaaactggggaaacatgcataagtgccaatcctttgaatgttccacggaaacactggtggacagattctagtgctgagaagaaacacgtttggtttggagagtccatggatggtggttttcagtttagctacggcaatcctgaacttcctgaagatgtccttgatgtgcagctggcattccttcgacttctctccagccgagcttcccagaacatcacatatcactgcaaaaatagcattgcatacatggatcaggccagtggaaatgtaaagaaggccctgaagctgatggggtcaaatgaaggtgaattcaaggctgaaggaaatagcaaattcacctacacagttctggaggatggttgcacgaaacacactggggaatggagcaaaacagtctttgaatatcgaacacgcaaggctgtgagactacctattgtagatattgcaccctatgacattggtggtcctgatcaagaatttggtgtggacgttggccctgtttgctttttataaaccaaactctatctgaaatcccaacaaaaaaaatttaactccatatgtgttcctcttgttctaatcttgtcaaccagtgcaagtgaccgacaaaattccagttatttatttccaaaatgtttggaaacagtataatttgacaaagaaaaatgatacttctctttttttgctgttccaccaaatacaattcaaatgctttagtcccattttttttaccaattccaatttcaaaatgtctcaatggtgctataataaataaacttcaacactctttatgataacaacactgtgttatattctttgaatcctagcccatctgcagagcaatgactgtgctcaccagtaaaagataacctttctttctgaaatagtcaaatacgaaattagaaaagccctccctattttaactacctcaactggtcagaaacacagattgtattctatgagtcccagaagatgaaaaaaattttatacgttgataaaacttataaatttcattgattaatctcctggaagattggtttaaaaagaaaagtgtaatgcaagaatttaaagaaatatttttaaagccacaattattttaatattggatatcaactgcttgtaaaggtgctcctcttttttcttgtcattgctggtcaagattactaatatttgggaaggctttaaagacgcatgttatggtgctaatgtactttcacttttaaactctagatcagaattgttgacttgcattcagaacataaatgcacaaaatctgtacatgtctcccatcagaaagattcattggcatgccacaggggattctcctccttcatcctgtaaaggtcaacaataaaaaccaaattatggggctgcttttgtcacactagcatagagaatgtgttgaaatttaactttgtaagcttgtatgtggttgttgatcttttttttccttacagacacccataataaaatatcatattaaaa

SEQ ID NO: 69819 - DNA, 797 bp, Homo Sapiens
ttacggtcctaggtagcgaggcctgggtggcgaattcggcacgagggcctggtccccccggccctgctggctttgctggcccccctggtgctgacggccaacctggtgctaaaggcgaacctggtgatgctggtgctaaaggcgatgctggtccccctggccctgccggacccgctggaccccctggccccattggtaatgttggtgctcctggagccaaaggtgctcgcggcagcgctggtccccctggtgctactggtttccctggtgctgctggccgagtcggtcctcctggcccctctggaaatgctggaccccctggccctcctggtcctgctggcaaagaaggcggcaaaggtccccgtggtgagactggccctgctggacgtcctggtgaagttggtccccctggtccccctggccctgctggcgagaaaggatcccctggtgctgatggtcctgctggtgctcctggtactcccgggcctcaaggtattgctggacagcgtggtgtggtcggcctgcctggtcagagaggagagagaggcttccctggtcttcctggcccctctggtgaacctggcaaacaaggtccctctggagcaagtggtgaacgtggtccccctggtcccatgggcccccctggattggctggaccccctggtgaatctggacgtgagggggctcctggtgccgaaggttcccctggacgagacggtgctcctggcgccaagggtgaccgtggtgagaccggccccgctggaccccctggtgctcctggtgctcctggtgcccct

SEQ ID NO: 69820 - DNA, 1113 bp, Homo Sapiens
ggggattccatatgggcgccggcgcggagcgccgcggggcagcgcggggtcgccatggctgagctgcagcagctccgggtgcaggaggcggtggagtccatggtgaagagtctggaaagagagaacatccggaagatgcaggtgagcggcccgaggcccagcagaggcgctgccaacgtgaaagaccagaaaggcgaggacttccggcctccccgttggccaggtcatgcctgcttctcttgcgcccaacctcgcttcacacagcgcgggtttctacactgttcttctctgagccccgcaatgcctctgtgtgtttcggtcctgcttctctcacggagtatgcgtttcccagatagtgccccttgagtcattgattagtgggtcggctgccctctggtggaatttgtattgctaggttgctgacctctgaaccccatggaagaggctcctggttttcagaatttggcttcgtcagaccaccctaccctcacccactcgggcgaacctctgttcacccaaccatcggtgcaacaggtgccgatgagctagcagcaaggacaccatgaaacactacactagacattgaggataattttccccagtggtggttttaaggtcctggtgtctattctcagggaaggtgaaagcagaaagtggagagagaggtgcaaatatccacgtggccttctaactcctgtagtgctccatagtcatctctgtccccagagactttcctacctaacctctctgccctttcctccccagggcctcatgttccggtgcagcgccagctgttgtgaggacagccaggcctccatgaagcaggtgcaccagtgcatcgagcgctgccatgtgcctctggctcaagcccaggctttggtcaccagtgagctggagaagttccaggaccgcctggcccggtgcaccatgcattgcaacgacaaagccaaagattcaatagatgctgggagtaaggagcttcaggtgaagcagcagctggacagttgtgtgaccaagtgtgtggatgaccacatgcacctcatcccaactatgaccaagaagatgaaggaggctctcttatcaattggaaaataaaagtatttgccagtggcc

SEQ ID NO: 69821 - DNA, 649 bp, Homo Sapiens
cccaagaatggactcggagacccaagacagggctgttgttcgcaacatgacgatgatcagttcgatatgcggcaggctcgaccgtcatgtgcatcagctgacttctggctgatgtcaccgagcctcccgaaatcactaccatgcagaacaggtggcctacatgaccagcagactgcaacctcaagaaggcctgctcctccagggctccaacgagatcgagatccgcgccgagggcaacagccgcttcacctacagcgtcactgtcgatggctgcacgagtcacaccggagcctggggcaagacagtgattgaatacaaaaccaccaagacctcccgcctgcccatcatcgatgtggcccccttggacgttggtgccccagaccaggaattcggcttcgacgttggccctgtctgcttcctgtaaactccctccatcccaacctggctccctcccacccaaccaactttccccccaacccggaaacagacaagcaacccaaactgaacccccccaaaagccaaaaaatgggagacaatttcacatggactttggaaaatatttttttcctttgcattcatctctcaaacttagtttttatctttgaccaaccgaacatgaccaaaaaccaaaagtgcattcaaccttacc

SEQ ID NO: 69822 - DNA, 673 bp, Homo Sapiens
  misc_feature (146)..(146): n is a, c, g, or t
gagacccgccagaaactctggaggagcctcaaaatgctccccgagagaggccagagggtccggcagcagctaaaaagccacctcgccactgtgaacttgtcgtcactcttggatgtccggagatccacggtgatctcaggccctgngaccggaaaaggcagccaagatcactcaggggatcccacctcgggggacagaggctacacggatccctgtgtggccacatctctcaaaagcccctcacagccccaggcaccaaaagacagaaaggtccccaccaggaaggccgagaggtcggtcagctgcattgaggtgaccccaggggacaggagttggcaccaaatggtagtgagagccctatcctcccaggagtccaagccagagcaccagggcttggcagagcctgagaacgaccagctcccggaggagtaccaaacaaccgccacccttttgccccgtgggtactgctagagaacaggtccaccctggctctgggactcgctgccaggggcatgccacactcctgaatgactaacaatttcttccaatggccccatcatccagtggcatccgggggtctctcgggaacccgggatactgggataaagatgtttctggggtctgttcctgcactcagtcaatggggtgatctggttaatatttacgcttcaat

SEQ ID NO: 69823 - DNA, 1806 bp, Homo Sapiens
gggggggcgggcccgtacgccgattccatatgggcgccggcgcggagcgccgcggggcagcgcggggtcgccatggctgagctgcagcagctccgggtgcaggaggcggtggagtccatggtgaagagtctggaaagagagaacatccggaagatgcagggtctcatgttccggtgcagcgccagctgttgtgaggacagccaggcctccatgaagcaggtgcaccagtgcatcgagcgctgccatgtgcctctggctcaagcccaggctttggtcaccagtgagctggagaagttccaggaccgcctggcccggtgcaccatgcattgcaatgacaaagccaaagattcaatagatgctgggagtaaggagcttcaggtgaagcagcagctggacagttgtgtgaccaagtgtgtggatgaccacatgcacctcatcccaactatgaccaagaagatgaaggaggctctcttatcaattggaaaataaaagtatttgccagtggccatcagggctgagggcaagaatatattttttataaggaattgggaattttagtcttttaagcaaagtttacgaatgaagaaatgaaggatggccacaagcgtaaggcatatgtcacttgcctctggacactggttattttatgtttcagtccctaaaaaatgaaatggaaaaaagtggtgctaaatcgagtcagagatattacaggagagttttagagcttattatttcctgtggccagtgcttgtcctggcagtaaggctctcccctgtaacaagccagagccctccaaggtaccagactctgcttactacacaggtactaacaggctggcacgttagagttggtggagtctgaggagagatattttctctttgttgccaacatcctgtttaccaaaagtgtcaccccaccatcttacataagctgcgaaacaaaatcaatgaggtcactaacttagaagggaaagaaagttttctgggtctttgttttcttgatttggggtaatttatacaagggcatacaagttgattttaagatgtggaactgggaggtagactagtttggataagaactttgaaatgttccttgtggatccccatttctggtcatcaagatgtggatgtacatttcttaaaattattacatgctgcatctttcagcctggagactgtgcagaaacatgagaggtgatgacacactaattatgggaagcagaattactggctgatggcccctgaggctgtgtgtaacaaaatgacaggacaatcttgcagtaacactttccccttgaagagaagggggttttgattgtgatatatactagtatctaggaatgaacagtaaaagaggagcagttggctacttgattacaacagagtaaatgaagtactggatttgggaaaacctggttttattagaacatatggaatgaaagcctacacctagcattgcctacttagccccctgaattaacagagcccaattgagacaaacccctggcaacaggaaattcaagggagaaaaagtaagcaacttgggctaggatgagctgactcccttagagcaaaggagagacagcccccattaccaaataccatttttgcctggggcttgtgcagctggcagtgttcctgccccagcatggcaccttattgttttgatagcaacttcgttgaattttcaccaacttattacttgaaattataatatagcctgtccgtttgctgtttccaggctgtgatatattttcctagtggtttgactttaaaaataaataaggtttaattttctccccaaaaa

SEQ ID NO: 69824 - DNA, 1201 bp, Homo Sapiens
  misc_feature (1073)..(1073): n is a, c, g, or t
  misc_feature (1118)..(1118): n is a, c, g, or t
aagggggagagagtatgaagtcgacggcgcgccgaattcggcacgaggggagaaaagggtcctgctggagagcgtggtgctccaggccctgcagggcccagaggagctgctggagaacctggcagagatggcgtccctggaggtccaggaatgaggggcatgcccggaagtccaggaggaccaggaagtgatgggaaaccagggcctcccggaagtcaaggagaaagtggtcgaccaggtcctcctgggccatctggtccccgaggtcagcctggtgtcatgggcttccccggtcctaaaggaaatgatggtgctcctggtaagaatggagaacgaggtggccctggaggacctggccctcagggtcctcctggaaagaatggtgaaactggacctcagggacccccagggcctactgggcctggtggtgacaaaggagacacaggaccccctggtccacaaggattacaaggcttgcctggtacaggtggtcctccaggagaaaatggaaaacctggggaaccaggtccaaagggtgatgccggtgcacctggagctccaggaggcaagggtgatgctggtgcccctggtgaacgtggacctcctggattggcaggggccccaggacttagaggtggagctggtccccctggtcccgaaggaggaaagggtgctgctggtcctcctgggccacctggtgctgctggtactcctggtctgcaaggaatgcctggagaaagaggaggtcttggaagtcctggtccaaagggtgacaagggtgaaccaggcggtccaggtgctgatggtgtcccagggaaaaatggcccaaggggtcctactggtcctattggtcctcctggcccagctggccagcctggagataagggtgaaggtggtgcccccggacttccaggtatagctggacctcgtggtagccctggtgagagaggtgaaactggccctccaggacctgctggtttccctggtgctcctggacagaatggtgaacctggtggtaaaggagaaagaggggctccgggtgagaaagtgaaggaggccctcctggagtgcangacccctggaggtctggactgctggtctctggtccaaggtgcaangtgacgtggcatctggtgactggtgtgctgcttcctgtgctctgtcttctgtctctgtatatgtaccagacccagtccacgtc

SEQ ID NO: 69825 - DNA, 233 bp, Homo Sapiens
tgaacgtggacctcctggattggcaggggccccaggacttagaggtggagctggtccccctggtcccgaaggaggaaagggtgctgctggtcctcctgggccacctggtgctgctggtactcctggtctgcaaggaatgcctggagaaagaggaggtcttggaagccctggtactcccagcgctggtttcgacttcagcttcctgccccagccacctcaagagaaggctcacg

SEQ ID NO: 69826 - DNA, 412 bp, Homo Sapiens
tgggtccccatgggcccccccctggggatttggctgggacccgcctcgggtggaatcctggaccgtgaaggggggttccttggtgcccgaagggtttccccctggaccgagacgcgttctccctggcgccaaagggtgacccgtggtgagacccggccccgctggacccacctggtgctccatggtgctccgtggtgcccctggccccgttggccatgctggcaagagtggtgatcgtggtgagactggtcctgctggtcccgccggtcctgtcggccctgttggcgcccgtggccccgccggaccccaaggcccccgtggtacaagggtgagacaggcgaacagggcgacagaggcataaagggtcaccgtgcttctctgcctccaggtccctggcgatcctctagatact

SEQ ID NO: 69827 - DNA, 283 bp, Homo Sapiens
gtgtggtaaactgatatttaaaaaaggaaaggagaaaaatcacgactactgtttacagactgaaaaattattgctttttatactactgagatcctaagttaagactctccaaagcaaacatttggtttaaatcatttatctgatgtagataaaaggtagagaaacttgtagtgttctccacataatggaaaatgtacaaatgcctagttgtgttgcccatcaattttgtatattttcataattttaattgttgaaaattgcattatattttgcaatcactatg

SEQ ID NO: 69828 - DNA, 296 bp, Homo Sapiens
tcaaaagccttggtctcaggagaagattaaactttcaaattgggcagtggttcactttaaaacacacacacaccacacacaaaacaattttttaagaaatcctaataagtaacatacccaaaatgctctgtcttgagtcatgagaaccatcagttcttgatattgtctagacttgcatctagagctacgttgtaaaattcttttaggcatgtgttagatttctgtgtaaactttgtttaaatgtaaacttcatactacattgtcagtttttgtcttaataaaactatagatttata

SEQ ID NO: 69829 - DNA, 967 bp, Homo Sapiens
  misc_feature (723)..(741): n is a, c, g, or t
tgggctaggtagcgaggcctgggtgtgtgaattcggcacgagggagatgggtagcatcattttgattaacatttggggcctgataggggaaatggtgaagcaatggaaaagaacagacaactaatgatttgcttctatgtccagaatattttacctttaaaaaaatgtcattggcaccataaataaggactgtgagagactgtttaaaagctgtgaaagtctgaaacctataagccaaggtgttccctgcctaaacttattgctgttcccacaaaggactaagcctgttcataagttaccaaagttgccattttggagatggaaattgacgaggagggaaggtcttttattggagagtatacagtacaagcagatcattctgccttagaggtgctaattcccgaaattagaagaccctttcttttccagtaacgaagttataaatatcagcttgttcatccaagccactggctgaggtgttaggaagaggaagagggtggtagaggaggtaagacagtagggaaagacaagggcccatgctcttagtggggaaaactcttggagccgtttactttgagctttgaacactgaaaccattgttggcagggttcagtcactgacagcacaagtttcactgaattgatccaagagtttagtgatttcaaaagccttggtctcaggagaagattaaactttcatattgggcagtggttcactttaaannnnnnnnnnnnnnnnnnnaaacaattttttaagaaatcctaataagtaacatacccaaaatgctctgtcttgagtcatgagaaccatcagttcttgatattgtctagacttgcatctagagctacgttgtaaaattcttttaggcatgtgttagatttctgtgtaaactttgtttaaatgtaaacttcatactacattgtcagtttttgtcttaataaaactatagatttataatccctgaaaa

SEQ ID NO: 69830 - DNA, 1252 bp, Homo Sapiens
tggaccggtccggaattctcccgatatcgtcgacccacgcgtccgcaggaagacaagatggagatgctgttcaagcacttcctggtggaagacaagagtctgagtgggggagcatcttatgtggactttctctgtcatatgcacaaggagattcggcagctactgagctaaagcaagtgggtaaatggcatagggcccaggctagcttccagaaagcaccccaggatgtcagagaaattgggacagtaacatatcttatgtaagctgacctcagtctctctggggggagggggagatataaggagacaccttctttctgggctcaagtatcctgccactctgtcatgtcctgctgatggaaggtgcccctgttccctcattctaccctctttttcctgctaatcctgtcataatgaatgtagcttctcagttcactgtatatgattcggtattgggggtttggaggcacccagaccctggcaatattatgtgtccctttggaccagtctcccaagaggagaggggcaggcaggaaagagtggggatcctaaggttactacagggggctcagtgtcatccacaacttcctatattagggataaaacatataggtgcacaagagctggggtatagcccataggtggtggagagaaaagtggtcagtccttcttgggcctggaggttagcagtcaagtttctctgctttcactgctcgctcgctctctcctgcaatgattgatgatcactccgtggatagagaggcacactgtcagaggtgaccggagaactgagttgcaaaatatattaagatctggtagaggtaccagcttcctttccagctggagaggccccaacactggatggttctgtagggagcctagggagcctggtcatcaacttgcaatacctcacagagccagttcacatcccactctgagctcccacgagaaacactgcttctccaggcccggggttgttggggagagaggcagaggcagctggagcgccgttctctcctgctgggacaccgcttgggctttggtattgactgagtggctgacagttatcttccaaccccaactggcttgggggcaggacaagggctaggcttgatggtggccaggcttgcctgctccccacctgggatgcccctgctctggacctctcatttctcttcattggtttatttttcaatgcatctttaatttgtaaagaaataaaataaattaagatgtaaccattagcctcaaaa

SEQ ID NO: 69831 - DNA, 1798 bp, Homo Sapiens
gagagtatgaagtcgacggcgcgccgaattcggcacgaggcggcacgagggtttttgcagctgtatcaatgatgttcccccccagtattttcagcacctggatcataccggcaaacgtgtggatgcttatgaccgccctgagctatccctgggctcttatgaattcttggccactgtagattactgcaagaacaataagttccccagccctcctgcctttatcttcatgattgacgtctcctacaatgccatcaggactggtcttgttaggctcctctgtgaggagctcaagtcactgttagactttctacctagcttattggatcagattccagaaatgtttgcagacacaagggaaacagagacagtatttgtaccagttatccaggctggaatggaggctctgaaggctgctgagtgtgcagggaagctctttctattccatacatccctgcccattgcagaggccccagggaaactgaagaacagagatgacaggaagctgatcaatacagacaaggagaagactctgttccagcctcagacaggtgcctatcagaccctggccaaagagtgtgtggcccaaggctgctgtgtagatctctttctcttccctaaccagtatgtggatgtggccacgctctctgttgtgccccagctcactggtggctctgtctacaaatatgcttcctttcaggtggagaacgaccaggagcggttcctgagtgacctgcgtcgtgatgtccagaaggttgttggctttgatgctgtgatgcgggtccggacaagcactggtatccgtgctgtagatttctttggagctttctacatgagcaacacgacagatgtggagctggctgggctagatggggacaaaacagtgactgtggagttcaagcatgacgatcggctcaatgaagagagcggagctctcctgcagtgtgccctgctttacaccagctgtgcagggcagcgtcggctccgcatccataatctggccctgaactgctgcacccagctggctgatctatatcgaaactgtgagactgacacgctcatcaactacatggccaagtttgcatatcggggagtcctgaatagccctgtgaaggctgttcgtgacacgctcatcacccagtgtgcccagatcctggcctgttacagaaagaactgtgctagcccctcctctgcaggacagttgatccttcctgagtgcatgaagctactcccagtttacctgaactgtgtgttgaagagtgatgtcctgcagcctggagctgaagtcactactgatgaccgtgcctatgtccgacagctagttacctccatggatgtgactgagaccaatgtcttcttctaccctcggctcttacctttgacaaagtctcccgttgagagtactaccgaaccaccagcagttcgagcctctgaagagcgtctaagcaatggggatatatatttactggagaatgggctcaacctcttcctctgggtgggagcaagcgtccaacagggtgttgtccagagccttttcagcgtctcctccttcagtcagatcaccagtggtttgagtgttctgccagttctggataatccactgtccaagaaggttcgaggcctcattgatagcttacgggcacagagatcccggtacatgaagcttaccgtggtgaaacaggaagacaagatggagatgctgttcaagcacttcgctggtggaagacaagagtctagagtgggggagcatcttatgtggactttctctgtcatatgcacataagattcggcagctactgag

SEQ ID NO: 69832 - DNA, 377 bp, Homo Sapiens
gctcgttcctcttcctccgtctctcctcactatgcgtactgtgcctgcggggtctgcgtctagacgtctgactctgcagtgcatgtacatttgtttgctggctcgtctatatgacaacgtacgagacgtagtgtagaacctcgtgcgtggctagatggggacaaaacagtgactgtggagttcaagcatgacgatcggttcaatgaagagagcggagctctcctgcattgtgccctgctttacaccagctgtgcagggcagcgtcgagctgggctgggcaggaagtgtttcatccgcttggtatagaagacggtgaagaatgggtagagagcactaaaagaatagacatggcacgggattggctcatttctctcttc

SEQ ID NO: 69833 - DNA, 2039 bp, Homo Sapiens
ctataacgggcctatggtagcgaggcctgggtggcgaattcggcacgaggagtcatcgaagttacattgacttcctcatgttgtcttttcttctatacaattatgatttgcctgtgccagttatagcagcaggaatggacttcctgggaatgaaaatggttggtgagctgctacgaatgtcgggtgcctttttcatgcggcgtacctttggtggcaataaactctactgggctgtattctctgaatatgtaaaaactatgttacggaatggttatgctcctgttgaatttttcctcgaagggacaagaagccgctctgccaagacattgactcctaaatttggtcttctgaatattgtgatggagccattttttaaaagagaagtttttgatacctaccttgtcccaattagtatcagttatgataagatcttggaagaaactctttatgtgtatgagcttctaggggttcctaaaccaaaagaatctacaactgggttgctgaaagccagaaagattctctctgaaaattttggaagcatccatgtgtactttggagatcctgtgtcacttcgatctttggcagctgggaggatgagtcggagctcatataacttggttccaagatacattcctcagaaacagtctgaggacatgcatgcctttgtcactgaagttgcctacaaaatggagcttctgcaaattgaaaacatggttttgagcccctggaccctaatagttgctgttctgcttcagaaccggccatccatggactttgatgctctggtggaaaagactttatggctaaaaggcttaacccaggcatttggagggtttctcatttggcctgataataaacctgctgaagaagttgtcccggccagcattcttctgcattccaacattgccagccttgtcaaagaccaggtgattctgaaagtggactccggagactcggaagtggtcgatgggcttatgctccagcacatcactctcctcatgtgctcagcttataggaaccagctgctcaacatttttgtgcgcccatccttagtagcagtagcattgcagatgacaccagggttcaggaaagaggatgtctacagttgctttcgcttcctacgtgatgtttttgcagatgagttcatcttccttccaggaaacacactaaaggactttgaagaaggctgttacctgctttgtaaaagtgaagccatacaagtgactacgaaagacatcctagttacagagaaaggaaatactgtgttagaatttttagtaggactctttaaaccttttgtggaaagctatcagataatttgcaagtaccttttgagtgaagaagaggaccacttcagtgaggaacagtacttggctgcagtcagaaaattcacaagtcagcttctcgatcaaggtacctctcaatgttatgatgtattatcttctgatgtgcagaaaaacgccttagcagcctgtgtgaggctcggagtagtggagaagaagaagataaataataactgtatatttaatgtgaatgaacctgccacaaccaaattagaagaaatgcttggttgtaagacaccaataggaaaaccagccactgcaaaactttaataatcaacaaatagttatggaaaattcggtcacgtaattactctcatcgaaggactcattacaacaaacagggaagtaaaggaagagacacatcctctcatactccctgagactctgagaacagtggacgcagagggaagagatgatcattggaagcaatcagtttactcttccccaccacagtggttaaaaggcgtttgtatctgacactatgtgtgtgttttaaaataaacttttggaaacatgtttggaaaagcaaagctcagctcatttcactaacacttttcagcttactatatgtattaaacttttatgttgacttttgaattaaagtatgacaacactgaaagctctggatattaaaagaaaatgaaaagggcatatctacgttacttgtagcttgctttaattaaagttgcctcaaac

SEQ ID NO: 69834 - DNA, 1302 bp, Homo Sapiens
  misc_feature (1086)..(1086): n is a, c, g, or t
ggcatccccccacaccacccccctcactagtgactataaccacgtgttaaaaaaagcaggctggtaccggtcggaattcccgggatatcgtcgacccacgcgctcgggcggcgcccgggatcctgtgtagcggctgcagagggtgccgccgccctaggcgaagtagggccgtcctgagcgaaagaaccgcccccagcaggagcaccaccacggtttagcaaagaatcccagaccccgcccgggaaggcagccgcaccatggagtcttccagttcatctaactcttatttctccgttggcccaaccagtcccagcgctgtcgtgctcctctactcgaaggagctcaaaaagtgggatgagtttgaagatattttagaagagaggaggcatgtcagtgacttgaaatttgcaatgaaatgctacacacctcttgtctataagggaattactccatgtaaaccaattgatattaaatgtagtgttctcaattctgaggagattcattatgtcattaaacagctttccaaggaatcccttcaatctgtggatgtcctccgagaggaagtgagtgagatcttagatgaaatgagtcacaaactgcgtcttggagccattcggttttgtgccttcaccctgagcaaagtatttaaacaaattttctcgaaggtgtgtgtaaatgaagaaggtattcagaaactacaaagagccatccaggagcatcctgttgttctgctgcctagtcatcgaagttacattgacttcctcatgttgtcttttcttctatacaattatgatttgcctgtgccagttatagcagcaggaatggacttcctgggaatgaaatggttggtgagctgctacgaatgtcgggtgcctttttcatgcgggcgtacctttgggggcaataaactctactgggctggattctctgaatatgtaaaaactatgttacgggtcttctgaatattgtgatggagccattttttaaaagagaagtttttgatacctaccttgtcccaattagtatcagttatgataagatcttggaagaaactctttatgtgtatgagcttctaggggttcctanacccaaagaatctacaactggggttgctgaaaaccagaaagattctctctgaaaattttggaagcatccatgggttactttggagatcctgtgttcacttccatctttggcagctggggaggatgattccggagctcatataaactggggttccaagatacatttcctcagaaaacagtctggaggaacatgccatggccttttgtccctggaagg

SEQ ID NO: 69835 - DNA, 672 bp, Homo Sapiens
atgtattataatcattctttctaaattctgtgctagtcatttcttcctgggaatacagagaaaagagacaactttatgagttgttttcaacttcataattttaaattttctatgttaatataacataaattagaaaaaataagtgattcaaaatgaaaatatttactttgtagaatatgactttagacatatcactgtatccatatatacttggcagcaacatgagaagtgtgatacatgtgaacccaacaaattcaaagttgcacttttcaagatgtgagaaggtactaaaacttaatactaaaacatgagagggaaaatatgtgtaaacctctagtgctattttcactggctaaattctttatttcttgatttttttaaaaattaggttattaaaattaaaacaatatgctagaagacattttggcagaaataagtctataacactatttttgtcacatatctttttcttggaaaaatttatccaactatagacatcttaaaccctacaaattgttcttgttaaaaatgactaatactgggggtgctcaatatgcatatagtgtttttcattgataatttttatttagttcttaagaaacctgttcttaatgttggcatgtcacatttttctgttactataatcagaaaatgtatagtctgttatactgt

SEQ ID NO: 69836 - DNA, 2824 bp, Homo Sapiens
ggcacgaggtcttggagaaaaagtgtcccaggaactgaaagagcctctccataaagcattgcaaatgctcctgagccaattttggtgcctctggttttgctacgacaaatgctttgggaattgacaagacgtggtcaagaacctttgagcgcactgctgcagtttggcgtgacatacctggaggactattcggcagagtacatcattcagcaaggtggctggggcactgtgtttagtcttgagtcagaggaggaggaataccctggaatcactgcagaagatagcaatgacatttacatcctgcccagcgacaactctggacaagtcagtcccccagagtctccaactgtgaccacttcctggcagtctgagagcttacctgtgtcactgtcggctagccagagttggcacacagaaagcctgccagtgtcactaggccctgagtcctggcagcagattgcaatggatcctgaagaagtgaaaagcttagacagcaacggagctggagagaagagtgagaacaactcctctaattctgacattgtgcacgtggagaaagaagaggtgcccgagggcatggaagaggctgctgtggcttctgtggtcttgccagcgcgggagctgcaagaggcacttcctgaagccccagctcccttgcttccacatatcactgccacctccctgctggggacaagggaacctgacacagaagtgatcacagttgagaaatccagccctgctacatctctgtttgtagaacttgatgaagaagaggtgaaagcagcaacaactgaacctactgaagtggaggaggtggtccccgcactggaacccacagaaacgctgctgagtgagaaggagataaacgcaagggaagagagccttgtggaagagctgtcccctgccagcgagaagaagcccgtgccgccgtctgagggcaagtctagactgtcccccgccggtgagatgaagcccatgccgctgtctgagggcaagtctatactgctgtttggaggggctgctgctgttgccatcctggccagtggccatcgggggtagccctggctctgagaaagaaataggaggcttttccgaagaagaaagaccgaaggatgtaaggttggagttgtattggctggaaatttgaacctccagcagctgtctggacatttgtggaacactctgggataattggggacttctgctcaacatggcagtggcatgttaggcatgttagggcttgaggtggggcattcacattcatctgactgtaaatcccaagggcctccgctcatgctaaattgagaatcttaggggtaaagcaccccctccaggaccgggtttctcagccttggcactagtgctgttctgaccattctctgtgttggggctgtcctgtgtgtggtgggctccacccactagatgccagtggcaccccctcccagagatgacaaacgaaaatgtctctagacattgccaaatgtcccgtgtgaacatcccctattgagacccactgctttagcgagagagggtttacttaggaagaattgggatagaaattcccagctgagagaacttagctgtgggctcctcagctactgacttcttagctcttaatccccttagaatttcatctttctcgatgagcaggctctgcacccactctttttttgccccccgccctcatcctggagtgtgagggtgctcgcccgtactctcagctgcctctcagggactgcactgttcctcttcacccccaggttcctgctaagatcccacgggcgagggcttgctctggactcagtctgtcaagtccccgaagcttcctgcagctccaccttgtaaaaatgctgcctttgggaatcttcgaaatatgtacacagagaaaatcacatgaaggagacctggggtccccacttgtgagtgcaactgcaagtaactctggctagagagacacatgtgtcttgtgtcaaggcaggaggataacccggatgaccttctgaggtctcttcaacccttttccctagtggtcacccaccacccatggttacttgccagcaacatctctattgctggatggtccctgtctataaccttgggctagtatattttttccaatatgggaccttagtcttactactgatgagttctatgggtctcttgctagggggtaaggatttttattcttgggcttatagagccagttagatcataattcttatgaaatagagagtgtcctaaatatcactgaaataaaaagtaggaaaaagaagcttgaattttaagactgaggctgctctgcagattctagtttggctttcagagttcaagagtggtggcatcttcacctgaattcttcaatgccagggtaataaaccaaaatagtcctaatcagtatatgctagttgagcatcggcataattttctttcctctggctgatcccagccctaaaggaagggtagacccgtgtctttccagccctaaaggaagggtagacccgtgtctttccagccctaaaggaagggcagacccgtgtctttccatgcccgagggccacgacgtcactatgcagggcacacgtggcttggtttaaaaaggtcatcttagatttatcttagtaaatgtaataaattattttttagatcttgaaatttataataaaaatactttacctaccctgatcaccaaaacctgatgttttaaatgtgctttctttttgaaatttatgttttcaaataaaatctccctaaagcaatatttaaaaattggtcaaaacaaggtctgggagtatgtttgtgtgtctttcacctcgtgccgaattct

SEQ ID NO: 69837 - DNA, 1247 bp, Homo Sapiens
  misc_feature (566)..(624): n is a, c, g, or t
  misc_feature (1006)..(1113): n is a, c, g, or t
ctgcaagagcaacatctttcctcaccccaaggggttcaactagatatagcttcacaatctctggatcaagaaattttattaaaagttaaaactgaaattgaagaagagctaaaatctctggacaaagaaatttctgaagccttcaccagcacaggctttgaccgtcacacttctccagtgttcagccctgccaatccagaaagctcaatggaagactgcttggcccatcttggagaaaaagtgtcccaggaactgaaagagcctctccataaagcattgcaaatgctcctgagccagccagtgacatatcaggcatttcgggaatgtacactggagaccacagttcatgccagcggctggaataagattttggtgcctctggttttgctacgacaaatgcttttggaattgacaagacgtggtcaagaacctttgagcgcactgctgcagtttggcgtgacatacctggaggactattcggcagagtacatcattcagcaaggtggctgggtatgagctgttatatattaaaaatattttcttgaaaaaaaattaggtttgttgtnnnnnnnnnnnnnnnnnnnnnnnnnnnnnnnnnnnnnnnnnnnnnnnnnnnnnnnnnnntggcactatcatggcaggcttcggtctcaaactcctgggctcaagtgatcctgcctcaggtcctgaatagccaagagcacaggctgggactataggtgcccaccactgtgccgtgctctatcccgtactttttgatatgtaattattattattattcagttggttcagttgtttataaattttccttatatgttctttgacccttgaattacttagaaatgtattttttaatttctaaatacttacaggtttaaaaattttgttttcaattactaatttaattctgtttcatcagaaagcacgacatcgtggcattgaaacttgagttatagcctactatcatgatcaatttaaaaaatatatatataggggctgggtgcannnnnnnnnnnnnnnnnnnnnnnnnnnnnnnnnnnnnnnnnnnnnnnnnnnnnnnnnnnnnnnnnnnnnnnnnnnnnnnnnnnnnnnnnnnnnnnnnnnnnnnnnnnngtgcaaaaaattcacaaatttactggcttggtggcatgtggccggaaatccagtatcaggggccaggcgggaaaacattggccggggggcaggtgtgtggccaagggccgtttccgcggcaggcacacaacgat

SEQ ID NO: 69838 - DNA, 739 bp, Homo Sapiens
  misc_feature (18)..(18): n is a, c, g, or t
gagacttaaggaaatgtntggtggcagatgagcaccaatgactgcagcgtggagtgacgcactgcatggtctgttattctctaattccaatatgtcttgtgcttccagaagcaagaaaagtttcttctctcccctccttcccacccttttttcaaaggcaccacaagtatagacagttgcactacatcaaatctttttttgacacttgtagaaaccagtacacttttagattagacagtatcttcttttaatattttgatttgttttcctttagtttgaaaagttgtataatacttaactgactgtagcaaagttttatatgtggtagcatacctttaatttatcctattacaaaactgttctgaattttcttttggtttttaaaaaacaaaacttgttgcttagaagccatgaattattttattttacttcaactgtcgaaacttccttgttttaaaaaatgatcatttgggttcactcaggaaatgcatgtcaggaaacttgtattataagtttattagttgtgatgtatcagtaactgctgttacccctttttcaaagaaatgtaattgattttgaagttttctagattgtcacatgctttgtgactaatgcaagaaagcaagtcctgtgttgtatttgttctagtcatttttattcaggctatatattgtagcttaatttttatttgcaattaatttatttaaactaagtaaatacttttcaaaatacataattg

SEQ ID NO: 69839 - DNA, 1019 bp, Homo Sapiens
  misc_feature (550)..(564): n is a, c, g, or t
  misc_feature (801)..(801): n is a, c, g, or t
  misc_feature (829)..(829): n is a, c, g, or t
  misc_feature (971)..(971): n is a, c, g, or t
cacaagaacaaagttacaatagtttaataatttaaataggaccaacttcaggaacatacatactcatacataaaattaaacaatttaattttgaacagtgtattgaaatacatcaaattcttaaaaatcccccaaatggactcaagatcatggatatgaaaaggtaattttgaagtactaaagactagagtaaaacagacaaagtcattactttgcatttactaataagacaacagcctgtggatacattagacctttataagaacacttctaggaaatgttagaacaacgagtcattaaaaaggaatataaatgagttcataaagataaatgtatagctgacaatttctttggtcctcgaagtcacacttgtttttactttaaaatgccaaacatgagttgagtgctcagaattctacctataaatgtctaaatattaagcaggctaatgtttatactgggctagatttaaaaaggtactcaagccaaccatcactgtacttaaactccagaaagaaaaagctaggaaacagaagtagagaggaatggnnnnnnnnnnnnnnncccaatacctctgccatcttgccccatcataacccaaatagcatcaaagtggcagagatgggactaaagttaaagcaagcatcaaagttattacttttagggtaatgggatgaatttgaagagcactatgtcaaccaaatactaaacttcatggaataactgtgtttgtgtttctgtggaggagttgcggttttgtttgttttaatttggccacactgcccaatggaggaaatttangatatcattataaggcacagctccaggnataaatactatacatctaacggagtacatgaggacagacccaatagaccacaaggaaccggacagagctccagtgcattcaagatcgtggtacatacgcttggtaaacgttgacaagtcatatgtctccacgtcagtcatcngtgctcgtcaaggcgtggaactatggtctgcaacctgaatgatggatc

SEQ ID NO: 69840 - DNA, 1178 bp, Homo Sapiens
  misc_feature (43)..(77): n is a, c, g, or t
aaccgacgagcgcagcgagtcatgtgagcgaggaagcggccgnnnnnnnnnnnnnnnnnnnnnnnnnnnnnnnnnnncagtcgacggtaccggacatatgcccgggaattcggccattacggccgggggaaatctgtttatttttaaataagatagcactgatgtgaatcttatttggaaattacagatactgccattaagcgatgcttttatcttcattaattcattttggtaagcgcctatgcatttctgatggttaggtgccctaggtagtgttaagtatgtccgtgtcctcccttactcccctctcgctccctctaccctctatcccctagggttcttttattaatggaatttctccagttatagagaaaaaaatgacatttgaaaactaaagctcatttatattaatactaaggtcctgtgggcctagtgcgttactcttcccagtgatacctagattttaagagtagagaacagaggaaacatgggatgagaggagagaggttttttagacaacatttgtagacacctcaaattatatcactgttctctagcgccaatattcccaggtaaattgaccattaaagcaatactcactgacctactagtttattttggtcagctgagtaccatcaggatatttaaccctttaagtgctgttttgggagtagaaaactaaagcaacaatacttcctcttgacagctttgattggaatggggttattagatcattcaccttggtcctacactttttaggatgcttggtgaacataacaccacttataatgaacatccctggttcctatattttgggctatgtgggtaggaattgttacttgttgctgcagcagcagccctagaaagtaagcccagggcttcagatctaagttagtccaaaagctaaatgatttaaagtcaagttgtaatgctaggcataagcactctataatacattaaattataggccgagcaattagggaatgtttctgaaacattaaacttgtatttatgtcactaaaattctaacacaaacttaaaaaatgtgtctcatacatatgctgtactaggcttcatcatgcatttctaaatttgtgtatgatttgaatatatgaaagaatttatacaagagtgttatttaaaattattaaaaataaatgtatataatttgtacctat

SEQ ID NO: 69841 - DNA, 1034 bp, Homo Sapiens
  misc_feature (509)..(510): n is a, c, g, or t
  misc_feature (512)..(635): n is a, c, g, or t
  misc_feature (638)..(640): n is a, c, g, or t
  misc_feature (654)..(667): n is a, c, g, or t
  misc_feature (695)..(742): n is a, c, g, or t
  misc_feature (828)..(840): n is a, c, g, or t
  misc_feature (848)..(856): n is a, c, g, or t
gcacgaggtcacttcattatccttgtgtcactaaataacgtataaaggtaaatcagaagtgtattaatctctgaatttctaatcagttgtttttagtttgcagaaaaaacttcagcatgtgccaggaacacaacctcaccttgatcagaatctcctgtgggaaaagaatgtgagaaacaaggacaatcactgcatggaggtcataaggctgaagggattggtgtcaatcaaagacaaatcacaacaagtgattgtccagggtgtccatgagctctatgatctggaggagactccagtgagctggaaggatgacactgagagaacaaattgattggtcctcattggcagaaatttagataaggatatccttaaacagctgtttatagctactgtgacagaaacagaaaagcagtggacaacacatttcaaagaagatcaagtttgtacataacactagtggcatttcttatcaaaaggattggataataaaaataagtttctactgatannannnnnnnnnnnnnnnnnnnnnnnnnnnnnnnnnnnnnnnnnnnnnnnnnnnnnnnnnnnnnnnnnnnnnnnnnnnnnnnnnnnnnnnnnnnnnnnnnnnnnnnnnnnnnnnnnnnnnnnnnnnnaannnatttttggggccgnnnnnnnnnnnnnngaaaattttttttaaaaacaattctttnnnnnnnnnnnnnnnnnnnnnnnnnnnnnnnnnnnnnnnnnnnnnnnncccctaaagttttgttcccccacaaggaaaaaccccccggggttaaaacacacaaagaggggttggggggtttcccccaccccacnnnnnnnnnnnnncccccccnnnnnnnnnacaccccaaggaggggtttttttgagagaaacaatccccccccaagaggggggggtttctctcggggagggtgtttatattcgtgggggggtgttttcttcaaagggggccgggagcttatatttccccctgcactccgagtggtggttttatgcttccgcggggcctcagggatgcg

SEQ ID NO: 69842 - DNA, 711 bp, Homo Sapiens
gtgttaaaaaaatttaataacaatgtaatcattatatctctgcaatcagctgaagttctaagaaaaaatgacaatgttgaaagttgtatcatcattattataaactttcatgttcagtatatgtaaactccaaagccaatttcaaaagatatttttgtgaaataccattctttaaaaaaaaggatattatatataattgtatgaatgttaaatgttttacagtactgatttgctacattttatgtatgctgtaaaacaaataccattttaaagtatattggaattcgtaactaaagtaataaataaatgcttgaaatatacccagtagaaacttatttttattatccaatccttttgataagaaatgcctctagtgttatgtacaaacttgatcttctttgaaatgtgttgtccactgcttttctgtttctgtcacagtagctataaacagctgtttaaggatatccttatctaaatttctgcctgcaaacaaaacaaaatatgacgtgattacattatgcttattaaaatgacacagttcacctatcaattccagttcattaaatgctttatggtgtttaaaaatttacaaaaagaatagtaattgagtgattccatctttaactttccaggtcagtacatcaaagtcacattggtccttggattaaccacttttctaaaattgaagaagaacaaaagtcctaacaagct

SEQ ID NO: 69843 - DNA, 1409 bp, Homo Sapiens
  misc_feature (44)..(78): n is a, c, g, or t
  misc_feature (865)..(894): n is a, c, g, or t
ccgaacgacgagcgcagcgaggtctgtgagcgaggaagcggcgnnnnnnnnnnnnnnnnnnnnnnnnnnnnnnnnnnncagtcgacggtaccggacatatgcccgggaattcggccattacggccggggggctgcggtacggcgtgttggtcccagcggttcagctgaggtagggacgtgctgtaggccggaatgttaccggctgttggatctgtggatgaggaagaggatcctgcggaggaggattgtcctgaattggttcccattgagacgacgcaaagcgaggaggaggaaaagtctggcctcggcgccaagatcccagtcacaattatcaccgggtatttaggtgctgggaagacaacacttctgaactatattttgacagagcaacatagtaaaagagtagcggtcattttaaatgaatctggggaaggaagtgcgctggagaaatccttagctgtcagccaaggtggagagctctatgaagagtggctggaacttagaaacggttgcctctgctgttcagtgaagtgaggaatgtgtttactgtgtacatggtttactagaaatgtttattgattatatttccagctttaattttcttgagtaatttaactgaatttacacagtttgcttcattgtattttcaaacaaatagaaaataaacttattaggaagcattttcttaaagtgtttcttgctgtcttttctatctgctctaatgttttggtccttttattgagtttttattgcttttgatgtcagggcttatttaatctctagtgcatgaaagtctcatatgtaaaaaatgattattctgaatttaatctgtcattggtcatacttctaagtgttcaaccttatnnnnnnnnnnnnnnnnnnnnnnnnnnnnnnccttacattatgttctagtagttaagtttccaaggacagtgatcactagtctaccatagaccctagaagagttacccaacacatagtagcactcaaatatttgttgaatgaattataaaaatgactacttgtattgttaattttgtgtattctagtgaattaaatctcttcggcatcatttactcccttaggtatttgactttgtgtcaaatgttttggcaaggataaaattataacagactttcttgaacaaccaaaatgtaatctattaaggattttccttcacttttgataaaataagaaaaaaggaatttaaaaccttgcatcctaatgtaaaatagaattatatggtgtttaatatcagtgtccctttagctattatattaaactactatagttaataaattttatcattattttgtatgttggtttttaaaaatttcataaagctataaaaagatacttggtcagataaagtttcctctgcttttaattttaataaagtattattatgt

SEQ ID NO: 69844 - DNA, 903 bp, Homo Sapiens
  misc_feature (36)..(36): n is a, c, g, or t
  misc_feature (79)..(113): n is a, c, g, or t
aaagtctataatcactatagggcgctactcgttcancgaacgacgagcgcagcgaagtagtgagcgaggaagcggccgnnnnnnnnnnnnnnnnnnnnnnnnnnnnnnnnnnncagtcgacggtaccggacatatgcccgggaattcggccattacggccgggggggagtggcgtgctgggcgtgcgcggctgcggtacggcgtgttggtcccagcggttcagctgaggtagggacgtgctgtaggccggaatgttaccggctgttggatctgtggatgaggaagaggatcctgcggaggaagattgtcctgaattggttcccattgagacgacgcaaagcgaggaggaggaaaagtctggcctcggcgccaagatcccagtcacaattatcaccgggtatttagttattcagaggctgctctgctgagaagatgaacaaatttcttgtccaaaacaatgtatttcaaacgtgccgctcgggcctttcccgtattgctcactggtgctgggaagacaacacttctgaactatattttgacagagcaacatagtaaaagagtagcggtcatttttaaatgaatttggggaaggaagtgcgctggagaaatccttagctgtcagccaaggtggagagctctatgaagagtggctggaacttagaaacggttgcctctgctgttcagtgaagtgaggaatgtgtttactgtgtacatggtttactagaaatgtttattgattatatttccagctttaattttcttgagtaatttaactgaatttacacagttttgcttcattgtattttcaaacaaatagaaaataaacttattaggaagcattttcttaaagtgttcttgctgtctttctatctgctctattgtttgccctttatggagttattc

SEQ ID NO: 69845 - DNA, 2160 bp, Homo Sapiens
  misc_feature (44)..(78): n is a, c, g, or t
gcgaacgacgagcgcagcgaagtagtgagcgaggaagcggccgnnnnnnnnnnnnnnnnnnnnnnnnnnnnnnnnnnncagtcgacggtaccggacatatgcccgggaattcggccattacggccgggggatgtgatgacgtcaggccccggccaggccgggagtggcgtgctgggcgtgcgcggctgcggtacggcgtgttggtcccagcggttcagctgaggtagggacgtgctgtaggccggaatgttaccggctgttggatctgtggatgaggaagaggatcctgcggaggaggattgtcctgaattggttcccattgagacgacgcaaagcgaggaggaggaaaagtctggcctcggcgccaagatcccagtcacaattatcaccgggtatttaggtgctgggaagacaacacttctgaactatattttgacagagcaacatagtaaaagagtagcggccattttaaatgaatctggggaaggaagtgcgctggagaaatccttacctgtcagccaaggtggagagctctatgaagagtggctggaacttacaaacggttgccctctgctgttcagtgaaggacaatggccttagagctattgagaatttgatgcaaaagaaggggaaatttgatgacatactgttagagaccactggattagcagaccctgggttgcaagtggttctatgtttgggtggatgctgaattagggagtgatatttaccttgcaatggtatcataactattgtggatttcaaaaatattggattaacaagtgaaataacactaaaggcagaagagaatgaaatcatcccacccactgacccgttcccaatctgagcatatggatagggcccaaagcacatttaacagaagagaaacctgatggccttatcaatgaagctactaggcaagttgctttggcagataccattctcattaataaaacagacttggttccagaagaagatgtaaagaaattaagagcgacaattagatccataaatggactaggacaaatcttagaaacacaaagatcaagagttgatctctctaatgtattagatcttcatgcctttgatagtctctctggaataagtttgcagaaaaaacttcagcatgtgccaggaacacaacctcaccttgatcagagtattgttacaatcacatttgaagtaccaggaaatgcaaaggaagaacatcttaatatgtttattcagaatctcctgtgggaaaagaatgtgagaaacaaggacaatcactgcatggaggtcataaggctgaagggattggtgtcaatcaaagacaaatcacaacaagtgattgtccagggtgtccatgagctctatgatctggaggagactccagtgagctggaaggatgacactgagagaacaaatcgattggtcctcattggcagaaatttagataaggatatccttaaacagctgtttatagctactgtgacagaaacagaaaagcagtggacaacacatttcaaagaagatcaagtttgtacataacactagaggcatttcttatcaaaaggattggataataaaaataagtttctactgggtatatttcaagcatttatttattactttagttacgaattccaatatactttaaaatggtatttgttttacagcatacataaaatgtagcaaatcagtactgtaaaacatttaacattcatacaattatatataatatccttttttttaaagaatggtatttcacaaaaatatcttttgaaattggctttggagtttacatatactgaacatgaaagtttataataatgatgatacaactttcaacattgtcattttttcttagaacttcagctgattgcagagatataatgattacattgttattaaatttttttaacacaagtaagtgtcaccattttatgacatgaaataaaaggttatgactgttattgatgttgatgttgacgacctgatcacctggctgaaggagtgtttgtcaggtttctccattgtaaagttactcttttcccccatttcatactgtgctctttggaaggaaatcactatgcacagcccacactaaaggaatggggagttgtagtgtactttttttgggagtggtctacataattaattgaaattcttctgcaaagg

SEQ ID NO: 69846 - DNA, 947 bp, Homo Sapiens
cagtcgacggtaccggacatatgcccgggaattcggccattacggccggggggcggtacggcgtgttggtcccagcggttcagctgaggtagggacgtgctgtaggccggaatgttaccggctgttggatctgcggatgaggaggaggatcctgcggaggaggattgtcctgaattggttcccattgagacgacgcaaagcgaggaggaggaaaagtctggcctcggcgccaagatcccagtcacaattatcaccgggtatttaggtgctgggaagacaacacttctgaactatattttgacagagcaacatagtaaaagagtagcggtcattttaaatgaatttggggaaggaagtgcgctggagaaatccttagctgtcagccaaggtggagagctctatgaagagtggctggaacttagaaacggttgcctctgctgttcagtgaaggacagtggccttagagctattgagaatttgatgcaaaagaaggggaaatttgattacatactgttagagaccactggattagcagaccctggtgcagtggcttctatgttttgggttgatgctgaattagggagtgatatttatcttgatggtatcataactattgtggattcaaaatatggattaaaacatttaacagaagagaaacctgatggccttatcaatgaagctactaggcaagttgctttggcagatgccattctcattaataaaacagacctggttccagaagaagatgtaaagaaattaagaacgacaattagatccataaatggactaggacaaatcttagaaacacaaagatccagaacaataaacatgcagtgattgatttttcttacttcaagtggatgagtgagcaagtgactaaaatcttccgtgaattcttcagtagttgatctctctaatgtattagatcttcatgcctttgatagtct

SEQ ID NO: 69847 - DNA, 1264 bp, Homo Sapiens
ggggcggtacggcgtgttggtcccagcggttcagctgaggtagggacgtgctgtaggccggaatgttaccggctgttggatctgcggatgaggaggaggatcctgcggaggaggattgtcctgaattggttcccatggagacgacgcaaagcgaggaggaggaaaacgctggcctcggcgccaagatcccagtcacaattactcaccgggtatttagttattcagaggctgctctgctgagaagatgaacaaatttcttgtccaaaacaatgtatttcaaacgtgccgctcgggcctttcccgtattgctcactggtgctgggaagacaacacttctgaactatattttgacagagcaacatagtaaaagagtagcggtcattttaaatgaatttggggaaggaagtgcgctggagaaatccttagctgtcagccaaggtggagagctctatgaagagtggctggaacttagaaacggttgcctctgctgttcagtgaaggacaatggccttagagctattgagaatttgatgcaaaagaaggggaaatttgattacatactgttagagaccactggattagcagacccaggtgcagtggcttctatgttttgggttgatgctgaattagggagtgatatttaccttgatggtatcataactatagtggattcaaaatatggattaaaacatttaacagaagagaaacctgatggccttatcaatgaagctactaggcaagttgctttggcagatgccattctcattaataaaacagacctggttccagaagaagatgtaaagaaattaagaacgacaattagatccataaatggactaggacaaatcttagaaacacaaacatcaagagttgatctctctaatgtattaaatcttcatgcctttgatagtctctctggaataagtttgcagaaaaaacttcagcatgtgccaagaacacaacctcaccttgatcagaagattggtacaatcacatttggaagtaccaggaaaagcaaaaggaaaaacatcttaatatgttttatccaaaatctcctgtgggaaaagaatgtgaggaaacaagacaatcactgcatgaaggtcataaggctgaagggattggtgtccatcaagaccaattcccaccaggtggttgtcccagggtggcccatgagcctctatgatcttggagggagactccagtgggacctggaaaggatgacccctgagaaaaacaaattccgatgggcccttccctgggcaaa

SEQ ID NO: 69848 - DNA, 827 bp, Homo Sapiens
  misc_feature (14)..(14): n is a, c, g, or t
  misc_feature (132)..(132): n is a, c, g, or t
  misc_feature (146)..(146): n is a, c, g, or t
gatctcggtgtttntaagattgtcctaagtccatttatggatctaagtgtcgttcttaatttcttttacatcttcttctgggaccaaagtctgttttattaatgagaatgatatctgccaaagcaacttgcntagtagcttcatgnataaggccatcaggtttctcttctgttaaatgtgctttgggccctatccatatgctcagattgggaacgggtcagtgggtgggatgatttcattctcttctgcctttagtggtatttcacttttaatccatattttgaatccacaatagttatgataccagggtctgctaatccagtggtctctaacagtatgtcatcaaatttccccttcttttgcatcaaattctcaatagctctaaggccattgtccttcactgaacagcagaggcaaccgtttctaagttccagccgactcttcatagagctccccacctgggctgacagctaaaggatttctccagcgcacttccttccccagattcatttaaaatgaccgctactcttttactatgttgctctgtcagaaatatagttcagaagtgttgtcttcccagcacctaaatacccggggataattgtgactgggatcttggcgccgaggccagacttttcctcctcctcgcgttgcgtcgtctcaatgggaaccaattcaggacaatcctcctccgcaggatcctcttcctcatccacagatccaacagccggtaacattccggcctacagcacgtccctacctcagctgaaccgctgggaccaacacgccgtaccgcagccgcgcacgcccagcacgccactcccccc

SEQ ID NO: 69849 - DNA, 659 bp, Homo Sapiens
ccccgcccctttcatgaccttcaccgggaggctgaggtcggagtcccgattttctcctgctgctgtggcccggacatggcgactcccggccctgtgattccggaggtcccctttgaaccatcgaagcctccagtcattgaggctgagccccactgtttacaggaatccagagagtttcaaggaaaagttcgttcgcaagacccgcgagaacccggtggtacccataggttgcctggccacggcggccgccctcacctacggcctctactccttccaccggggcaacagccagcgctctcagctcatgatgcgcacccggatcgccgcccagggtttcacggtcgcagccatcttgctgggtctggctgtcactgctatgaagtctcgaccctaagcccagggtctggccttgaaagctccgcagaaatgattccaaaacccagggagcaaccactggccctaccgtgggacttactccctcctctcctttgagaggcccatgtgtcgctggggaggaagtgaccctttgtgtaactgtaaccgaaagttttttcaaaaatcctagatgctgttgtttgaatgttacatacttctatttgtgccacatctcccctccactcccctgcttaataaactctaaaaatccacttgtatttaaa

SEQ ID NO: 69850 - DNA, 2654 bp, Homo Sapiens
  misc_feature (2640)..(2640): n is a, c, g, or t
gacccgggtgagccgcctggctggtaggaaaacaaatgaatctgtgagtgagccccgaaaaaggctttatgtattccagaaacacaaatgaaaatcctcaggagtgtttcaatgcatcaaagctactgacatctcatggcatgggcatccaggttccgctgaatgcaacagagttcaactatctctgtccagccatcatcaaccaaattgatgctagatcttgtctgattcatacaagtgaaaagaaggctgaaatccctccaaagacctattcattacaaatagcctgggttggtggttttatagccatttccatcatcagtttcctgtctctgctgggggttatcttagtgcctctcatgaatcgggtgtttttcaaatttctcctgagtttccttgtggcactggccgttgggactttgagtggtgatgcttttttacaccttcttccacattctcatgcaagtcaccaccatagtcatagccatgaagaaccagcaatggaaatgaaaagaggaccacttttcagtcatctgtcttctcaaaacatagaagaaagtgcctattttgattccacgtggaagggtctaacagctctaggaggcctgtatttcatgtttcttgttgaacatgtcctcacattgatcaaacaatttaaagataagaagaaaaagaatcagaagaaacctgaaaatgatgatgatgtggagattaagaagcagttgtccaagtatgaatctcaactttcaacaaatgaggagaaagtagatacagatgatcgaactgaaggctatttacgagcagactcacaagagccctcccactttgattctcagcagcctgcagtcttggaagaagaagaggtcatgatagctcatgctcatccacaggaagtctacaatgaatatgtaccccagagggtgcaagaataaatgccattcacatttccacgatacactcggccagtcagacgatctcattcaccaccatcatgactaccatcatattctccatcatcaccaccaccaaaaccaccatcctcacagtcacagccagcgctactctcgggaggagctgaaagatgccggcgtcgccactctggcctggatggtgataatgggtgatggcctgcacaatttcagcgatggcctagcaattggtgctgcttttactgaaggcttatcaagtggtttaagtacttctgttgctgtgttctgtcatgagttgcctcatgaattaggtgactttgctgttctactaaaggctggcatgaccgttaagcaggctgtcctttataatgcattgtcagccatgctggcgtatcttggaatggcaacaggaattttcattggtcattatgctgaaaatgtttctatgtggatatttgcacttactgctggcttattcatgtatgttgctctggttgatatggtacctgaaatgctgcacaatgatgctagtgaccatggatgtagccgctgggggtatttctttttacagaatgctgggatgcttttgggttttggaattatgttacttatttccatatttgaacataaaatcgtgtttcgtataaatttctagttaaggtttaaatgctagagtagcttaaaaagttgtcatagtttcagtaggtcataggggagatgagtttgtatgctgtactatgcagcgtttaaagttagtgggttttgtgatttttgtattgaatattgctgtctgttacaaagtcagttaaaggtacgttttaatatttaagttattctatcttggagataaaatctgtatgtgcaattcaccggtattaccagtttattatgtaaacaagagatttggcatgacatgttctgtatgtttcagggaaaaatgtctttaatgctttttcaagaactaacacagttattcctatactggattttaggtctctgaagaactgctggtgtttaggaataagaatgtgcatgaagcctaaaataccaagaaagcttatactgaatttaagcaaagaaataaaggagaaaagagaagaatctgagaattggggaggcatagattcttataaaaatcacaaaatttgttgtaaattagaggggagaaatttagaattaagtataaaaaggcagaattagtatagagtacattcattaaacatttttgtcaggattatttcccgtaaaaacgtagtgagcacttttcatatactaatttagttgtacatttaactttgtataatacagaaatctaaatatatttaatgaattcaagcaatatatcacttgaccaagaaattggaatttcaaaatgttcgtgcgggtatataccagatgagtacagtgagtagttttatgtatcaccagactgggttattgccaagttatatatcaccaaaagctgtatgactggatgttctggttacctggtttacaaaattatcagagtagtaaaactttgatatatatgaggatattaaaactacactaagtatcatttgattcgattcagaaagtactttgatatctctcagtgcttcagtgctatcattgtgagcaattgtcttttatatacggtactgtagccatactaggcctgtctgtggcattctctagatgtttcttttttacacaataaattccttatatncagcttggaaaaaa

SEQ ID NO: 69851 - DNA, 1729 bp, Homo Sapiens
  misc_feature (233)..(273): n is a, c, g, or t
  misc_feature (1563)..(1619): n is a, c, g, or t
taatttaggattgaagtttttaaactggaaggtaattacaattttgaaaagttttttgagattatcacatttagtttatcccatcaagaagctttttgtcttgtctctttctgatagctctagcagttttcatattttggtcatagtttcaacattttaacatgtgaattatagggtttcatgctggtttccagattttattgtttggctacgtacaatggaactttaagtcnnnnnnnnnnnnnnnnnnnnnnnnnnnnnnnnnnnnnnnnnattctaaggggggaaatgttatatttttctgtttctataagagatgaatacagtggatactttttctattggtaatgattgagttcacctctttcagaagacattttctttctcttctgagtaattgaaataaaatctggcccttgtgaaaccctggaaatcttaagtctgttgaaataccaggttaaacacattccaagagatctgttcaaactcaaattcttttgtatacttctgaggtgcctgagaaaaagacttcattatttatgagaaaatatgctttatcttggaaattgtgttcaaatgttagcttactattttgtagaatgaatgtttatgaagctgatatgagaccatctcagaagaaccaagcaggttccttgaccttttgcttgcttttctgaacattgtgaatattacacatgtctttctaaattattctagggtatgcaaatgtcaatggtatgaaacaccactgtactggaagaattaatatattactttagtatgtacctgagctaaatgactgaagctttaggggtgcatagaaaccaccataatttgtatgacattttgaagtgaattaaatatttttgaacatgcttcttcgacagccagtgttatatttttcagatcaacacaaagcacaatgattactcgaaattcagtattttcaaatttacatatttaaagtcatgcaagctgtaacttccctgtcaaaattactggctgccaaatttatacctgtttcttcagctgtaccttttgatatttaaagtttttaaatttctgtaaagtagattttgtagaatgtaatgtgttcactgcctttgtgaagcggtatataattgtataatttctgtgtgtaaactgaatgcttgggctttcaatacagtattcatataaagcaataaatattaatgttatgaaatatttgactacatttttatcaaaatatgaaagaatccccccttttttagtttcagatacctgaactacacagatgagcttctaaaactgatgcaaacagtttctgacactgtataatatgcttttgggtgatttggggggcaaccacaagttttgcgttttgactacttaaatcatcatggctataaataccaaaacgatttggatccatttatgtttgtaggataatatactactgactgacttgactgtcaggttcacaacaggtagatgatatatttatgactatgtctaatagttgaaataaaatctgaatattgatttactatacccaagaggggggaaaaattaacccttgtnnnnnnnnnnnnnnnnnnnnnnnnnnnnnnnnnnnnnnnnnnnnnnnnnnnnnnnnntttgaaattttcttttgaatatttttgaaattgtcagtaaacttacctaagatcctgtgaccttttgatattttttattttaattgtagtgccatgggccatttgtaaac

SEQ ID NO: 69852 - DNA, 748 bp, Homo Sapiens
  misc_feature (73)..(81): n is a, c, g, or t
  misc_feature (296)..(305): n is a, c, g, or t
gcggcctacagattgaccttattatttttgaaaatatgttaagggttttttcatagagagagaaagaatggannnnnnnnnaactgggaacctcctgattcttacggaaaattatccttctataagaagataccagagagatttattcaaggtaatttgataacctaaaatcaattctccattttttatcatatgtgggatttgttgctaagtcgtgttcaacaatagcttttatgttcctaacatatctgaaagcttatttatgaatggatatactggattattgatatactgannnnnnnnnnaatggggacatttgccattttcttcccagaaatatgtaatcccctggctgactaggactgttaaacatagtgtggactggatgatgccttcgacaaaccagagaagccaagttggggggagctggtgcctggagtgggccctgtgcacctcacctggcggaggctgggggggctctgtcagcaggaccctagaggagactctcattcgattttaaagaagcacaacgggtcattttcctttgtatgttcctagcgcagaactgtttctaaaacaacttgaagtatagttttgttatctaagcaatttttgttttaagtaagtaagtgtactagaatgcgaagccgttatggttcaggtttttaaaaactggtacagtattgtatctgtctcatctgttgcactgtatttcaatcatctgtaattaaaatgatcatatgtttaa

SEQ ID NO: 69853 - DNA, 1590 bp, Homo Sapiens
  misc_feature (135)..(216): n is a, c, g, or t
gagagtataaatactttatgattccaattgtgttaattctagaaaaggcaaacaaatctaaagtaaaaaatggtaaatcaacggtttcctaagggaaggcaagggagggaatgtaaagggggcactgaggtagcnnnnnnnnnnnnnnnnnnnnnnnnnnnnnnnnnnnnnnnnnnnnnnnnnnnnnnnnnnnnnnnnnnnnnnnnnnnnnnnnnnaaatatgaataattattgcatgacaatcacatatcaacaaagcattaaaagaaactgttgcacataaaaatccaacttcctactcattttagaaaatccgatttggcaaccctatattgactctgtcatctctttcttcttgccttgggagcaaagaatggctggctacgtcatagatactacagtccctatagtataggatctgctttttctcagtccctattttcctgccagcacagcactggccttcagatgcacagcacggagatggtaatccacaaaaccaaaacctttagattatttgctctgccagtaacattagtcataggacagaggtctgaggtcctgagaatttctgcaaaccctgaatcctgcacagccacattcaagggagcattcacggatgcacatttagcagagttccatttctgctggtttgctataatctcgcctactccctattaatcacatccagtgtttctgtacaaattatggtcccagctgggcctggtatgtcttacagttaagagatacctgcctaatgctgaacttcagggcatatggctccttggcaggtgctaaacagcatctgctttacagtattggggaatatgcggcaccccctgggaataagggacccaattcatgctgttcccacatgcactggaggttgtcacaactgccccctcctcgggataaaaattcacgccattcagaccacaatattatacccataaattcctacaatttttcctaggaggccttggtggcaatgcaaatgaggtcaaatctggattgacagttgtttctctgccatcctcctgtcccctccaagataatctggagaccccttcagtttggtagatcttaactctgctcttgaaccaccccacacagtgatcagaacatggaagactaaaggcggctttatcataaggccattatcatcacatgaaccagggcaatacacaggagataagttgttgtgtagagtaacatgaaggctggacaaatccttcacaggcataacatgagaccaacaatgtcccagaaaaagggaaaccttctctagaacaagctgttggcaaaaccctgctcaggtcttcacagccaaaagctggtcatgtccatggcttaaaccagccatacagggcgggaatgacatcttcccaaggcttcagactactcctaattccctttagggattggaaagagagaggagaggtctgccttccctgagcacagtggagtggtggacacactctttggagagctgcagtgtgtggtgctgacatggcttctatcacaaccccagcagtgaaaaaacgctgataaactctacagtaagagaatgtaacttgtctccagaaagct

SEQ ID NO: 69854 - DNA, 461 bp, Homo Sapiens
  misc_feature (244)..(348): n is a, c, g, or t
agtgctgtgctggcaggaaaatagggactgagaaaaagcagatcctatactatagggactgtagtatctatgacgtagccagccattctttgctcccaaggcaagaagaaagagatgacagagtcaatatagggttgccaaatcggattttctaaaatgagtaggaagttggatttttatgtgcaacagtttcttttaatgctttgttgatatgtgattgtcatgcaataattattcatatttnnnnnnnnnnnnnnnnnnnnnnnnnnnnnnnnnnnnnnnnnnnnnnnnnnnnnnnnnnnnnnnnnnnnnnnnnnnnnnnnnnnnnnnnnnnnnnnnnnnnnnnnncctccttgccttccctaggaaaccgttgatttacattttttactttagatttgtttgccttttctagaattaacacaattggaatcataaagtatttatactctcaaaaaaaa

SEQ ID NO: 69855 - DNA, 783 bp, Homo Sapiens
  misc_feature (131)..(131): n is a, c, g, or t
accctaggcacgtgctccagcaagagccccaggcaagacaaagggagcaggcagcagctgcagaaacagccctagacaggtgctggcctcaaccctggcaggggagggggagcccagagtgatgtttctcntaaggccaaacccccaggggtgggtcatttgagaggagttccagctgttctggccacactgggctggtggggaaggagcggcggcctctttccttggagggtccctgattcctgaggatcctccccgagccaggcacgggggaccacagggctgccgtgagcacccaccctggttctccaggcccctctgtccagaggcagggcctgaacctcgggctcctgcctggaccagtgacagcattggggagagaagcactgggggtcttcagaccagccagcaaggggccgtgccagtgcccagagagcaggtcagacaacaggcaaccctgaggcagctggctccctctctctgccctgcagggcttgccgcagggcgtgaggctccccagccacagccccctcttacttgccttaaaactggagagaggaatctagtatttgcacttagcaaaatatttaaaaactgaaaaaaatgtgcatgatctgtcactttgtataaaaacaagaaacgattagttcattaaactttttctttaccttctggtagtaaaaatagataaaataattccgtttcaactactgtgtgtaaaaagcctgtatcatatgtaactgggacttttgtaaataaatgtttgtgcgctctgctccctcc

SEQ ID NO: 69856 - DNA, 894 bp, Homo Sapiens
  misc_feature (41)..(41): n is a, c, g, or t
  misc_feature (113)..(113): n is a, c, g, or t
  misc_feature (196)..(196): n is a, c, g, or t
  misc_feature (201)..(201): n is a, c, g, or t
agagagtagatgaatttctctagcatagcatcatacatttnagccatctgaggctatgagcgtgcctgcaaagtcactctgagcaacacaagtggagttgaaagcagatcaangccagaccactgggcttgagtcctcacatgcaagcatgtagtcttcaccatggagaagggggttgcctttctcaaagcttttntcttntaaattaagaaaaagaactgattaatcagtctagtgtttcattttaaaaacatatgaaagggtgggtaacttgcagaagaaagtatttggagcctataattccattaaaagttataatggcggtcatagttggggaagcagcattttgcatattatatcaaaatgttatggtaccataaccatccaaatgttaatggtaccaatttcttctatcctagaaacatttcattttatgttgttgaaacataacaactatatcagctagattttttttctatgctttacctgctatggaaaatttgacacattctgctttactcttttgtttataggtgaatcacagaatgtatttttatgtattctgtagttcaatagccatggctgtttacttcatttaatttatttagcataaagacattatgaaaaggcctaaacatgagcttcacttccccactaactaattagcatctgttatttcttaaccgtaatgcctaggcctaacctcaaccaaccttccacaatcttgttcacagtcagagacccaaaaaagagtgttataagtggggtgtcactattgtgaaagtagtgctaatggtgttgaattggtacctatgattcttcttttgaattagattgtatgtttcatgatctcaacttacattactaaaattcaataaactgatcatttagatg

SEQ ID NO: 69857 - DNA, 1012 bp, Homo Sapiens
  misc_feature (21)..(21): n is a, c, g, or t
caataggtttcatgttaattntttgccactggagtcaattttgctatgagcaactgtaaggctggtaacctttaaattatttggttgatgtggaaaattggtgatgtaacactgtttctagatttttttcattgcctttttattctgatattaggttaatcactttgaagctatagttatgctgtaacatttagcatggcttcacaccaagttagtgtagccaatgaggaaaaagttaccataatgacagcagttgtccgagaagtgacagctgtattactcagagcttttacttcttacacctagaatattaaaatataaaacaaggggagaaatgtgacagtctattttcagttgcacatatgttccttatatataatgtttgacagttcaatctctgggtggaataaagaacacttacgtatcagtaatgggaatttttaaagatttaaaacaaatatgcaaaaatttgctatgccaagatgctggagcataatataagactgtatttggtgtgcttgttttgtttctttggtagagtttattaggtgaatcttctaaaactttccttctgttggatcccagtgacgtggaagtcatcagaaccccacggtacttggagtacctctctgcaccaagatagctggctgattttctgctcagtcacaattttacttgaaagcaagaattgtcctagctccttttccattattccaaaacgtttaacgttcaaagcagggtctcattaaaaaagaaactactggttgatataattgagatattacaatttcagaataaacatttgattaaaaataaggaaatcctcagttcatactgtatttaaaagagaattggtaacttgaatgtgtgtaattttttggaacctgtctaaaaaccaaatacccctgcaaacagatacagcccaccctattctatttaaatattttgctgttttattttatagaaattattttgctgaattcacaaatagaatttgatttaagaagaaaaa

SEQ ID NO: 69858 - DNA, 641 bp, Homo Sapiens
cagatgattcattgagctcaatgcagcctgaaattttaaaaaagttgtataatacgccaaccagtcaagatgtgttttgaccagagatttagatatgtccaatttcctggctcatttcattgtgctctatgggtacgtataaaaagcaagaattctgtttcctaggcaaacattgcaactcagggctaaagtcatccagtgaaacttttagagccagaagtaactttgtcccagtcctacaatgtgaaaagagtgaatagttgcctctttttagccattttcatggctggtacatattcgtacgcattacttttcagaatcaatacgcactttcagatattcttatttttattctcttaagtctttattaactttggagagagaaatgatgcatctttttattttaaatgaagtagatcaacatggtggaacaaaatgataaagaacagaaaacatttcaatatattactaataactttttccaatataaatcctaaaattcctataacatagtattttacagttttatgaagctttctattgtgacttttatggaattaagagatgaagaagatgagatattttagcatttatatttttcaaaattatatgtatacttaaaaataaagtaactttatgca

SEQ ID NO: 69859 - DNA, 1183 bp, Homo Sapiens
  misc_feature (472)..(498): n is a, c, g, or t
  misc_feature (959)..(1050): n is a, c, g, or t
  misc_feature (1056)..(1056): n is a, c, g, or t
ttccctgatgatatagtccgaccgagtcggccagtcatgagagacgaagcgccatccaaacccttcccggagtacgatcatatcactgccgcagttccggatgaaacggcatggcgcacgcattatgtgagtaccactcatagcctcaggcttacacttatgctccgctcgtatgtgtgtgactgtgagcggtaacaattcacacaggaaccagtgtgacatgatacgaattaatacgactcactataggaatgtggccctcgaggccaggaattcggcacgaggttaatatttaaatatgaatcttaagcaaaacagtgaaaataaccatcttgatttagtgtttttctcccatatgtgaattgtatatacttaggtgaagacaataaaatcaactgaactgtaagcttagaataggactgaggtaattctgcacagcaactttactaatggtacattgttgcttcaaaannnnnnnnnnnnnnnnnnnnnnnnnnnaatgaatggccaaggggattagtggtttgcctgtggaggtcctccaggcattatttggagttgataatacttcagctacaaccaagcggaatctcttttttttggaggtcctcgaagcattatttggagttgataatacttcagcttcaatttggagttgataatatttcagctagaacctagtagaatctgtttttttcctttggaggtcctcaaagcattattggagttcataatactgaagctagaaccaagcagaatctgtttttttctgaggagtatcggtagcataaatgtgattataaacatagtacacttgatatatggaggcagtgacagctatttttacaaaatttaaatctgcaaatggattcaacatgtttatgggttattaaaattgtctgatttcttaggttctttatagtacacgtgttgaaaataaatgattaagaattgtttcnnnnnnnnnnnnnnnnnnnnnnnnnnnnnnnnnnnnnnnnnnnnnnnnnnnnnnnnnnnnnnnnnnnnnnnnnnnnnnnnnnnnnnnnnnnnttgtcnggccgcctcggcccctcgaaaagttttcaaaacctttcgttgggcgcgcgggcccagaaggaaagggaacagggccatagcggttccctaggaaacccgggccatgactagggctgggattcccccc

SEQ ID NO: 69860 - DNA, 2611 bp, Homo Sapiens
  misc_feature (143)..(645): n is a, c, g, or t
  misc_feature (921)..(929): n is a, c, g, or t
  misc_feature (1963)..(2015): n is a, c, g, or t
  misc_feature (2153)..(2161): n is a, c, g, or t
  misc_feature (2454)..(2454): n is a, c, g, or t
cccccacagtcatttggaaacccccctttcccggaggagaaggccgacagttcccgttagcgccagttcggaacaggaaagccagagaggactccccaggggaaccccttgatctttattgtcctgtcggtttccccactttnnnnnnnnnnnnnnnnnnnnnnnnnnnnnnnnnnnnnnnnnnnnnnnnnnnnnnnnnnnnnnnnnnnnnnnnnnnnnnnnnnnnnnnnnnnnnnnnnnnnnnnnnnnnnnnnnnnnnnnnnnnnnnnnnnnnnnnnnnnnnnnnnnnnnnnnnnnnnnnnnnnnnnnnnnnnnnnnnnnnnnnnnnnnnnnnnnnnnnnnnnnnnnnnnnnnnnnnnnnnnnnnnnnnnnnnnnnnnnnnnnnnnnnnnnnnnnnnnnnnnnnnnnnnnnnnnnnnnnnnnnnnnnnnnnnnnnnnnnnnnnnnnnnnnnnnnnnnnnnnnnnnnnnnnnnnnnnnnnnnnnnnnnnnnnnnnnnnnnnnnnnnnnnnnnnnnnnnnnnnnnnnnnnnnnnnnnnnnnnnnnnnnnnnnnnnnnnnnnnnnnnnnnnnnnnnnnnnnnnnnnnnnnnnnnnnnnnnnnnnnnnnnnnnnnnnnnnnnnnnnnnnnnnnnnnnnnnnnnnnnnnaagaattcggcacgagggagatattcaaatgagagaagttgctgatattcatcagtgtgtttggacagttcatagggtccacaaatcaaatgaggttgtttcctgaagtagaagaaaacagaactttgcaattgatactgaagtactttgccatggagttagtaactcctgagcagaccattttagatggctcagcatttggcaggaagacttctccattccctgcttatatctatggaaggatcagctgttggatgtctagaacttctctatttnnnnnnnnngagtaggtctaaaattaaattattataagcaagcatagacatgggtcttccagttgaattgtccattaccgtaaaacttaatggtggacaagttagctgtggttgattcctgtgtggcagtaaattgtcttctgtctgcttaccccaaataataaaagctgctaggaagtttagattttgaaataggcagtttaatgctttgagggtttctagaaatacagaaagtcatcaagtaaacactgcatgtctaatcatctcagagttgtggctgttatctcttcaggaattggtccacagggtaaatttcaacaattcatacgttttccattgtcatttctgaggacctttgagatgagagaaaggaaatctagtggaacaggaaagagagttacaccttgtgggtgtgagtttgggacctgttggcagaagggaatgtcactccctggaaacaggttcagcatgtttgcacttgttattttgtagctttaatgatttttgttttctaatagggcaaatgtctctaagcttggtgtttagagctgcttcatattttaaactagttccattccacagttctagttcaaaccagtttttacagcctcctgggtgggtcgtcttgacccaaactcttgtgttgttacattttgagaggttttcataccagaatgtaccaaaaagtgcacaaggtaaaggtaatttacagccagaaacaaatatacatttgtttcatttcttgactttccctaagcagataagcagaaacttgtttaactcattactttgtttgatgtgtcttacatatttttgactaaaagttatagaatgttattcctctgggggaatcttttacaggtggaggaatggggatagcagtattgcctcagattcaaactggcatcaccataaaccctgtaggccagggtggaatgaagtcagctcctttttatagttgaaatacaattttttattcaccattgtctgcacaaatccttgaaaataaacctttttttccctaccaagaagaaagagaattnnnnnnnnnnnnnnnnnnnnnnnnnnnnnnnnnnnnnnnnnnnnnnnnnnnnngaaaccttggcgcccccctcgcccctcgaaaagttttcaaaacctttcgttgggggcgcggccccagaaggaaggggaacagggccatagctgttcccaaggaaacccgggccatgattagggctgggatcctcaccnnnnnnnnnggcccgagggcaaccaagggttctgaacaactccaaagggaagttgtgaggccatttacgggctctatcaaaaggaagcccaagcggggcctcgataacaaaattagcccccccggcgccggacaaactctatcggaagaaacggggggggaaaattccatttaaaaaaattttccggccccaaaactgtggaaaagcccctctccccgaaagccgcccatttaaattggagaccctgtgaattatgccgcccaaggcgggtaaatattcagacacaaccctattaggcaccngccgccttttgaacgcgcctagaacaaaaatattctttgtcgcccccaaatagagagtgagaggaaaaaccaagggaggaggtacacaacaaaaaaacatagttgaggacccagaataaatgtgggggcacaccacggtgtttataaatattacgaa

SEQ ID NO: 69861 - DNA, 908 bp, Homo Sapiens
gatataagcagggaatggagaagtcttcctgccaaatgctgagccatctaaaatggtctgctcaggagttactaactccatggcaaagtacttcagtatcaagagcaaagttctgttttcttctacttcaggaaacaacctcatttgatttgtggaccctatgaactgtccgtacacactgatgaatatccagcaacttctctcgattggaatttctcatgtccttaaagtaaatagaatttccagagacaactaaagagcaatgcaatatgaagaaaattaaaatttggctaagaaaaataagtaatcaactaaaaattgccataacactcagacttaaacagaaaataagtttgttgtcttttataagatgacaaaacttcaatctaacatcacaagttcttatactagatgaatttactagtatatgaatcaatatactagatttctttcttctaccccaactgcaaatatactaaacaattatttcttcaatagtttctttttcccctagtcgtggcatttaaaactgagtaacagtatttagcactaagtaaatttagaaaatataaaaaggttttacgaaatagcaatagttgattcatttttcatataccatctgatcaagtgaagtctccatttgaggatactggtgaacagaaagattttttcttgtctaagccactgctttctggtctcatcacacagataattctcaaattttatgtaggcccagattttcttggcaaaactctcaagataccagcacataacacagctacttcatctgttctctttttgcaatgagcactatgcctctcttttatgttcccggatgggtacatgaaagataaatttctaaagccaaagaattcggacgcgtgggtcgacgatatcccgggaattcc

SEQ ID NO: 69862 - DNA, 1125 bp, Homo Sapiens
  misc_feature (432)..(443): n is a, c, g, or t
  misc_feature (997)..(997): n is a, c, g, or t
  misc_feature (1067)..(1067): n is a, c, g, or t
acaatttaaatcaaatgataatttattctaagggtttttacaaaatacgaaaattttacatacataagaagaacagtataactgagcaacttacattctaattaaaactttgttgcaaaacatgtttgtgactactcttatgctgctttcatatagtaaagttataagaaaaacaatcatatatatgcagggttttaaaaaaataaactcataaaaatacaggcttgagacctattttagaattaagtcaaaacaagccaacaactgaattgtacctatggccagtgggtggcactaaaatacatttgaggcttgttttaactgtttgttttctcaaggcagaaaaacaccagtagtttcagtctcattgccctaatatggaattccatattttattagagattacagagtaaatagtttcttaaggtccannnnnnnnnnnnatcatcactgatgtctgtctccattccctgctccactttgagtatctttctgcgactttttcccacaacctacaaaggtcctgcaagggtaccagaccctcttaactgtggcacagaattgtggtgtgaaacacatgatggcaaacaagaacattttgcttcttaacaataccccatgtttaatgctctggggcagctttttctttgaagcagcagcagaaattcaattttcctagcttgttcaaatatcttatttaatattagagtcacaaattacacattttgttatatttaaatcccttgggccttgtaatcaaagaagcacatgcagattgacttttacatgctgtgtagtattccttaggtgcaatagatagaaagtgaggatatttgtccacctactcagattttcaagatcagattccaccggtttagtagttttcagtggaggagccagtggaatttgggctcatttggaaatcttggcaatcaaaagcattctgagaggcagtgttgcttcaatccaagtattgggggagtttaccatcttctcncagagagcaacttcctctgaagtagagtccatccagtccacttcagtcccataacttttacctgttccanagccaatacgaagacctcccaaaaattggttggttaattttgtatggtcccagacagt

SEQ ID NO: 69863 - DNA, 680 bp, Homo Sapiens
aagacaacaagttttaccgggcagaagttgaagccctccattcttcgggtatgacagcagttgttaaattcattgactacggaaactatgaagaggtgctactgagcaatatcaagcccattcaaacagaggcatgggctggaaaacattttcagacactgtgctttatcctgaaaggatttggtgaaaagggatctctgagctccaggggagctggaaatgcacaggaggagtcagaagacctgggttcgagtcctggctctgccacttactacctatgtgactttgggaggaagaaggcacctacgatcaaactctggagttccgtaggggaggtgatggccagccaagacgatccactcggccaacccaacagttttaccaaccaccccgggctcggaactaataggaaaagtagactctttgtgaagaaacgagccagtgactgaaacaccctggtggaaacctgttgacagaccttccactttctcttcagaataagtagctgtggtggatattattatttgaagaaagaaaaaacagattttagggtggaaaaaacagtcaactcacacaaagaatggaaaaaaatactgagttaaattaagcaaataccttttacaagtgaaaggaagaatttttcttctgccgtcaataaaaccattgtgctataaaaaaaa

SEQ ID NO: 69864 - DNA, 1064 bp, Homo Sapiens
  misc_feature (76)..(110): n is a, c, g, or t
  misc_feature (315)..(315): n is a, c, g, or t
gactgatgtccatagggcgctactccgcgcagcgaacgacgagcgcagcgaaggtcagtgagcgaggaagcggcgnnnnnnnnnnnnnnnnnnnnnnnnnnnnnnnnnnncagtcgacggtaccggacatatgcccgggaattcggccattacggccggggagaaagccaaacatctattcctgattatttttatgacaggaaatcacaaacaataaataatgaagctttcagtggtataaaaattgaaaaacattttaatgtaaatactgattatcagaatccagttcgaagtaatagtttcattggtgttccnaaatggagaagtagaaatgccactgaaaggaagacgaataggacctattaagccagcaggacctgtcacagctgtaccctgtgatgataaaatattttacaatagtgggcccaaacgaagatctgggccaattaagccagaaaaaatactagaatcatctattcctatggagtatgcaaaaatgtggaaacctggagatgaatgttttgcactttattgggaagacaacaagttttaccgggcagaagttgaagccctccattcttcgggtatgacagcagttgttaaattcattgactacggaaactatgaagaggtgctactgagcaatatcaagcccattcaaacagaggcatgggaggaagaaggcacctacgatcaaactctggagttccgtaggggaggtgatggccagccaagacgatccactcggccaacccaacagttttaccaaccaccccgggctcggaactaataggaaaagtagactctttgtgaagaaacgagccagtgactgaaacaccctggtggaaacctgttgacagaccttccactttctcttcagaataagtagctgtggtggatattattatttgaagaaagaaaaaacagattttagggtggaaaaaacagtcaactcacacaaagaatggaaaaaaatactgagttaaattaagcaaataccttttacaagtgaaaggaagaatttttcttctgccgtcaataaaaccattgtgctataaaaaaaa

SEQ ID NO: 69865 - DNA, 653 bp, Homo Sapiens
  misc_feature (251)..(263): n is a, c, g, or t
  misc_feature (572)..(583): n is a, c, g, or t
ttaaggagtccctagaattctggggattgggtcctgggaattgcctcatgattcagtctgagacagcggatgtctcttctctcccttcttaatcagttttcttaatgtagctgctagtggggcaagtataaccaccaatcctcaggtgaagcctcttagttgttccctgggagtggacgcctcagctcctggctctgcccactaatgtggcctgtgcacacactgcagctgagcagtccaggttggagagnnnnnnnnnnnnncaaagcgaatcccaccccactaaccttggagcaggaaacactcctgcagaccctgccttacagagaagagaatacttgaaatatgacactcggggaattggtaacaccaggaggctgtttctactgtttgctgcatgatttgcagcttcaattggactactttttctaacaggaagaaatgagccttgggaataccaggacgaatatatatagtctacagactctgaaacaaagctgttataaaattattggatacaacttaaagtaagggaatagtctgtttttattagaagatgatccttctgtgtnnnnnnnnnnnntcacccattcattcattaactcattcattcatgttaatatttgcatgaataaatgaatatgcaaacattt

SEQ ID NO: 69866 - DNA, 2322 bp, Homo Sapiens
  misc_feature (1581)..(1594): n is a, c, g, or t
  misc_feature (2267)..(2281): n is a, c, g, or t
gggtccggaattcccgggatatcgtcgacccacgcgtccggagcggggcccggcgccgaccctgagtgcagcctgacccgccctcgcgcgcgcgccctccccggccgggcccactcgccgcgcgcccagccatgaacctggcgagccagagcggggaggccggcgccggccagctgctcttcgccaacttcaaccaggacaacacagaagtgaaaggggcatcaagagcagctggtcttggccgtcgcgctgttgtctggtccctagctgttggtagtaagtccggttataaatttttctccctttcttctgtggataagctggaacagatctatgaatgcaccgatacggaagatgtgtgcattgtagagagattgttctccagcagcctagtggccatcgtgagccttaaagcaccaaggaagctaaaggtttgccactttaagaagggaactgagatctgcaactacagctactccaacacgattctggctgtgaagctcaacaggcagaggctgatagtatgcctggaggagtccctgtacatccacaacattcgggacatgaaggtgctgcatacgatcagggagacgcctccaaaccctgcaggcctgtgtgcgctgtcaatcaacaacgacaactgctacttggcgtacccagggagcgcgaccatcggagaggtgcaggtcttcgataccattaatttgagagctgcaaacatgattccggctcacgacagtcctttagcggcactggcctttgacgcaagtggaactaaacttgccacggcttcggagaaggggaccgtgattagggtattttccattccagaaggacaaaaactctttgagtttcggagaggagtaaagaggtgcgtgagcatctgctccctggccttcagcatggacggcatgttcctctccgcctccagcaacactgagaccgtgcacatcttcaaactcgagactgtgaaagaaaaacccccagaggagcccaccacctggaccgggtacttcgggaaagtgctcatggcctccaccagctacctgccttcccaagtgacagaaatgttcaaccagggcagagccttcgccacggtccgcctgccattctgcggccacaaaaacatctgctcgctagccacaattcagaagatcccgcggttgttggtgggtgccgccgacgggtacctgtacatgtacaacctggacccccaggagggcggcgagtgtgccctgatgaagcagcaccggctggacggcagtctggaaacgaccaatgagatcttggactctgcctctcacgactgccccttagtcactcagacatacggcgcagctgcaggaaaagcctacacagacgacctgggtgctgtgggtggcgcctgcctggaggacgaggccagcgccctgcgcctggatgaggacagcgagcacccgcccatgattcttcggactgactgaacttgacctgtgacctctgacccggggagcagagaacactggcttcacagaggactttgtgcattgctgctatgaactttgacctgagtcgggggagaggatggcagagactttattnnnnnnnnnnnnnngattgtagtggtagtctaactccataacgctgaggaaatacatcattttcacttcaggggcttttaaatcctgcttatgaattttagctttttgtttgtttgttttctctttttgccaaaattaactgtttggtgaagcccgcaaaacctcctcgctttgcatgcatgaacgtgccaagccagcataggggagctagaagccactttccagccacctgccgttgggttttttcatatctgtacataatgccgagtgcgtaaggaaaccgtggcgtcgcgcacagtgggtctgcttgtcaaggccagttctgcagtgacaggcccaggggctgcccaccaggtgtgctgggcagacttcagctgggacagaagtccgatctccctagggccccacctggaccattttccctccgttttattttgttaattaaattctttccaaattggatcgctctgggatttcttccatggtggacttttgtttctgatcttgttttccctgtggatattggaggacagcgaggttctttctgatactaaaaacctttctttcaggcagcaaatgaacttgaaaggttgcctggactcgctggagcaaaggaaagcgattttgtttgtataattaaatgatctgttcttctacttcactcttcctgttgaaaaactgtgtgannnnnnnnnnnnnnnaagtaaagtttgtagctcctcccatgcccaggaaagcacag

SEQ ID NO: 69867 - DNA, 1468 bp, Homo Sapiens
  misc_feature (92)..(92): n is a, c, g, or t
  misc_feature (150)..(150): n is a, c, g, or t
  misc_feature (157)..(157): n is a, c, g, or t
  misc_feature (162)..(162): n is a, c, g, or t
  misc_feature (212)..(212): n is a, c, g, or t
  misc_feature (243)..(243): n is a, c, g, or t
  misc_feature (284)..(284): n is a, c, g, or t
  misc_feature (1005)..(1017): n is a, c, g, or t
  misc_feature (1099)..(1132): n is a, c, g, or t
aactcggactgagtctccacaataagggacccccaaccctcagctgttgcgttcataaaaaggcaattgtatgcgtacccagagcggacatnggagagtcagttttggtccataattgagactgcaacatgatccgctcaggacatcctnagcgcantgccnttgacgcaagtgaactaaactgccacgcctcgagaaggggaccgtgatanggtatttccatccagaaaggacaaaactctntgagttcgagagggagtaagaggtgcgtgacatctgctccntgccttcagcatggacgcatgttcctctccgcctccagcaacactgagaccgtgcacatcttcaaactcgagactgtgaaagaaaaacccccagaggagcccaccacctggaccgggtacttcgggaaagtgctcatggcctccaccagctacctgccttcccaagtgacagaaatgttcaaccagggcagagccttcgccacggtccgcctgccattctgcggccacaaaaacatctgctcgctagccacaattcagaagatcccgcggttgttggtgggtgccgccgacgggtacctgtacatgtacaacctggacccccaggagggcggcgagtgtgccctgatgaagcagcaccggctggacggcagtctggaaacgaccaatgagatcttggactctgcctctcacgactgccccttagtcactcagacatacggcgcagctgcaggaaaaggtacttacgtgccttcatccccaacgagacttgcctacacagacgacctgggtgctgtgggtggcgcctgcctggaggacgaggccagcgccctgcgcctggatgaggacagcgagcacccgcccatgattcttcggactgactgaacttgacctgtgacctctgacccggggagcagagaacactggcttcacagaggactttgtgcattgctgctatgaactttgacctgagtcgggggagaggatggcagagactttattnnnnnnnnnnnnngattgtagtggtagtctaactccataacgctgaggaaatacatcattttcacttcagtggcttttaaatcctgcttatgaannnnnnnnnnnnnnnnnnnnnnnnnnnnnnnnnnccaaaattaactgtttggtgaagcccgcaaaacctcctcgctttgcatgcatgaacgtgccaagccagcataggggagctagaagccactttccagccacctgccgttgggttttttcatatctgtacataatgccgagtgcgtaaggaaaccgtggcgtcgcgcacagtgggtctgcttgtcaaggccagttctgcagtgacaggcccaggggctgcccaccaggtgtgctgggcagacttcagctgggacagaagtccgatctccctagggccccacctggaccattttccctccgttttattttgttaattaaattctttccaaattggaaaa

SEQ ID NO: 69868 - DNA, 842 bp, Homo Sapiens
ttcggcacgagggactggctggagcaataaaacaagacgcggtggacgggatgaggcggcggttgatcccaggtggcgagtggcggcgaccgaggcggcgagcggggcccggcgccgaccctgagtgcagcctgacccgccctcgcgcgcgcgccctccccggccgggcccactcgccgcgcgcccagccatgaacctggcgagccagagcggggaggccggcgccggccagctgctcttcgccaacttcaaccaggacaacacgtccctagctgttggtagtaagtccggttataaatttttctccctttcttctgtggataagctggaacagatctatgaatgcaccgatacggaagatgtgtgcattgtagagagattgttctccagcagcctagtggccatcgtgagccttaaagcaccaaggaagctaaaggtttgccactttaagaagggaactgagatctgcaactacagctactccaacacgattctggctgtgaagctcaacaggcagaggctgatagtatgcctggaggagtccctgtacatccacaacattcgggacatgaaggtgctgcatacgatcagggagacgcctccaaaccctgcaggcctgtgtgcgctgtcaatcaacaacgacaactgctacttggcgtacccagggagcgcgaccatcggagaggtgcaggtcttcgataccattaatttgagagcttgcaaacatgattccagctcacgacagtccttttagcggcactggccttttgacgcaagtggaactaaacttgccacggttcggagaaggggaccgtgattaggtatttccatttccagaggaa

SEQ ID NO: 69869 - DNA, 906 bp, Homo Sapiens
tagcgaggcctgggtggcgaattcggcacgagggatgaggcggcggttgatcccagggtggcgagtggcggcgaccgaggcggcgagcggggcccggcgccgaccctgagtgcagcctgacccgccctcgcgcgcgcgccctccccggccgggcccactcgccgcgcgcccagccatgaacctggcgagccagagcggggaggccggcgccggccagctgctcttcgccaacttcaaccaggacaacacagaagtgaaaggggcatcaagagcagctggtcttggccgtcgcgctgttgtctggtccctagctgttggtagtaagtccggttataaatttttctccctttcttctgtggataagctggaacagatctatgaatgcaccgatacggaagatgtgtgcattgtagagagattgttctccagcagcctagtggccatcgtgagccttaaagcaccaaggaagctaaaggtttgccactttaagaagggaactgagatctgcaactacagctactccaacacgattctggctgtgaagctcaacaggcagaggctgatagtatgcctggaggagtccctgtacatccacaacattcgggacatgaaggtgctgcatacgatcagggagacgcctccaaaccctgcaggcctgtgtgcgctgtcaatcaacaacgacaactgctacttggcgtacccagggagcgcgaccatcggagaggtgcaggtcttcgataccattaatttgagagctgcaaacatgattcccggctcacgacagtcctttagcggcactggccttttgacgcaagtgggaactaaacttgccacgccttcggaagaaagggaccgtgaattaggggtattttccattcccagaagggacaaaaactcttttgagtt

SEQ ID NO: 69870 - DNA, 1354 bp, Homo Sapiens
  misc_feature (517)..(532): n is a, c, g, or t
  misc_feature (686)..(707): n is a, c, g, or t
  misc_feature (1191)..(1221): n is a, c, g, or t
ccctcctggagctttccccctccccaggcttccctcagggatacggtgccccgccacagttcagttttggctacgggcctccacctccaccgccagatcagtttgcccctccgggggtcctcctccaccagccactcccggggcagcacctgtggctttcccaccgcctccgtctcaggctgccccggacatgagcaagcccccgacagctcagccagacttcccctatggtcagtatgcaggttacgggcaggacttgagtggcttcggacagggcttctcagaccccagccagcagcctccttcctacgggggtccctccgtgccagggtcggggggcccccccgccggcggcagcggctttggacgagggcagaaccacaacgtgcaagggttccacccctaccgacgctagcccgcggcgccgcgacgtctgcacggcccagacccaggattccaaacttgtgaactcgtgacaatcacaaacttggcggcaaagtggcgactcaaccttgcnnnnnnnnnnnnnnnnagggcgcgaggcttttggagcggctgtgggtgtcgtctggactgaggtttttaaatatttctttctctaacccatcagcacaataaaaaaaagtcactggttcaacaacagggtttaaaaaaaatgtcttcagctttaattcaaaacttcaggnnnnnnnnnnnnnnnnnnnnnnggaaattattttcctgagccttttgttttacggtatattgtaaacttttatgttaaagaaaaaatatacatttacaaattgtgagatttttaagagaaattttctacgatgtatactggcttattttttaatttaaaacggggtttccgtcggcactggtggagggggtgcgctgttagtcccctcgctcctggctttgggggttgggacttggtggtccagaaactctgggagcttctagaagaaatctactgagtgtatttctgttttttgtttaattccttgcttttgtcgactgacctgcttggtagtgtctgaggtgaactgtgggggttgcgcacagccagccgcgtggatcccacgcagcgctgaaccgaaccgagtaggaagcctttctccccaggcacgtggcttcagggcgtttcccattgaccagtttgaccctggtttgaataaagagaagtgcgtttggattagaaacccnnnnnnnnnnnnnnnnnnnnnnnnnnnnnnngggcggcccggctctagagaaatccccctcgaggggggcccaaagcttacgccgtaccccagctttccttttgtacaaaaggggggccccccaaataaaggggagtcccgaattttaaaaaggcttaggggca

SEQ ID NO: 69871 - DNA, 688 bp, Homo Sapiens
  misc_feature (26)..(26): n is a, c, g, or t
  misc_feature (119)..(136): n is a, c, g, or t
  misc_feature (140)..(322): n is a, c, g, or t
gggacatttggcaatgtatgacattnttgatgtcacaacagccaggaagaaggctactggcattgagtgagtagagaccagggatgcggttaagcatagtgcaatatcaccatgctacnnnnnnnnnnnnnnnnnngaannnnnnnnnnnnnnnnnnnnnnnnnnnnnnnnnnnnnnnnnnnnnnnnnnnnnnnnnnnnnnnnnnnnnnnnnnnnnnnnnnnnnnnnnnnnnnnnnnnnnnnnnnnnnnnnnnnnnnnnnnnnnnnnnnnnnnnnnnnnnnnnnnnnnnnnnnnnnnnnnnnnnnnnnnnnnnnnnnnnnnngatcagatgttcttgcataatgggcaggtgagctctggagtcacagtgcctgggcgtgaatctcggagctgtgtgttctcaggaatgtcacccaaactctgttctgttggtctcctcacttgcaatatggggcattaacagtacttaccacctggggttactgtggttagttactgtgaggatgagataaggcggtggttttaaactgtgggtaggattttgtcctccctcagccccactctttcttggggacatttggcaatgtatgacatttttgatgtcacaacaggcaggaagaaggctactggcattgagtgagtagagaccagggatgcggttaagcatagtgcaatatcaccatgctac

SEQ ID NO: 69872 - DNA, 2332 bp, Homo Sapiens
  misc_feature (138)..(184): n is a, c, g, or t
  misc_feature (1455)..(1464): n is a, c, g, or t
gtgggtatttttctatttttagtattctggcagcaaatttgaggttgtacacatttcattatcaactaaacaaaacaagaagcaagcaaatactttaaggttttcacagcctttttcatcacagggaaggaaaaaacnnnnnnnnnnnnnnnnnnnnnnnnnnnnnnnnnnnnnnnnnnnnnnncgtctttccaaattcctggccacatcaatagtctagaaagtgcttatcaggacaccaaatatttctgtgttcctgagataggtctgaaatttttacccagtattgaatgtatacctgaagtggtcaaataatacttcttataaaaaagttgttctacctaagattatagttttaactttaaattaaagaatggccacaattaaccaacatgcaaaaattctcagactaaacactgagaaattcttcatacaatgcatttgccaccttattgcatttttaaaatctttattctgtagtgaattggtattcccaatctgcctaagcaaaggcatgcccttctaacaagatttgcttagagcagaggtgatagaaggaagaatccgaagaccctctggcatggcaatctgggagcagcacattgttgatggagtccaagtgagcacatttcacacaattcatttagtgacaagtgggcttgctcccttttcatccaggaaaaaaactactcacagaccactgcccagaatctggaataagaaccctcattttaaggtattcttcccaacaaataaatatctaaatattgaaagggggcatatcagaaaacttaaaagacacaataaccaaaaccaaaaccctcttcaaaacaagtaagcaatgtctgtatttagttcactctaaaacattcttagcttttcttgcagtttgttcctaaaagatttgattgggcacaagaggaacgaaattgttaataaaataaaagcttatttttgttttgctgtggataatcggtacaaaacgtttccagatctgagacttagatggatcttttaaggtgaaaggagaatgccaggttctactgaaataatatctgaaaggaacaaagagccatttgccatgtgctttttctaagtgcccatgctggaaaaaattttctcaataatatgaagatgctggtacaacttttcctattaaacaatgtcttacacaaccacatgcgttacatttatagacagatttacaatttggaaggaaaaaaagttctgtcttaataaaattagttttttttacaaactgtagtccaactaaagttctctgtctcctcacgcagcagaggcattatctccataaggtgtgtgtggtccaggaaaacacttccccgagcagatcctgccagatttggttcattccatgatgtcgactctgcttggagcaccacactaactttagggtcattacagatctgatgccttggtcttctgctgtttgannnnnnnnnncattcatcttcatcatcctcatcttcctctccatcagacagggatgtacacggccggatctgtcggtagcggtcaagccatttttctaccatctgagtgaccagggggtgatttcgccgccgagaactcttctgcatggcaaccagaactcccccctccgtcacacagcagtccagccactccctgagcagtttttcttgctgttcctcattacctagctcctgagcagaaaggaagtgcacatggagtagcttcctttcactgtcaaccagaggcaaaaatgtgatggtgacatcatcatcggtattgagattagcaccagcacctcggttgccatagccatcattttccatggcaaccaaagcagagaagtggcccctcgtataacccagagcaatcggacttttccaacaaaaactctgttcccacaacaaaggcagataaacaccttgaaaccgagtatatcctaaagtttctccccgcaaactcttgtaatattttactccataaactataattggtcgtctaagaatatgtgccagtacaaaaatgtgcgtctgctccaagcttgctccaggctgactagcaagagagagtataaatgcccagtcttcttgccactgttcttctctcaaggaaaaatgtaaaccaaagctctgagaataccatgattcccaatctttccagcgtgtgtaaaaccaatgtgaacagtcatgcaggctgtcatgcagggctttccgaagcactgagtccttgtcatagatgccccaggtagcttgtagaactgaatcaagtaggcagtctcctgcagtccggttccaaagtgcatacagtcgactgtccaaacgtgtagccatccccagggggg

SEQ ID NO: 69873 - DNA, 400 bp, Homo Sapiens
  misc_feature (139)..(165): n is a, c, g, or t
tgtgggtatttttctatttttagtattctggcagcaaatttgaggttgtacacatttcattatcaactaaacaaaacaagaagcaagcaaatactttaaggttttcacagcctttttcatcacagggaaggaaaaaacnnnnnnnnnnnnnnnnnnnnnnnnnnncgtctttccaaattcctggccacatcaatagtctagaaagtgcttatcaggacaccaaatatttctgtgttcctgagataggtctgaaatttttacccagtattgaatgtatacctgaagtggtcaaataatacttcttataaaaaagtttttctacctaagattatagttttaactttaaattaaagaatggccacaattaaccaacatgcaaaaattctcagactaaacactg

SEQ ID NO: 69874 - DNA, 417 bp, Homo Sapiens
ttgcccccaacagtccaagaaaaattatttgatgaggtgcttgatagagacgttcaaaaagaattagaagaagaatctccaattattaactggtccttggaattggctacacgtttggacagtcgactgtatgcactttggaaccggactgcaggagactgcctacttgattcagttctacaagctacctggggcatctatgacaaggactcagtgcttcggaaagccctgcatgacagcctgcatgactgttcacattggtgagctggcattctgccctgtttcaacccaggagtgcatttgctggattatttccttgtagtggtgggatactttttatgtcagttatattttctatggaaactggaggaaaaacagttcattttggacattaaaatactttgaacacgtaaaaaa

SEQ ID NO: 69875 - DNA, 1016 bp, Homo Sapiens
ggggctgaaggcggggaaagatgataaaggaaaaaggaaacgaaaaagttctacatctggctcagattttgatactaaaaagggcaaatcagctaagagctctataatttctaaaaagaaacgacaaacccagtctgagtcttctaattatgactcagaattagaaaaagagataaagagcatgagtaaaattggtgctgccagaaccaccaaaaaaagaattccaaatacaaaagattttgactcttctgaagatgagaaacacagcaaaaaaggaatggataatcaagggcacaaaaatttgaagacctcacaagaaggatcatctgatgatgctgaaagaaaacaagagagagagactttctcttcagcagaacgcacagttgataaagacacgaccatcatggaattaagagatcgacttcctaagaagcagcaagcaagcgcttccactgatggtgtcgataaactttctgggaaagagcagagctttacttctttggaagttagaaaagttgctgaaactaaagaaaagagcaagcactctcaaaaccaaaacatgtaaaaaagtacaggatggcttatctgatattgcagagaaattcctaaagaaagaccagagcgatgaaacttctgaagatgataaaaagcagagcaaaaagggaactgaagaaaaaaagaaaccttcagaactttaagaaataaagtaattaaaatggaacaacagtatgaatcttcatctgatggcactgaaaagttacctgtagcgagaagaaatttgtcattttcctaagggcataaaacaaattaagaatggaacaactgatggagaaaagaaaatgtaaaaaaataagagataacaacttctaaaaagaaggatgaattatctgattatgctgagaagtcaacagggaaaggagatagtcgtgactcttcagaggataaaaagagtaagaatggagcatatggtagagagaagaaaaggtgcaagttgcttggaaagagtcaacggcagg

SEQ ID NO: 69876 - DNA, 768 bp, Homo Sapiens
  misc_feature (125)..(138): n is a, c, g, or t
tttttttgcagttcatacaattgaagatttatgtaagttacttacttatttttaaactgcacaatgctgaagccagtctaaaaaagaatcaaacacaccactgcaagttaattcaatgagttacnnnnnnnnnnnnnnaaacagatttgtacagcaaaaagttcccagatcacagtctctaccatacagtcacctgtccagtgtgcaggaagccacaggggccctggccagaggggccaagagcagaagctgcactgcagagtttacttctacctacaggtgacatgtggctggaagaatcttgagttccctttgttctccagtgtatcttgtacaaaatattacatttgtttaaacacatatttacagagtttgcacaaatagaaaatggttacaaattacaaccaggcttggcaggataccagttcccctccccactgaccaaggtcagatgtgatgaccatttcatatttacagttgcaatttaaaaagtctgtgtttagagacctaaatgaagtttataaaaactggttaaatatcatcaactcatttatgtaagctgtacaagtagtggataccaattagtcagttcatgtcttgctccctgaagaaagattttgaagtaaaagaaaccctctcaagcaagcaacatacatccctggcctgtctgccagtttgtttggtttttgccggggaaggagatagaaggaagaagaggggaatggaacagggggaataggacaatctggttgaaactgtttctattcc

SEQ ID NO: 69877 - DNA, 1624 bp, Homo Sapiens
  misc_feature (335)..(354): n is a, c, g, or t
  misc_feature (1198)..(1198): n is a, c, g, or t
  misc_feature (1340)..(1417): n is a, c, g, or t
  misc_feature (1420)..(1451): n is a, c, g, or t
  misc_feature (1453)..(1453): n is a, c, g, or t
  misc_feature (1458)..(1458): n is a, c, g, or t
  misc_feature (1528)..(1529): n is a, c, g, or t
ttctgatggggataaatactgttttgcctctcccataggaatggaatacatttattctaaaatgatctttcacagaagtaagagagagggaaacctaaatatacctctaaattgtttgaagttggtcccagcagcataaaatgggttggccccaaagggttggagggtgggcttggttatcagtatttgttttcagaatgagatgggagcatctttcctttgccacgtgctttgtgcttgataacatcatgcttggttcaaacgacaactcagcacaaagccttgagtataaattgttggaatcaaaacatctcattctgatgacgtggtttaannnnnnnnnnnnnnnnnnnnaataggggtgggagggagggtactttgccccaaaagggagggtgtctgcactaaggatttagaaacactttggaagctcataacctcatcagaaactgcctttagccacactcctgaccttctagatgagtaacaaaaaaatgaaataagttcttggaaattaagccatttattttaatttgctatttttttcaatgttctaggtatctttaaatttgttattgtggaatcattttcctgccagatacctttatcaaaattattggcctcatgagagctgaagtaagtcagctttttggtgaactttagtggacttctgtgagattgtagttgtactttgtatctctaaatctaaagatagttttttaaaactcccaaagaaaatctgctctcctttctgatctaaaaactcatctttggggtaaagagttaagtgtccaaaggttgtcacagttcatgaggtcagagggagctagcctggcacctggactctgcccatccacagctgacagattccaacagaagtgtatttaaattctccagtagacaatgctgggtaagggagggggtagggctgggttattaagatacaggctgctgtattttacattggttgtgggggaaggggagcctggagaaaacaaagtcactattcccttttttgaaacaggaaaaaaaattattttttgttcagtaaaaatggtagagaattccaatgtccctagccacaagggaccagttccactgagaagtgaacagtgggaactcaaaatttcagaaacattgggggaagggaaaattggctttctcttaattggcagatgttccagtggggcgggggggnctctgtttttgttgggatgtgttatgttgtatgtacgcatatatggaccggagtctgctgagtttataaggttccaaaaatatggtaaaatcttggtttttgttaatttatctcaataaaagcccactggaactccaaaaannnnnnnnnnnnnnnnnnnnnnnnnnnnnnnnnnnnnnnnnnnnnnnnnnnnnnnnnnnnnnnnnnnnnnnnnnnnnnccnnnnnnnnnnnnnnnnnnnnnnnnnnnnnnnncntgggngggcccggctcgcgcccttccaaaaaatttttctaaaaaccttttcgttgtggcgcccgcggcccccccnnaagggaaagggggaacccgggggcccaaaactcttggtttctcccaaagagaaaaccccggggcccaaaaaaacaaagggggggtttgggaattt

SEQ ID NO: 69878 - DNA, 721 bp, Homo Sapiens
  misc_feature (16)..(16): n is a, c, g, or t
tccctgccagccaggntacacctgtgcagtggagcagccgtccctgtctcgcctgcccagcgccagatgacagccgcccagaggctgtcctctgccacatgcactgctcacctccgagaaggtcgggagcggggctgaagggtcccgggggcaggttccaggccagctcctccagcaggcccagcaggcctttcacctctgtccccaggtgatccacggtcttctctaccatctagagtgggaagtggggtaaagtcgaggacagaagtggttccacgttccgcttcatcagctaggtcctaagagagcagctggcggtccagtgcggtgcagtgggaaaggactgggcgctaagtgacctgggttttcctcactcaggctctgcccctacctgcctcagtttccccagatgacaatatcctagggggcttgctctctaaggctccttcttttttggcacttagtcacagatttggatgaagcgcctgtagaataccttctcccttttggactttgcagcctggagctcacattccttttgttgttccgccccctggtggtatctctgccaaatgacaggtttgggattctgaaatttactgagttcttaatggtttttccctgtgtatgccatggacccccattggcagtgtggtgaagcctacagacctcttctcagaataatgccttaaatacaaaaaataaaacatatagaattact

SEQ ID NO: 69879 - DNA, 707 bp, Homo Sapiens
tggccctgctccgcgccgcgggctctttggccgctgccgaacccttcagccctccgcgaggagactcagctcagagcacagcgtgtgacagacacatggctgtgcaacgccgtctagatgtcatggaggagatggtagagaagaccgtggatcacctggggacagaggtgaaaggcctgctgggcctgctggaggagctggcctggaacctgcccccgggacccttcagccccgctcccgaccttctcggagatggcttctgagccctggagctggagcccagcagttggaggtggtgcacctgccaggcagcgcccacagaaccagccctgtcctctcgacttccttccttagcttcatgtgaaataaaagctattctggtctcctctgtgtctgctgacagagtaacccgtttaactacagcctcctctcactccacttccatgcctggaggaagcctgcaaccccctccaggctcagacctggggacacccccactcctgtcatttataggggcagatggagcaggggttgattcacacagatgggggccctttgagtggccttgcttctcaaaatgtggccataggtgaaaagcaaggggatcagggtctcaggacccacccagactgtttaatccaaatttgcattgcaatgagacccccagggattttatgtgtccattaaagtggtttgttgttgttttt

SEQ ID NO: 69880 - DNA, 1369 bp, Homo Sapiens
  misc_feature (1303)..(1305): n is a, c, g, or t
  misc_feature (1326)..(1326): n is a, c, g, or t
ggggacaaaccagaaagtaaaaaatctggtctgctctggttttggcttccaaacattgggttttcctcttctgttgatgagacaggtgttgattccaaaaatgacgtccagagatctgctcccattcaaacacagcctgaggcacgaccagaggcagaactgcctaaaaaaacaggagaaggcaggctggttccgatttcccaaattagggttctcctcatctcctaccaagaaaagcaaaagcaccgaagatggggcagagctggaagaacaaaaacttcaagaagaaacaatcacgttttttgatgcccgagaaagtttctcccctgaagagaaggaagagggtgaactgatcgggcctgtgggcactgggctggactccagagtgatggtgacatccgcggcaagaacagagttaatcctgcccgagcaggacagaaaagctgacgatgaaagcaaagggtcaggcctgggaccaaatgaaggctgagaggtatggctcatcggtacaagagagatgcaaaaaactaagttggaaagtaaaggctacacacacatatggagcaccccatcccacagcacattacatccacctcacttcacagaacggagaacagagcagaaatgaccagaacacctttgtcaccatcacacagccctcctaaaatggaaccaaagcttcccagctccctcaaagctttggatgcaaagaaggcaccctgacttccacaagacaccagaattcacacggtactcagaggcactgctggggaagtttgttggtctttattagataaatttccagagacctgtccataatacccaacagaacatgactgtttctttgaggaaagggttataatgtctgtggtgtacaagtcgtttttggtataacttctttcctgctgctgctgcttcccggcaaacatagttttcctatttcaggcagagtgcggtatattccaggaaacactgtttcctactcacttagcttacttctttgttgaatgcctcactaatggcaagtttcaagatgttttgggtgacaatgcacacatgctgggcaaaagggtgatggccagtggctggcagctgggccagcagaagctaggacatctgtgagttgtcattctcatctatccatgtccactggcctgccagcatccgccagtgccttgccagtgtgcacggtcccacactgtggcccctgagtcccctaatgtacacgctgcagccagaatgcagatggagctggcttggctgttccctggatgggcaataaagaaagtgctgcatccccaannnaagggaaaaagaagaaaaaanccctcggaggcatctatggccgggggcgggagaaagaagttaa

SEQ ID NO: 69881 - DNA, 1763 bp, Homo Sapiens
taactataacggtccttaaggtagcgaggcctgggtggcgaattcggcacgaggcaaaggcaaccagtgctcgctgcggtctctggggatcgggaccgcggcggcggcccgcgagcgggatgttccggggcttgagcagttggttgggcttgcagcagccggtggcaggcggtgggcagcccaatggagatgctccacccgagcagccgtccgagacggtggctgagtctgcggaggaggagctgcagcaagcgggagaccaggagctcctccaccaggccaaagacttcggcaactatttatttaactttgcatctgctgccacaaaaaagataactgaatcagttgctgaaacagcacaaacaataaagaaatccgtagaagaaggaaaaatagatggcatcattgacaagacaattataggagattttcagaaggaacagaaaaaatttgttgaagagcaacatacaaagaagtcagaagcagctgtgcccccatgggttgacactaacgatgaagaaacaattcaacaacaaattttggccttatcagctgacaagaggaatttccttcgtgaccctccggctggcgtgcaatttaatttcgactttgatcagatgtaccccgtggccctggtcatgctccaggaggatgagctgctaagcaagatgagatttgccctcgttcctaaacttgtgaaggaagaagtgttctggaggaactacttttaccgcgtctccctgattaagcagtcagcccagctcacggccctggctgcccaacagcaggccgcagggaagggaggagaagagcaatggcagagagcaagatttgccgctggcagaggcagtacggcccaaaacgccacccgttgtaatcaaatctcagcttaaaactcaagaggatgaggaagaaatttctactagcccaggtgtttctgagtttgtcagtgatgccttcgatgcctgtaacctaaatcaggaagatctaaggaaagaaatggagcaactagtgcttgacaaaaagcaagaggagacagccgtactggaagaggattctgcagattgggaaaaagaactgcagcaggaacttcaagaatatgaagtggtgacagaatctgaaaaacgagatgaaaactgggataaggaaatagagaaaatgcttcaagaggaaaattagctgttcctgaaatagaagaataatccttaacagtctgcaaactgacattaaattctagatgttgacaattactgaatcagaaggcatgaaagagtataattttatgaaattcaaaattattcttttttcaagttgaaacttgcctcttctactttaaaaaagtatatagaacagttacttctaataatcagaaagagatgttttatagaacatttctttaatataaagttagagatgtcttcataggcagtatggctatctttgccacagaaacataagtaaaattttagagttctgttttccatgaggtcaaaaatataatttattcctcagtcatggttttctaaatatctgtactccacattccattttaattgatatgagggtgttaaagtacctacttaatgggttgattactatcaaaatgaccaaattataccaaagaacttaagaggaagcactttcagaactattcacttgccaggtattttctaaaattccacctgaaagccaaaagataaaataaataagttgattttaatgatataagcatcacacaattttacattaagaaatactgtgca

SEQ ID NO: 69882 - DNA, 1721 bp, Homo Sapiens
  misc_feature (363)..(383): n is a, c, g, or t
aatatccactcgattttaattatgttaccttttattattttacaatgtatttcaaaaaatgctgttacagttgtcttaactactctatatgatctggaataaagaactcttagaattagaacacacaaacatcaagctgtaatacctacttgtcctgaaacattactaccaaagggatgtagtttttaaataagcagatgtgtggcaatgcaaaataaaatacaaatttgttagaacagtaaagtttgctttaatggctacagaaagaaggcggttttattttcttttttaaacacatctggttctggcagcaagttatattatgcatttagagcaataggtgccctgaaagttattgttgcnnnnnnnnnnnnnnnnnnnnncagtttgtgcgtgtcacttgaatcagaaaccaaacacatgtaaaaaaatatcatcctcaatgccccccattaactctctctccagaaggtgacaatgttagtgaactcaagactctcactgatgatggtattttacaatgaaaacacaaggaaaccctttgaggtccaattttcacatcatattctccaaatagtaaaatagcagctctacatgttgatgaaaagaaatttcaatttcttcctatttgtttttactcatatcaacattaatatgtatctggatttattaatttccaaaaagaaaattttagttaccaaatatttcagaaatttaataaagcattacatatatgtaattagcacttatctaccaaaaaaacatatgtgtatgtatttatttatcttaccttcactgaagttcttttttctggctggacatgagaaacaggattaagtgatcaatgctggctttatttcttcataagcagtaatttgggtctttttcattcaacacaacgcagcattttcataataaattcacaaaagacaatacaaagaaacacctactgaatagaactctgtcgagcaattcatgttttaaagttggactctataccaaactggcattatggtattataggcatttgatttttgttttcttattttcagtttgtcagtttctttactaccattatttttttctagccagagataacgtataatcacaaagtaaggcctagagaccatttatagttgtttgcaatatcatgatcacattaactctcaagagttgatataagccaaagtgaaaagaagtcaactagaaccacatttggtcacattcaaacagtctccaaaaacacttcactaatatacatgtttccttcttgactgattttgtgttaattttattaaaattataatgaataaggctgcaaaatttttgtagagttgtttttctaggggactactgtgttcaaatgaatgtttttaatctgcaaaatgtcattagtaatgtcctttctataaacacggttggcaaaataaaaaggcacaaaagagggtaacaagaaatgttttcagctttcagtgaagagtacaaagcatgtacccttcatgaagaaaagcacagtaaaatattcagtaattcatgcacaacttgagctacaagaaaaattctcttcaggtaggtcctgaggcttgaaaagaaaatgagttttcctaatcacatgcttcacgtaaaataaaatgtaaagctgcacatacacatgtggttttaacagtggacccatggtttttaaatatgaggcaattaaatgaaagaaaacaaaccaaaaa

SEQ ID NO: 69883 - DNA, 998 bp, Homo Sapiens
gcccaaagctgaggaacaagagaaacttcctgaagaatctaacatggaactggaagaaaggaggaaaagagcagagcaacttcgcagagaacttgaggaaaaagagcaagaacgcttggatattgaagaaaaatataccagtttgcaagaggaagcacagggaaagaccaagaagttaaagaaagtttggactatgctgatggctgcaaagtcagagatggctgatctccaacaagaacatcagagggaaattgaaggcctactggagaacattcggcaacttagccgggagcttcgacttcagatgcttattattgataactttatacctcgggattatcaggaaatgattgaaaactatgtccattggaatgaagacataggagaatggcagctaaaatgtgttgcttatacaggaaataacatgaggaagcaaaccccagtacctgataaaaaggagaaagatccctttgaggtggacctttctcacgtgtatcttgcctatactgaggagagtctgcgtcagtctttgatgaaactagaaagaccacgaacttcaaaggggaaagcaaggccaaagacagggagaagaaagcgttctgcaaagcctgaaactgtaattgactctttactgcagtaaatgttacagacttaaagtcacaataaaaattagtgatattctcatgcctggacaaaatctttaattaaaacagtgaagacttctctataatttcaattaatggaagttgtagatcaatgaataagactggaaataataatttgcttaagaacttttagtctacatatattaatataacattaaaattgtacaactggtgattgttcaaattgttgtactactactcttcaattgtactgtgcagggaagttgggggaacagttcatactatagagagttacagtttagatgtatgtgtaaatcgattagctatttatccaactactgtatatttaggtaactagaatttcaaaataga

SEQ ID NO: 69884 - DNA, 2496 bp, Homo Sapiens
  misc_feature (586)..(599): n is a, c, g, or t
ttattgggtggaggggaggtataccacgtcaccacacattcctaagtagcgaggcctgggtggcgaattcggcacgagggcgggctgcgcgcgctactgcccatccccggttgtcccacttttgttcgcctctcttcggccctctactcaagagctccgtctccgtctcgccctcctcgaagtcctcgtcgcgcgcccgcgacccaggtcgccctgaaatctagcccgtccgagcgcgagtccaacggccgcggccgcaccaaggccccctcagaccgtgccatgggtgacagtgatgacgagtacgatcgaaggcgcagggacaagttcagaagagagcgcagcgactacgaccgttcccgcgagagagatgaaagacgtcgaggggacgattggaatgacagagagtgggaccgtggccgtgagcgccgtagtcggggtgaatatcgggactatgaccggaatcggcgagagcgcttctcgccacctcgccacgaactcagcccgccacagaagcgcatgaggagagactgggatgagcacagctctgacccataccacagtggctatgagatgccctatgctnnnnnnnnnnnnnncccaacttatggcccccctcagccctggggccaccctgacgtccacatcatgcagcaccatgtcctgcctatccaggccaggctgggcagcattgcagagattgacctgggtgtgccgccgcccgtgatgaagaccttcaaggagtttctcctctccctggatgactcggtggatgagacggaggccgtcaagcgctataatgactacaagctggatttccggaggcaacagatgcaggatttcttcctggcgcacaaagatgaggagtggtttcggtctaagtaccacccagatgaggtggggaagcgtcggcaggaggcccggggggccctgcaaaaccgactgagggtcttcctgtccctcatggagactggctggtttgataaccttctcctggacatagacaaagctgatgccattgtcaagatgctggatgcagccgtgattaagatggaaggaggcacggagaatgatctccgcatcctggagcaggaggaggaggaggagcaggcaggaaagcctggggagcccagcaagaaagaagaaggacgggctggagcaggcctaggggacggggagcgcaaaaccaacgacaaggatgagaagaaggaagacggcaagcaggctgagaatgacagttctaatgatgacaaaacaaagaagtcggagggtgatggggacaaggaagagaagaaagaagactccgagaaggaagccaaaaagagtagcaagaagcggaaccggaagcacagtggtgacgacagctttgacgagggcagcgtgtcagagtctgagtcggagtcagagagcggccaggctgaggaggagaaggaggaggccgaagaagcgctcaaggagaaggagaagcccaaggaagaagaatgggagaagcccaaggacgccgcggggctggagtgcaagccgcggccgctgcataagacctgctccctcttcatgcgcaacatcgcgcccaacatctcccgggccgagatcatctccctttgtaaaaggtacccaggctttatgcgggtggcgctctcagagccccagccagagaggaggtttttccgtcgtggctgggtgaccttcgaccgcagtgttaacattaaagagatctgttggaacctgcagaacatccgtctccgggagtgtgagctgagccctggtgtgaacagggacctgacccggcgcgttcgcaacatcaacggcatcacccagcacaagcagattgtgcgcaacgacatcaagctggcggccaagctgatccacacgctggatgacaggacacagctttgggcctcagaaccaggaacgcctcccctgcccacgagcctgccctcgcaaaacccgatcttgaagaatatcaccgactacctgatcgaggaagtaagcgccgaggaggaggagctgctggggagcagcgggggcgctcctcctgaggagcctcctaaggaagggaacccggcagagatcaacgtggagcgggatgagaagttgattaaggtcttggacaagctcctcctttacctgcgcatcgtgcattccttggattattacaacacctgtgagtaccccaacgaggacgagatgcccaatcgctgtgggatcatccacgttcgggggcccatgccccgtatggtgctggtcgagggaactatgatgccttccgaggccagggaggttatcctgggaaacctcgcaacaggatggttcgtggagacccaagggccattgtggaatatcgggacctggatgccccagacgatgttgatttcttttgagccgtcccccgttcctcagtcctgtatcatccatacttgtactaccttgtcctatgaagctctgagaattttttgtacgatcagccttactgctaataaaagcacttccacaggg

SEQ ID NO: 69885 - DNA, 737 bp, Homo Sapiens
  misc_feature (48)..(48): n is a, c, g, or t
ttaacgcgtcaccccgagaagttctgccccatcctcaggccatagccntagaagtcaattgtacccgtatccccctccccgcccccgcagtaattcatgtccctgtccgtgttgtactccccccaggtttgaccccaggactcccctacccacaccagactccccagggcctgatgccctatggtcagccccggcccccgatcttgggctatggaggtaagtacaggagggagatgaaggggcttggtgagtgtgtggctttgggagaagaaaacagaggatggaattgaggacatagttttgcaactcaacactgatctctgtcatagctggtgctgtccgccctgcagtccccacaggaggccctccatacccccatgccccgtatggtgctggtcgagggaactatgatgccttccgaggccagggaggttatcctgggaaacctcgcaacaggtgaggagggcagacgcccaagctttgttgccgcctgcagactcccttttgggagccctcagctctcatcctgtacctctcacctcacaggatggttcgtggagacccaagggccattgtggaatatcgggacctggatgccccagacgatgttgatttcttttgagccgtcccccgttcctcagtcctgtatcatccatacttgtactaccttgtcctatgaagctctgagaattttttgtacgatcagccttactgctaataaaagcacttccacaggg

SEQ ID NO: 69886 - DNA, 1030 bp, Homo Sapiens
aacttcggctagtacggggctgggttcgaattcggcacgaggacaagctcctcctttacctgcgcatcgtgcattccttggattattacaacacctgtgagtaccccaacgaggacgagatgcccaatcgctgtgggatcatccacgttcgggggcccatgccacccaaccgcatcagtcacggggaagtgctggagtggcagaagacttttgaggagaagctcacgccgttgctgagtgtgcgggagtcactctcagaggaagaggcccagaagatggggcgcaaagacccagagcaggaagtggagaagttcgtcacctccaacacgcaggaactgggcaaggataagtggctgtgtcctctcagtggcaagaaattcaagggtcctgagtttgtgcgcaaacatatcttcaacaagcatgcagagaaaattgaggaagtgaaaaaggaagtcgcgttttttaacaacttcctcactgatgctaagcgcccagctctgcctgagatcaagccagcccagccacctggccccgcccagatactccccccaggtttgaccccaggactcccctacccacaccagactccccagggcctgatgccctatggtcagccccggcccccgatcttgggctatggagctggtgctgtccgccctgcagtccccacaggaggccctccatacccccatgccccgtatggtgctggtcgagggaactatgatgccttccgaggccagggaggttatcctgggaaacctcgcaacaggatggttcgtggagacccaagggccattgtggaatatcgggacctggatgccccagacgatgttgatttcttttgagccgtcccccgttcctcagtcctgtatcatccatacttgtactaccttgtcctatgaagctctgagaattttttgtacgatcagccttactgctaataaaagcacttccacagggaaaccaaaacccaccacctctataacaccaatcggaatacctcccttattttcacatacataatccttcg

SEQ ID NO: 69887 - DNA, 927 bp, Homo Sapiens
tacatagtggatcacacaataataatgtacttgattggaccagatggtgagtttctagattattttggccagaaaaagaggaagggagaaatagctgcttcaattgccacacacatgaggccatacagaaaaaagagctagccaaagcagtgttgctggatgcagtattctcttgctaagaggaaggaaactgtctcgcataggagcctatataaatataaacatatatacgtgcactctacagaatggccttcataccatgagaacatttctgttttggatggggatgttacccttgcgttcaaccaaaattgattcttggaactgtaaagattacaacccaaagtctcccaggaagctgtggggagaccagaggatcaagctgaagtgaagccagtgaagagcccacctgtggaaggacatggcggggcgaggcacagccagtgcattcctgcctgcgaacaggccctcccagcagctttgccgcctctccatcgtcttgggcccttgctcaaatagctgtgggactgaatttcacagaaaagaatataatttccatagtgctcttgcttgcctcttcttgagttctttgctcttctgagttcttggtggctaataacagtcagattagggtctctgccattcagagttgatgcttgaaaactttagttttccttattaatgaatatcactatcagatttgactaatgaagaggaaatctattgtttgggggaaaaaaaacatcagtttgatttctctaggggttcttttatgtgatttttagctaagtggtgtgccaggttttcagtgacataccaaatggaaataagaggatattgatcacgagtgtgatgctgagtacctttctgcatatactggattgtactttgtgtaaagtaaacatactcagttttgctgttcaaaaa

SEQ ID NO: 69888 - DNA, 1055 bp, Homo Sapiens
tatgttgggattatacgcctctgtgtagtcagactgcacaaataagatgttctcaggctttaagtctgtgtgagtcaacttattactgtgcaaaaaattcacagacttgcatatctgatatgccatctttctgatatgatccagtcgaaatggtagaaaaccattttctttaatgaagtcgtaagtactaagtcccaatagttcaaaaacaatgcaaatgtgaccatgatgctcaaaccattccaacatctggacacagcggaaagtactgttggggtctgttgtattcagatgttccagaacttgtatttctgagcgagcagcttcacagtatctatccacatttttaactatttttactgctacatgtctacctcccgctttatgatcgatgcactccacaacttttccaaaagctccttcacctaaagtatcaacaatttcatatcttgcacttagtacgtctccactctgacagatcaggtgaccctcctcatcatcctctacactcctggttcttttccttcggtgactcttcccatgtgaacgacgatgtgaagtactgtggtgaatcctgtgtttgcttttataactacttcttccacttctaccagaagacttgctactatggttctgataccggctttcatggtctctttggcgatgtccaggttcacatccttgagtgtagtcatttctgtactcatcaatgtagcgtcgactatgataatctttctcatttatagacctgctttccaaataatggctatcacacattttagagtgattgtatttgcagcgcttgttctcctgggcactgctatgtgatctcttccttcttttatgactgctgctgctcctccattttccataatcccaatccttgtcatcccaatcaggacagtaagttctctttgagtgtctcatcgtcctggacaaagactccaagtcgaaggagacaaagcttgtaacgcaatcacgggaatcacgcagctgactgcgtcgcgcaccaacaacaaaatggagctgacagctgctgcgtcgagactcgtctc

SEQ ID NO: 69889 - DNA, 1220 bp, Homo Sapiens
  misc_feature (80)..(114): n is a, c, g, or t
aagtgataatcactatagggcgctagctcggttgcagcgaacgacgagcgcagcgagacagtgagcgaggaagcggccgnnnnnnnnnnnnnnnnnnnnnnnnnnnnnnnnnnncagtcgacggtaccggacatatgcccgggaattcggccattacggccggggaacatctgaatacaacagaccccaacagtactttccgctgtgtccagatgttggaatggtttgagcatcatggtcacatttgcattgtttttgaactattgggacttagtacttacgacttcattaaagaaaatggttttctaccatttcgactggatcatatcagaaagatggcatatcagatatgcaagtctgtgaattttttgcacagtaataagttgactcacacagacttaaagcctgaaaacatcttatttgtgcagtctgactacacagaggcgtataatcccaaaataaaacgtgatgaacgcaccttaataaatccagatattaaagttgtagactttggtagtgcaacatatgatgacgaacatcacagtacattggtatctacaagacattatagagcacctgaagttattttagccctagggtggtcccaaccatgtgatgtctggagcataggatgcattcttattgaatactatcttgggtttaccgtatttccaacacacgatagtaaggagcatttagcaatgatggaaaggattcttggacctctaccaaaacatatgatacagaaaaccaggaaacgtaaatattttcaccacgatcgattagactgggatgaacacagttctgccggcagatatgtttcaagacgctgtaaacctctgaaggaatttatgctttctcaagatgttgaacatgagcgtctctttgacctcattcagaaaatgttggagtatgatccagccaaaagaattactctcagagaagccttaaagcatcctttctttgaccttctgaagaaaagtatatagatctgtaattggacagctctctcgaagagatcttacagactgtatcagtctaatttttaaattttaagttattttgtacagctttgtaaattcttaacatttttatattgccatgtttattttgtttgggtaatttggttcattaagtacatagctaaggtaatgaacatctttttcagtaattgtaaagtgatttattcagaataaattttttgtgcttatgaaaaaaaa

SEQ ID NO: 69890 - DNA, 1116 bp, Homo Sapiens
  misc_feature (352)..(379): n is a, c, g, or t
ggcgtaggccttagattttttactggtctccctgaagaatttaacacaaacatggatatcagaccaaatcatacaatttatatcaacaatatgaatgacaaaattaaaaaggaagaattgaagagatccctatatgccctgttttctcagtttggtcatgtggtggacattgtggctttaaagaccatgaagatgagggggcaggcctttgtcatatttaaggaactgggctcatccacaaatgccttgagacagctacaaggatttccattttatggtaaaccaatgcgaatacagtatgcaaaaacagattcggatataatatcaaaaatgcgtggaacttttgctgacnnnnnnnnnnnnnnnnnnnnnnnnnnnncctaaactgtggaacagactgcaacaaccacaaacaaaaagcctggccagggaactccaaattcagctaatacccaaggaaattcaacaccaaatcctcaggtccctgattaccctccaaactatattttattccttaataacttaccagaagagactaatgagatgatgttatccatgctgtttaatcagttccctggcttcaaggaagtacgtctggtaccagggaggcatgacattgcttttgttgaatttgaaaatgatgggcaggctggagctgccagggatgctttacagggatttaagatcacaccgtcccatgctatgaagatcacctatgccaagaaataacatttgggatagtcgtctttaaaagacttggtgttatttacagtgtttgttttgataacatttggctgggtcattttaatagttagagatgaggaggagtaaaagtgaaatttttgtgaaggacttaaattatccagtgtttctttagccttggtgaactatgaaatacgaaggccttaattttgtacaataaacttttatttgtattctgtgtatataatgctttcttgattgacccatctccctatcatcaaatgacttctagtctagaacacacttaaggtttataaacttgtgtaataggatgcttttctagtgttactttggaggagctaattatacaacatcattgaaccattcaataaaagttaagtaaaattagatcac

SEQ ID NO: 69891 - DNA, 1013 bp, Homo Sapiens
cagtcgacggtaccggacatatgcccgggaattcggccattacggccggggctgcttttggttcttacagtagtcggcgtaggccttagattttttactgtctcctgaagaatttaacacaaacatggatatcagaccaaatcatacaatttatatcaacaatatgaatgacaaaattaaaaaggaagaattgaagagatccctatatgccctgttttctcagtttggtcatgtggtggacattgtggctttaaagaccatgaagatgagggggcaggcctttgtcatatttaaggaactgggctcatccacaaatgccttgagacagctacaaggatttccattttatggtaaaccaatgcgaatacagtatgcaaaaacagattcggatataatatcaaaaatgcgtggaacttttgctgacaaagagaaagcaaaaagagaagaaaaaagccaaactgtggaacagactgcaacaaccacaaacaaaaagcctggccagggaactccaaattcagctaatacccaaggaaattcaacaccaaatcctcaggtccctgattaccctccaaactatattttattccttaataacttaccagaagagactaatgagatgatgttatccatgctgtttaatcagttccctggcttcaaggaagtacgtctggtaccagggaggcatgacattgcttttgttgaatttgaaaatgatgggcaggctggagctgccaacgggatgctttacacgggatttaagatcacaccgtcccactgctatgaagatcacctatgccaagaatataacatttgggatagtcgtctttaaaagacttggtgttatttacagtgtttgttttggataacatttggctgggtcattttaatagttagagatgaggaggagtaaaagtgaaatttttgtgaaggacttaaattatcccgtgtttctttagccttggtgaactatgaaatacgaaggccttaattttgtaccataaacttttatttgt

SEQ ID NO: 69892 - DNA, 1033 bp, Homo Sapiens
  misc_feature (75)..(109): n is a, c, g, or t
caaactgaatatataggggctactcgggctatatcgaacgacgagcgcagcgagtagtgagcgaggaagcggcgnnnnnnnnnnnnnnnnnnnnnnnnnnnnnnnnnnncagtcgacggtaccggacatatgcccgggaattcggccattacggccggggctgcttttggttcttacagtagtcggcgtaggccttaggtgggttcgtgcgccttctacctcgctgtttcggttttcctggctcctcggcccttttctcccctgttgcagctgggagcggacgaagcgcgaagctgggattttttactgtctcctgaagaatttaacacaaacatggatatcagaccaaatcatacaatttatatcaacaatatgaatgacaaaattaaaaaggaagaattgaagagatccctatatgccctgttttctcagtttggtcatgtggtggacattgtggctttaaagaccatgaagatgagggggcaggcctttgtcatatttaaggaactgggctcatccacaaatgccttgagacagctacaaggatttccattttatggtaaaccaatgcgaatacagtatgcaaaaacagattcggatataatatcaaaaatgcgtggaacttttgctgacaaagaaaagaacaacagaacacagaaacaaagccaaaacttgtggaacagactgcaacaaacacaaacaaaaaagcctggccagggaactcccaaattcagctaatacccaaggaaattcaacagcaaattcctcaggtcctgattacctccaaaatatatttttattccttaataacttaccagaagagactaaatgagatgatgttatccatgttgttaatcagttcctggttcaggaagtacgtctggtaccgggagggatgacaatgctttctgtcgacttgaaatcgttggcaggtggagtggcagggtgcttacagggttttaaatcacacgggcatgtattagaataccttgcaggaataattggggagggttaagactggggtctacccgct

SEQ ID NO: 69893 - DNA, 977 bp, Homo Sapiens
  misc_feature (39)..(39): n is a, c, g, or t
  misc_feature (157)..(157): n is a, c, g, or t
  misc_feature (165)..(165): n is a, c, g, or t
ttccgatgaagcgcagtagccacgcatatgtggtgctcntcatagcccccagctacacttatctccgctctatgtgtgtgatgtgacgatacattcacacagaacagcttgacagatacgaattatacgactcctataggaattgcctccgagccangaatcgcnacgaggatgctttgataagttggttcacttcagtgaaacatgtgatagatatccaggtgtgccatgatggggcaggaggaggtgcctagagggaaaagtattttgtttcttagtgttgtgttgtggggatgggacagataagaataagatgtttattgccctaatcatgctaagagactattattcaatatgcttttcccgcttttctaagaggaataaacttagacaaattacattataaacagttcccctactactatctcccactctagataaagccagtgggtggtatgggtccttttattccttatagtattatgccaaagaatcaacttattttcattgaagattataaataaatgaagcttgttatagccataatgatttgagtcagtataccattttacctataaaatgcaaaattcatccttgcaaccccattcaccaggagccttgaagcattttgtttactccaaaggccttgtcaaggaagcataattttttgttttgccttcttatttagtcagtttggtcatatttacttaaaaaaacaaactgaaaatcacactcctttatatgttgatataactgattttatagaatctgtctgttctttgtttaacaggtctctgtaagcaagcttgcaagtgtattttgtgtacattttatctgaggtggaaatgaaaattctaaagagaaaatattttaaaagatattgtatttatgttgcttgtgttgtagaataaagattcaaatgcattaaaaatctggtacatgaaacaattgtgtttactgaataaatatatataaat

SEQ ID NO: 69894 - DNA, 706 bp, Homo Sapiens
actttagtttcccataatttttggaaattatgtgtgcatttagttcttttagtaacactgattttaaaattaaatttcaaaagtcaatctctaagagtaatttatttttgttttaccaaccagtgccaaaaaggagaggagggaatccaaaagccaatcttttgaaccaatgtgtaaaagattatgttttttcttaaagttagggaggctcgggcccggacactgccagccccagtgagcatccctggctacctcgggattatgtgcaagctgctttgtcctacatttctttcatctggttcttattgggagtgcttctctctaataaaaattgatttcccacaaaataggcaaagctgaacaaagatgaatgcttttgataagttgggtttcacttcagttgaaacaatgtgatagaatatccaggtgtggcatgatggggcaggaggaggtgcctagagggaaaagttatttttgtttcttagtgttgtgttgtggggatgggacagataagaataagatgtttattgccctaatcatgctaagagactattattcaatatgcttttcccgcttttctaagaggaataaacttagacaaattacattataaacagttcccctactactatctcccactctagataaagccgtgggtggtaattgggtccttttattccttatagtattatgccaaagaatcaac

SEQ ID NO: 69895 - DNA, 925 bp, Homo Sapiens
tcggatctctcagagcgcaccttctggcaacataagcaccctgagtaagccgtcaccgatcaggggttagctcctgagttggtgctccttgcctaggatgaagataactgtgttgtgtcggaacggccacagggggtgaacgggaatggaggaaggcttgtctacaaccaccacatcttcgttctcagctagcaggcgaatgggctctgctgtgactggtggctcatgcctgtgcactgtgttccgcaagaaatcatggtccttgagcacgatgttgaggtcctgcaccggcttctcgttgagttgcaggcggcccgcccggaccgcggcctcatagtaagccaggggctgagctcggaactcggtactgaagacgtgcagcaagctgtggcccacccagcgacctttgcagtaggtccggaagtcaaagtaatagggccgcaccttacgcaggccgccctcgaagtaataactggtttctgcaaagtgctcatctccgaagctcaccccggtccgccgcttcttcggggcggcacgacacgctccctggttgcgccccgccgcttcttatgcttgcccgggcctggggctgcagccgagggatgctccccgcctactggggccggctccacttcccggccagccggcttcgggggcccgggggacagctcaaccttcgcgtcgccaccagcgtcaccgttttgctgatgcgaagccctcagcccgccctctgtcccacctgggtagacactgtttctgccattgggcccttatcgccactccaagtcctggtaaagctagggcgcctaaggtcgtagcgccaatgtccaagaaccctgagccatccgcgcggtccagccacataacccctcgtgccgaattcgccacccagggcctcgctaccaaaagcccgcttatagttact

SEQ ID NO: 69896 - DNA, 1298 bp, Homo Sapiens
tgcagacagtcctcactgctgctctcatgttccttgtttatgagaaactgacagctgccaccttcacagttatggggctgaagcgtgcacaccaacactgagacgccttcccatgaaaaattccgaagatgctcaagagggaggtttcctcctgagtgaagagaagtgattctcccttgactctggctcctgccaccacaaatgttaccctcattggcttgaaaagcatccaagggtgcacagggagtatggccaactggacctgttgtcaccttaattgtcatgctggctggttggattttggggtggcagttggactaatgtgaaaaaaacattgctgaaaacctaaaaatgaaagtttgtgagtgtttattggttttcttaagagaaatggactattttgctctcatgtgtaatgttttctatttaaatctttcttaaatataccagctgttctctttccctgaactctcccccaggttctaggacaaatttaataacatgtaattctcctcaaatacttttgtatgtctcagtgttggtgttttcctccctaaaactaacattagggctgtgccacgggcatgactttatttttgttgggcttttttttccctgcttaaggagaggtgtcttttttggatatgagctatttattttgtgaaatgaaaattgttcacccaaatgattctcttataaactatttgtaaatgtcacttattcattagtgtttgacataatttttagaatatttattttgaatcaatcctttcattacgaaagacttgaagttttgtgtccattcttacaagccctggtcagtcaagtcccaataaatggtcagcacaaaaaagatattcttgaaaattgctctttattaaggtattacgttgagtttgcaaccagatgggaaaaatcacaaaaatgagaaggggagcagatatcttgttgaggtctggatattatctccctttataaacttggtgtaggccgtatattttgaaaataaacatctggttgaggttatttcatttggaaaccttccttagagtcctgttgctcagtgtggtccatcagacggtagtactgccacaagctgagagcttgctgggcacgcaacccagagtttctgaatcctgttccgtattttaacattcccaggtgattcacagccacattaaagttcaggagaccataggacccctgacccatgagaagaagtgattggtttcgattatagacatcaagataaagatttttctcaaaggaaagagattaatgtattaaaacaacctctg

SEQ ID NO: 69897 - DNA, 1989 bp, Homo Sapiens
aaggtgggtacggtccggaattttgggatcttttccggaggcggcggctcggctgccgctgggtccggggtcgcgggccctgattgcgccgtttccccgcgcagagctcgccggcgccccgacgggccccggagcagcggcccccggccggcccggcctcagcctggagctccagctacccacatgcaccttacctgggttccgcccggtccctgagtccccacaaaatggctgatggaggaagccccttcctaggtcggagggactttgtctacccttcctcaacccgagaccctagtgcctctaacggagggggcagcccagccaggagggaagagaagaagagaaaggccgccaggctcaagtttgacttccaggcgcagtcccccaaggagctgactctgcagaagggtgacattgtctacatccacaaggaggtggacaagaactggctggagggagagcaccacggccgcctgggcatcttccctgctaattatgtggaggtgctgcccgcagatgagatccctaagcccatcaagcccccgacctaccaggtgctggagtatggagaggctgtggcccagtacaccttcaagggggacctggaggtggagctgtccttccgcaagggagagcacatctgcctgatccgcaaggtgaacgagaactggtacgagggacgcatcacgggcacggggcgccaaggcatattccctgccagctacgtgcaggtgtctcgtgaaccccggctccggctctgtgacgacggcccccagctccccacgtctccccgcctgaccgctgccgcccgctcagcccgtcaccccagctccccctcagccctgcgcagcccagctgaccccaccgacttggggggacagacctccccccgtcgcactggcttctccttccccacccaggagcctagaccccagacccagaatcttggcacccctggtccagctctgtcccactctcgaggtcccagccatcccctggacctggggacctcctctcctaacacctctcagatacactggaccccgtaccgggcgatgtaccagtacaggccccagaacgaagacgagctggagctgcgcgagggggacagggtggatgtcatgcagcagtgtgacgatggctggtttgtgggtgtctcccggaggacccagaaattcggaacgttccctggaaattacgttgccccggtgtgagtggtctccatggcaacttggagccagccaggatggggtggggagcggtggcactcgtgggagggagaggacccccgcccacatcctccttccccaggacctgagctcccagcatctgcagacgacccccgcagcctttccctcggacccccctcgaagccccctggactgattcccacccacgactcacaggcattcctcccacagccctttcatttcctccccaccccactccccaaatacagaggtctgctttgaagcggagaccatttccaggccttattgagaccagaccccaagtcccccacccccatcctgctccagcgtttcctctaacagggaccagctctccgctttgcccccacggggttcctctaaccagaaccagcttcctagcctcgtagagaccaaaggccgcccccgcctgctggggttcctcccagcaccccagcttgctggctgccctctttgccttctggcctccagctgggtgtgggggggcggagcaaggcgggggacagacgcagcaccttcttagcgatctaggcctggcaagagctctggccccaaggcctcctcttcccaggggctgccaagtcctggccctggccctggcatatcaccccgcactgtggggccaggcaccactagcctggctcaaatattccccagggagactgctgtgtgctgcccgcctgcctgctggctctcccccagccccacatcccctctggaagagaatgtaaaataaacctggacacaagggaaaaaa

SEQ ID NO: 69898 - DNA, 611 bp, Homo Sapiens
gagatatagtgattttaatttcactcaactgtgaaaaagttttcagtaatggtttacaatacaataccataaattatctccaagttcgcattaaagtaagtgcgatttgatgtaaatgttttccattatgtagaatgatgtttcttgccactgtggaatctgagtaataataataaaaaccaccattgagcaccctacaatatgccaagcactctgttgaaatctgtgctttacacacttgtgaagatagtgacaaaaacttttaactactctttgtggtcagcttttgaaaagaatttctttcccttcacacctcccccaattagatattctttcatttaatatgcccaaatcttccctgaattgcaaaagtcacctatagaaaatcgcacaccttaaatagcaccaaaatgtagtggtagaatgcatgtaacatactgtggattaaaattaaggaaaagtatttctaacctcttgttagccatctattctcaaatattttataaaatctggtataactgaggaattaacaatctcctgaaacttactaacagcatttgacctgtcttcaaagaaaacccttagaatgggccgggcacggtggctcacac

SEQ ID NO: 69899 - DNA, 653 bp, Homo Sapiens
agttgttttcaatgcaacgcttgttaaataaatattgtgaactattttgtaaatgaaatgtattatgttgaaagctgtcagttcaaaaataagcttttttgttgttgttgaagatgaagtgtgttaggtgaaaccaaaaagccaaaaaaagtaatttcatatatagcatctatttgaatataatctttctttaaaatttcttttagcatagcattttcagtgctaagaaagaatctctatgttatattttgttaaaataatggctttctaacaaagcaaatggtaaagtacaaagttggaagatgtcaagttaacgagacttgctgcaaagccttgcagaacggaggaggctctgcctgctggctgtctctccctccaacctctctacaatcatgcctgctttgaggtgttctgttgcagcaagctgcaccttgggtcactcttttggaatattttgactataggctgcgtcacaggcagaaaaggagttgatggaaaatggactaaaaaactgacatgtttgaatcagtgctagagggaacagattgtgaattttgtttacagcatccaatatttggatttttttgtaaataaaaaagttatttttttctattgcaaactcccccccctaaacaataaaaacataccatgtc

SEQ ID NO: 69900 - DNA, 1430 bp, Homo Sapiens
  misc_feature (839)..(839): n is a, c, g, or t
gcggccgcccgcgcctcctcggccgcctgtcgggcatgaaaaccaaattctgcaccgggggcgaggcggagccctcgccgctcgggctgcccgctgccccagcccccgccgccgcagccgcccgcagacgagcagccggagccccggacgcggcgcagggcctatctgtggtgcaaggagttcctgcccggcgcctggcggggcctccgcgaggacgagttccacatcagtgtcatcagaggcggccttagcaacatgctgttccagtgctccctacctgacaccacagccacccttggtgatgagcctcggaaagtgctcctgcggctgtatggagcgattttgcagatgaggtcctgtaataaagagggatccgaacaagctcagaaagaaaatgaatttcaaggggctgaggccatggttctggagagcgttatgtttgccattctcgcagagaggtcacttgggccaaaactctatggcatctttccccaaggccgactggagcagttcatcccgagccggcgattagatactgaagaattaagtttgccagatatttctgcagaaatcgccgagaaaatggctacatttcatggtatgaaaatgccattcaataaggaaccaaaatggctttttggcacaatggaaaagtatctaaaggaagtgctgagaattaaatttactgaggaatccagaattaaaaagctccacaaattgctcagttacaatctgccctgggaactggaaaacctgagatcattgcttgaatctactccatctccagttgtattttgtcataatgactgtcaagaaggtaatatcttgttgctggaagnccgagagaattctgaaaaacagaaactgatgctcattgatttcgaatacagcagttacaattacaggggattcgacattggaaatcacttctgtgagtggatgtatgattatagctatgaaaaatacccttttttcagagcaaacatccggaagtatcccaccaagaaacaacagctccattttatttccagttacttgcctgcattccaaaatgactttgaaaacctcagtactgaagaaaaatccattataaaagaagaaatgttgcttgaagttaataggtttgcccttgcatctcatttcctctggggactgtggtccattgtacaagccaagatttcatctattgaatttgggtacatggactacgcccaagcaaggtttgatgcctatttccaccagaagaggaagcttggggtgtgactgtggggaggactccatccacctcatcactggactgcatggggaggcagcagagcggggtcccctctgtgcttcgactactgctcctgtggcaggaggctttgggtggctcactactgaacacatgtgtatgatactaaagacggtattaaaatggagcgacgttt

SEQ ID NO: 69901 - DNA, 183 bp, Homo Sapiens
gcgcctcctcggccgcctgtcgggcaataaaaccaaattctgcaccgggggcgaggcggagccctcgccgctcgggctgctgctgagctgcggtagcggcagcgcggccccggcgcccggcgtggggcagcagcgcgacgccgacagcgacctcgagtccaagcagctgggcggccatcagcc

SEQ ID NO: 69902 - DNA, 1700 bp, Homo Sapiens
  misc_feature (483)..(496): n is a, c, g, or t
  misc_feature (1591)..(1625): n is a, c, g, or t
aaatattttaaaatttttatttgaatgaaatcattgtaataatcattaaagtgatttgaaatagaatgatctctgtgaaaggaagtttatagcatcactatttataggagagaaagcagcagaggtatgcatctggaagtgaatataacattgtaaaatcagcccacattaaataccaaaaaagtaagaaccatcaaaatgcagcattatttacaggattaaaaagtgtgaacagtacagagttaaactttcttatgtgtgaattttgacctgctatgttgttagcaaaaagctttagtgtttgtataaaatgatgtgtacccttatcccaaccaccaccagatcaagacacaaactgacaatgattccttccttattttacagctttattactgatttccctctaaaaagagactcaagtgtggagctgactcatctatagattaaggaatcacaaagtaccatagtcacttaacaaatgcnnnnnnnnnnnnnngcaattgttttacctttcaactgctgatgttatgtacaatctatcacaaaaagcatagctgtgcattcatgagctgattatatcaacctctagaattttagaaacgagcacatctaagcatatggatactctcttaccttacaaagtaaaagcattttctattttaaaatttttattcctgtgtaaaacaaagaattcctagaggtcaaataatataccaaacttaaagcactattaagtcatgaaacaaagaagattctgaggtagaagtcaagcaatataatccacagtttcaggtattcccagcaaccatcgcatttcgcaagtaagatctattttttttaaagtctcaacttccaaaaaatcaataatccattctgtaaaatcagatgtaaaactatgaccaacagaagacacccaaacttttctcatggtaacagagtaaatgcttttactaaaagctgccaacatttctatcagtagtaaccgtaaggaggccgctggttgtaaccataatgtccatattgctggggatagtaaggttcttgtctgtgttgcgggtagttgttaccccaggatcgtccatgccactgattggatcgattgtcacttggccacccccatctgttgtccctgcctctgaactgtctgttgtcttgcaaccgattgcctctgtttctttggttcccaccagctctgctattccattcctcaacaattggaggagactcaggagggcgtttcaggtattcctgatactccttgtcattttctgtgaatctactagcaaacatctcttcaaactttggaacagcttcggcagtgtcagtcattctgaaaatcccaaaggtttgaggcagctgtactgcttaatgtttaggttgtttaaatccgccaagggctatgtcaatccagctcaggccgaaccccgccggcgagacactgagaagcccaggagaggtggcctctggtccactacaccgtggaactccagaccactccagttctccaatgtaaccgagcgccttcctctaaaatccgacccccggccgtaatggccgaattcccgggcatatgtccggtaccgtcgactgnnnnnnnnnnnnnnnnnnnnnnnnnnnnnnnnnnncgccgcttcctcgctcactactcgctgcgctcgtcgttcgctgcgacagagctagcgccctatagtgatctatat

SEQ ID NO: 69903 - DNA, 421 bp, Homo Sapiens
aatggaaatgtctttaaaattgtacagattttcagaatgactgacactgccgaagctgttccaaagtttgaagagatgtttgctagtagattcacagaaaataacaaggagtatcaggaatacctgaaacgccctcctgagtctcctccaattgttgaggaatggaatagcagagctgttacagcattttgtttggagccaggttttgcatggatggctatggtgacgcatcctttaggatcaactgccacaggacctaagggaggaagtggtctctctggttccttgctctggcttttacccttggtcgtcgcaccagccttcttaggcatctcggcgcaaagaagccgagcggacgcccgagtattgggtgttgcccgaagtgcctcagcccgctgcggagcgcagcctcgtgccgaaa

SEQ ID NO: 69904 - DNA, 1292 bp, Homo Sapiens
  misc_feature (41)..(82): n is a, c, g, or t
  misc_feature (86)..(120): n is a, c, g, or t
ccaagacgtatagatcactatagggcgctagctccgttgtnnnnnnnnnnnnnnnnnnnnnnnnnnnnnnnnnnnnnnnnnnccgnnnnnnnnnnnnnnnnnnnnnnnnnnnnnnnnnnncagtcgacggtaccggacatatgcccgggaattcggccattacggccgggggacgcggtttccgcggcaacgcggctggaccctggcctgcgctggctggggaggaagcggttctaggggagcgtgcggggcgccggggtccggcggacgagaggccaccttctggccttgcgatgaatcctcggtttccccttctcagatggggttttcgtgagggtacaacgtcggcattagacattccaggtgacgcccgtacgcggtggggcggattcgggcccggagactcatggaacgctggccctggaggcgtcgacccctcgttactgatgcagggacgcggtgcggaccagtcaggcccagagctcgtccttagatgtgggttcgaatctctgccccgccaacttgtgatcgtatcgactcggcccagacgcaattttcttctctgcaaaatcgtcataagaataatcacttgtcagggtagctgcgggcatcccattcgttcctttcatcagcgccgggcatatggggcgtcagaggctgagaacgttgccgtgaagaggcttaaaagcaagacccggaggtggcgaccttaaaagaggacggactgaagaaacgcgggaatgagctccagacgcgggagtttcctctctacaaagttacactgcagcagctgtctaccctgccccttgtcttttgagaagttcaaaccttcagaaaaagttgcaagaacacgaggctaaaggcagcagttcactatactgtggggtgtcttgccgagaaagtggcattggacaaagaaatgcaagtcagcaaacagaccattgcggccatttcggagctgactttccgacagtgtgaaaattttgccaaagaccttgaaatgtttgcaagcatatgcaggaagcggcaggaataaggaaaagcagcctcctgactttcctcgcttggtggtttgagtggacctcccaggccagtgccgggcccctcataggagaggaagcccgggaggtggccaggcggcaggaaggcgcacccccccagcaatccgcgcgccgggacagaatgccctgcaggaacttcttctggaagaccttctcctcctgcaaatgaggcctcacccatgaatgttctagcaagtcaatgacagacctgaataaaatgtattaagcagc

SEQ ID NO: 69905 - DNA, 1365 bp, Homo Sapiens
  misc_feature (179)..(179): n is a, c, g, or t
  misc_feature (199)..(200): n is a, c, g, or t
  misc_feature (362)..(362): n is a, c, g, or t
  misc_feature (547)..(585): n is a, c, g, or t
  misc_feature (1052)..(1069): n is a, c, g, or t
gcagtgatggaggaggaggcggagaccgaggagcagcagcgattctcttaccaacagatggggttttcgtgagggtacaacgtcggcattagacattccaggtgacgcccgtacgcggtgggcggttcggcccggagctctggaacgctgcccctggaggcgtcgaccccctcgttacntgatgcagggacgcggtgcnnggaccagtcaggcccagagctcgtcctaagatgtgggttcgaatctctgccccgccaacttgtgatcgtatcgactcggcccagacgcaatttccttctctgcaaaatcgtcataagaataatcacttgtcagggtagctgcgggcatcccattcgttcctntcatcagcgccgggcatatggggcgtcagaggctgagaacgttgccgtgaagaggcttaaaagcaagacccggagtggcgaccttaaagaggacggactgaagaaacgcgggaatgagctccagacgcgggagtttcctctctacaaagttacactgcagcagctgtctaccctgccccttgtcnnnnnnnnnnnnnnnnnnnnnnnnnnnnnnnnnnnnnnncgaggctaaaggcagcagttcactatactgtgggttgtctttgcgaggaagttgcattggacaaagagatgcagttcagcaaacagaccattgcggccatttcggagctgactttccgacagtgtgaaaattttgccaaagaccttgaaatgtttgcaagacatgcgaaaagaaccacaattaacactgaagatgtgaagctcttagccaggaggagtaattcactgctaaaatacatcacagacaaaagtgaagagattgctcagattaacctagaacgaaaagcacagaagaaaaagaagtcagaggatggaagcaaaaattcaaggcagccagcagaggctggagtggtggaaagtgagaattaaagtccctcgccgcttggaaagtgcagccttctacaggtagagccacctagaaatgcatatggctgcaaaggaaactttgaagggttaaatagagatttnnnnnnnnnnnnnnnnnnggctgggctagggtgctttttgtgctgaattctccacattgttaactgccaaagctagttttagagaatgagaaagtcttaagcaaaatactcccaggtctcactccagaacataaaaatggtgtgtgatcgaatggtatatattagaaattacatctgttgtaattaaaattgtgtgagcaattaaacatggttgactttttcaagcaaaaatcagttcatcttttgatgtaattttctaggctaaatggcaatctctgaaagatgaataaagctatatttatttagcaaaaaaa

SEQ ID NO: 69906 - DNA, 421 bp, Homo Sapiens
  misc_feature (48)..(48): n is a, c, g, or t
gcagggtgggagagaagctccagtcagcccacaagatgccattgtccnccggcctcctgctgctgctgctctccggggccacggccaccgctgccctgcccctggagggtggccccaccggccgagacagcgagcatatgcaggaagcggcaggaataaggaaaagcagcctcctgactttcctcgcttggtggtttgagtggacctcccaggccagtgccgggcccctcataggagaggaagctcgggaggtggccaggcggcaggaaggcgcacccccccagcaatccgcgcgccgggacagaatgccctgcaggaacttcttctggaagaccttctcctcctgcaaataaaacctcacccatgaatcgtcacgcaagtgtaatgacagacctgaataaaatgtattaagcagcaaaaa

SEQ ID NO: 69907 - DNA, 748 bp, Homo Sapiens
  misc_feature (640)..(640): n is a, c, g, or t
gcgggcgccggggtccggcgacgagaggcaccttctggccttgcgatgaatcctcggtttccccttctcagatggggttttcgtgagggtacaacgtcggcattagacattccaggtgacgcccgtacgcggtgggcggttcgggccggagctctggaacgctggccctggaggcgtcgacccctcgttactgatgcagggacgcggtgcggaccagtcaggcccagagctcgtccttagatgtgggttcgaatctctgccccgccaacttgtgatcgtatcgactcggcccagacgcaattttcttctctgcaaaatcgtcataagaataatcacttgtcagggtagctgcgggcatcccattcgttcctttcatcagcgccgggcatatggggcgtcagaggctgagaacgttgccgtgaagaggcttaaaagcaagacccggagtggcgaccttaaagaggacggactgaagaaacgcgggaatgagctccagacgcgggagtttcctctctacaaagttacactgcagcagctgtctaccctgccccttgtcttttgagaagttcaaaccttcagaaaagttgcaagaacacgaaaattttgccaaagaccttgaaatgtttgcaagacatgcganaagaaccacaattaacactgaagatgtgaagctcttagccaggaggagtaattcactgcatatgcaggaagcggcaggaataaggaaaagcagcctcctgactttcct

SEQ ID NO: 69908 - DNA, 1326 bp, Homo Sapiens
  misc_feature (554)..(554): n is a, c, g, or t
  misc_feature (585)..(585): n is a, c, g, or t
gcggcctcctcagtaaacggaggccggcttcctactcccaagctgagagaacttggtggaatccagaggactcatcatgatctcactactccagctgttggtggtgctgttttagtgtctccatctaagatgaagcctccagccccagaacagaggaaaagaatgacctctcaggattgtttagaaacttcaaagaatgattttactaagaaagaaagtcgtgctgtatccctactgacttctccagctgctggtataaaaacagttgatcctctgcctttgcgggaagattctgaagacaatatccacaaatttgctgaggcaactcttccagtttcaaaaattccaaaatacccaacaaatccccctggacagttgccttctccaccacatgttccatcctactggcatccctctcgacgaattcagggctctcttagagatccagagtttcagcacaatgtgggaaaagcaaggatgaacaatttgcagttacctcaacatgaagcctttaatgatgaagatgaggacagattgtctgatatttctgctcnctctgcatcttctagtctccgggcttttcanactctggcacgacctaagaaaaggaaggagaatttctggggtaaaacataaacctagctgagttgcctttatctaaggaaacattggcataatttttctttattgcttactgtgttaaaattttttgagtgaagtttttcctaacattttctactttgaaatatttaatttccaatagaacagtttacttggaaattgttaacataggcttatacaaatttaacttttaaagaattctttttacatctatcccagagtacaaagacctagattattgaattcttcacatgtaactttcgtaataggtgtcatggatagattttcacctatccagagagtattctaaaaaaataaacaaagtgaagtaaaagttaagatcccagtgtgaagtatatattcccctaagatttgatatatgtatctttataattgatgatgttgtaaaatgaatttgttgttcctttaacctttgctgtagtgtttctttttattttagttccttctatacatgtttgcagtgttaagataattgtactttgaaaacaccagctgtatatatttttcttatttatgtaacaaagtttgctgaaagatatgtatatttttgatctttgagtgtattctatttgtgtaaggactttggcttacatttgaataatgtctagattttgaaaaattacctgtataatggagaattaaaactttgtagacattttgaaataaaaatggatcaagtgcaaa

SEQ ID NO: 69909 - DNA, 2581 bp, Homo Sapiens
  misc_feature (1486)..(1563): n is a, c, g, or t
  misc_feature (2507)..(2520): n is a, c, g, or t
aaacatagctaggtacgaggcttggtgttaatcggcacgagggggaaggaaggcggagggaaccatgcgaggttctgagaattgcggcgagggtcgcctcgagagacggtttctgaggaattctgaaatccccaccacttcctccctccgggggatttgatcccctatggccaccgctaacagcatcatcgtgctggatgatgatgacgaagatgaagcagctgctcagccagggccctcccacccactccccaatgcggcctcacctggggcagaagcccctagctcctctgagcctcatggggccagaggaagcagtagttcgggcggcaagaaatgctacaagctggagaatgagaagctgttcgaagagttccttgaactttgtaagatgcagacagcagaccaccctgaggtggtcccattcctctataaccggcagcaacgtgcccactctctgtttttggcctcggcggagttctgcaacatcctctctagggtcctgtctcgggcccggagccggccagccaagctctatgtctacatcaatgagctctgcactgttctcaaggcccactcagccaaaaagaagctgaacttggcccctgccgccaccacctccaatgagccctctgggaataaccctcccacacacctctccttggaccccacaaatgctgaaaacactgcctctcagtctccaaggacccgtggttcccggcggcagatccagcgtttggagcagctgctggcgctctatgtggcagagatccggcggctgcaggaaaaggagttggatctctcagaattggatgacccagactccgcatacctgcaggaggcacggttgaagcgtaagctgatccgcctctttgggcgactatgtgagctgaaagactgctcttcactgaccggccgtgtcatagagcagcgcatcccctaccgtggcacccgctacccagaggttaacaggcgcattgagcggctcatcaacaagccagggcctgataccttccctgactatggggatgtgcttcgggctgtagagaaggcagctgcccgacacagccttggcctcccccgacagcagctccagctcatggctcaggatgccttccgagatgtgggcatcaggttacaggagcgacgtcacctcgatctcatctacaactttggctgccacctcacagatgactataggccaggcgttgaccctgcactatcagatcctgtgttggcccggcgccttcgggaaaaccggagtttggccatgagtcggctggatgaggtcatctccaaatatgcaatgttgcaagacaaaagtgaggagggcgagagaaaaaagagaagagctcggctccaaggcacctcttcccactctgcagacacccccgaagcctccttggattctggtgagggccctactggaatggcatcccaggggcgcccttctgcctccagagctgagacagatgacgaagacgannnnnnnnnnnnnnnnnnnnnnnnnnnnnnnnnnnnnnnnnnnnnnnnnnnnnnnnnnnnnnnnnnnnnnnnnnnnnntctggaacagatgcaggagggtcaggaggatgatgaagaggaggacgaagaggaagaagcagcagcaggtaaagatggagacaagagccccatgtcctcactacagatctccaatgaaaagaacctggaacctggcaaacagatcagcagatcttcaggggagcagcaaaacaaaggacgcatagtgtcaccatcgttactgtcagaagaacccctggccccctccagcatagatgctgaaagcaatggagaacagcctgaggagctgaccctggaggaagaaagccctgtgtctcagctctttgagctagagattgaagctttgcccctggataccccttcctctgtggagacggacatttcctcttccaggaagcaatcagaggagcccttcaccactgtcttagagaatggagcaggcatggtctcttctacttccttcaatggaggcgtctctcctcacaactggggagattctggtcccccctgcaaaaaatctcggaaggagaagaagcaaacaggatcagggccattaggaaacagctatgtggaaaggcaaaggtcagtgcatgagaagaatgggaaaaagatatgtaccctgcccagcccaccttcccccttggcttccttggccccagttgctgattcctccacgagggtggactctcccagccatggcctggtgaccagctccctctgcatcccttctccagcccggctgtcccaaaccccccattcacagcctcctcggcctggtacttgcaagacaagtgtggccacacaatgcgatccagaagagatcatcgtgctctcagactctgattagctgcctccccttctccctgcctccagaatgttctgggataacatttggaggaaggtgggaagcagatgactgaggaagggatggactaagctaatccccttttggtggtgtttctttnnnnnnnnnnnnnngcttaagttttacacagaaacattaataaacaataaagttcttttcttactgtaaaaaaaa

SEQ ID NO: 69910 - DNA, 504 bp, Homo Sapiens
  misc_feature (433)..(448): n is a, c, g, or t
aagcaaacagtatcggtgccattagaaacaggctatgtgtaaaggcaaaggtcagtgcatgagaaaatgggaaaaagatatgtaccctgcccagcccaccttcccccttggcttccttggccccagttgctgattcctccacgagggtggactcttcccagccatggcctggtgaccagctccctctgcatcccttctccagcccggctgtcccaaaccccccattcacagcctcctcggcctggtacttgcaagacaagtgtggccacacaatgcgatccagaagagatcatcgtgctctcagactctgattagctgcctccccttctccctgcctccagaatgttctgggataacatttggaggaaggtgggaagcagatgactgaggaagggatggactaagctaatccccttttggtggtgtttctttnnnnnnnnnnnnnnnngcttaagttttacacagaaacattaataaacaataaagttcttttcttactgtaaa

SEQ ID NO: 69911 - DNA, 632 bp, Homo Sapiens
  misc_feature (378)..(450): n is a, c, g, or t
  misc_feature (566)..(579): n is a, c, g, or t
gggggggcctgcggtgggagtgggaaggaaggcggagggaaccatgcgaggttctgagaattgcggcgagggtcgcctcgagagacggtttctgaggcgttgaccctgcactatcagatcctgtgttggcccggcgccttcgggaaaaccggagtttggccatgagtcggctggatgaggtcatccccaaatacgcaatgttgcaagacaaaagtgaggagggcgagagaaaaaagagaagagctcggctccaaggcacctcttcccactctgcagacacccccgaagcctccttggattttggtgagggccctagtggaatggcatcccaggggtgcccttctgcctccagagctgagacagatgacgaagacgatnnnnnnnnnnnnnnnnnnnnnnnnnnnnnnnnnnnnnnnnnnnnnnnnnnnnnnnnnnnnnnnnnnnnnnnnnaggatctggaacagatgcaggagggtcaggaggatgatgaagaggaggacgaagaggaagaagcagcagcaggtaaagatggactaagctaatccccttttggtggtgtttctttnnnnnnnnnnnnnngcttaagttttacacagaaacattaataaacaataaagttcttttcttactgt

SEQ ID NO: 69912 - DNA, 798 bp, Homo Sapiens
ggcacgagggtggggcctgcggtgggagtgggaaggaaggcggagggaaccatgcgaggttctgagaattgcggcgagggtcgcctcgagagacggtttctgagcaggaattctgaaatccccaccacttcctccctccgggggatttgatcccctatggccaccgctaacagcatcatcgtgctggatgatgatgacgaagatgaagcagctgctcagccagggccctcccacccactccccaatgcggcctcacctggggcagaagcccctagctcctctgagcctcatggggccagaggaagcagtagttcgggcggcaagaaatgctacaagctggagaatgagaagctgttcgaagagttccttgaactttgtaagatgcagacagcagaccaccctgaggtggtcccattcctctataaccggcagcaacgtgcccactctctgtttttggcctcggcggagttctgcaacatcctctctagggtcctgtctcgggcccggagccggccagccaagctctatgtctacatcaatgaactctgcactgttctccagggccccctcagcccaaaaagaaccttgacttgggcccctgccggcaccacctccaatggacccctctgggaaatacccctcccacaaaccttctctttggaccccccaaatggcggaaaaactggcctctcagtcttccaaggaacccgtgggttccccggggggccaaatcccgcggtttggaaccaacttggttgggccttctaatggggggcaaaaaattccggggggctggca

SEQ ID NO: 69913 - DNA, 962 bp, Homo Sapiens
  misc_feature (161)..(211): n is a, c, g, or t
tgcacgaggcgagagaaaaaagagaagagctggctcaaggcacctcttcccactctgcagacacccccgaagcctccttggatttggtgagggccctagtggaatggcatccaggggtgcccttctgcctccagagctgagacagatgacgaagacgatgnnnnnnnnnnnnnnnnnnnnnnnnnnnnnnnnnnnnnnnnnnnnnnnnnnnccacagattctgaagaggaggaggatctggaacagatgcaggagggtcaggaggatgatgaagaggaggacgaagaggaagaagcagcagcaggtaaagatggagacaagagccccatgtcctcactacagatctccaatgaaaagaacctggaacctggcaaacagatcagcagatcttcaggggagcagcaaaacaaaggacgcatagtgtcaccatcgttactgtcagaagaacccctggccccctccagcatagatgctgaaagcaatggagaacagcctgaggagctgaccctggaggaagaaagccctgtgtctcagctctttgagctagagattgaagctttgcccctggataccccttcctctgtggagacggacatttcctcttccaggaagcaatcagaggagcccttcaccactgtcttagagaatggagcaggcatggtctcttctacttccttcaatggaggcgtctctcctcacaactgggggagattcttggtcccccctgcaaaaaatctcggacagagaagaagcaaacaggatcagggccattaggaaacagctatgtgcaaggcaaggtcagtgctgcaagatgggaacgattgttcctggcaggcacttccctggttcttggcccgtgtgttccccgaggtgcctcacgcctgtctgggaaagccccggtctcttcgaacggtgtaaacccataatctcgtgggtgcaagggccaggcacaaaaatggaca

SEQ ID NO: 69914 - DNA, 488 bp, Homo Sapiens
  misc_feature (417)..(430): n is a, c, g, or t
tcagtgcatgagaagaatgggaaaaagatatgtaccctgcccagcccaccttcccccttggcttccttggccccagttgctgattcctccacgagggtggactctcccagccatggcctggtgaccagctccctctgcatcccttctccagcccggctgtcccaaaccccccattcacagcctcctcggcctggtacttgcaagatctctttgactctttgtctctcacttccctgcagacaagtgtggccacacaatgcgatccagaagagatcatcgtgctctcagactctgattagctgcctccccttctccctgcctccagaatgttctgggataacatttggaggaaggtgggaagcagatgactgaggaagggatggactaagctaatccccttttggtggtgtttctttnnnnnnnnnnnnnngcttaagttttacacagaaacattaataaacaataaagttcttttcttactgtaaaaa

SEQ ID NO: 69915 - DNA, 2165 bp, Homo Sapiens
  misc_feature (1646)..(1658): n is a, c, g, or t
  misc_feature (1772)..(1825): n is a, c, g, or t
cagtcgacggtaccggacatatgcccgggaattcggccattacggccggggggcggctaccgggaagtcgctgaagacagagcgatggtagttctggaggcctcgctccggggccgacccgaggccacagtgcctccgcggtagaccggacttgggtgacgggctccgggctcccgagggatggaagggtctaagacgtccaacaacagcaccatgcaggtgagcttcgtgtgccagcgctgcagccagcccctgaaactggacacgagtttcaagatcctggaccgtgtcaccatccaggaactcacagctccattacttaccacagcccaggcgaaaccaggagagacccaggaggaagagactaactcaggagaggagccatttattgaaactcctcgccaggatggtgtctctcgcagattcatccccccagccaggatgatgtccacagaaagtgccaacagcttcactctgattggggaggcatctgatggcggcaccatggagaacctcagccgaagactgaaggtcactggggacctttttgacatcatgtcgggccagacagatgtggatcacccactctgtgaggaatgcacagatactcttttagaccagctggacactcagctcaacgtcactgaaaatgagtgtcagaactacaaacgctgtttggagatcttagagcaaatgaatgaggatgacagtgaacagttacagatggagctaaaggagctggcactagaggaggagaggctgatccaggagctggaagacgtggaaaagaaccgcaagatagtggcagaaaatctcgagaaggtccaaggctgaggctgagagactggatcaggaggaagctcagtatcagagagaaatacagtgaatttaaacgacagcagctggagctggatgatgagctgaagagtgttgaaaaccagatgcgttatgcccagacgcagctggataagctgaagaaaaccaacgtctttaatgcaaccttccacatctggcacagtggacagtttggcacaatcaataacttcaggctgggtcgcctgcccagtgttcccgtggaatggaatgagattaatgctgcttggggccagactgtgttgctgctccatgctctggccaataagatgggtctgaaatttcagagataccgacttgttccttacggaaaccattcatatctggagtctctgacagacaaatctaaggagctgccgttatactgttctggggggttgcggtttttctgggacaacaagtttgaccatgcaatggtggctttcctggactgtgtgcagcagttcaaagaagaggttgagaaaggcgagacacgtttttgtcttccctacaggatggatgtggagaaaggcaagattgaagacacaggaggcagtggcggctcctattccatcaaaacccagtttaactctgaggagcagtggacaaaagctctcaagttcatgctgacgaatcttaagtggggtcttgcttgggtgtcctcacaattttataacaaatgacttttttccttagggggaggtttgccttaaaggcttttaattttgttttgtttgcaaacatgttttaaattaaattcgggtaatattaaacagtacatgtttacaataccnnnnnnnnnnnnntccacaaaagccactttattttaaaatatcatgtgacagatactttccagagctacaacatgccatctatagttgccagccctggtcagttttgattcttaaccccatggactnnnnnnnnnnnnnnnnnnnnnnnnnnnnnnnnnnnnnnnnnnnnnnnnnnnnnnaactgagttgaattgagattgatgtgttttcactggatttttatctctctcaacttcctgcacttaacaatatgaaatagaaacttttgtctttactgagatgaggatatgtttgagatgcacagttggataatgtgggaaaatgacatctaagctttacctggtcaccatgtgatgtgatcagatgcttgaaatttaacacttttcacttggttcttatactgaatgccgactctgctctgtgttagagatatgaaatggtgtttgatactgtttgagacattatggagagatttaattatttgtaataaaagatttgctgcagtctgaaaactgaaaa

SEQ ID NO: 69916 - DNA, 520 bp, Homo Sapiens
aaattgtgaggacacccaagcaagaccccacttaagattcgtcagcatgaacttgagagcttttgtccactgctcctcagagttaaactgggttttgatggaataggagccgccactgcctcctgtgtcttcaatcttgcctttctccacatccatcctgtagggaagacaaaaacgtgtctcgcctttctcaacctcttctttgaactgctgcacacagtccaggaaagccaccattgcatggtcaaacttgttgtcccagaaaaaccgcaaccccccagaacagtataacggcagctcctgcccaagaagagaaaactggctatggatctggcaccaagaaaggcttccagagattgttcccaatcctatcaatctctcaagtcatgttctgtctgtatcccactggaaacttgtattgtagctggactctatcttccatagatttgaacaactacaataagcttgggcaagtaacaatgcacttagaactgtttcactatcaatgaaaatgtaccat

SEQ ID NO: 69917 - DNA, 829 bp, Homo Sapiens
  misc_feature (94)..(142): n is a, c, g, or t
  misc_feature (532)..(752): n is a, c, g, or t
  misc_feature (764)..(783): n is a, c, g, or t
gggccttttagttgctaactgacctggaaagaaaaagcaataccctcaaagtgactattcagttttcaggatgatacactatgaagatgtttcnnnnnnnnnnnnnnnnnnnnnnnnnnnnnnnnnnnnnnnnnnnnnnnnntctatgcaatctgagtagagcagccacaaccaaaaaattctacaacacacactgttctgaaagtgactcacttatcccaagagaatgaaattgctgaaagatctttcaggactctacctcatatcagtttgctagcagaaatctagaagactgtcagcttccaaacattaatgcaatggttaacatcttctgtctttataatctactccttgtaaagactgtagaagaaagcgcaacaatccatctctcaagtagtgtatcacagtagtagcctccaggtttccttaagggacaacatccttaagtcaaaagagagaagaggcaccactaaaagatcgcagtttgcctggtgcagtggctcacacctgtaatcccaacattttgggaacnnnnnnnnnnnnnnnnnnnnnnnnnnnnnnnnnnnnnnnnnnnnnnnnnnnnnnnnnnnnnnnnnnnnnnnnnnnnnnnnnnnnnnnnnnnnnnnnnnnnnnnnnnnnnnnnnnnnnnnnnnnnnnnnnnnnnnnnnnnnnnnnnnnnnnnnnnnnnnnnnnnnnnnnnnnnnnnnnnnnnnnnnnnnnnnnnnnnnnnnnnnnnnnnnnnnnnnnnnnnngacttggtttcnnnnnnnnnnnnnnnnnnnncttcagtaagtacgtgttatttttttcaataaaattctattacagt

SEQ ID NO: 69918 - DNA, 1183 bp, Homo Sapiens
  misc_feature (55)..(55): n is a, c, g, or t
  misc_feature (69)..(100): n is a, c, g, or t
  misc_feature (103)..(137): n is a, c, g, or t
cctgtatagaagtcactaataaggggacggctaagccgcccttctttattttagncccgaaaactgaannnnnnnnnnnnnnnnnnnnnnnnnnnnnnnncgnnnnnnnnnnnnnnnnnnnnnnnnnnnnnnnnnnncagtcgacggtaccggacatatgcccgggaattcggccattacggccgggggaccggctgcctggctgacttacagcagtcagactctgacaggatcatggctatgatggaggtccaggggggacccagcctgggacagacctgcgtgctgatcgtgatcttcacagtgctcctgcagtctctctgtgtggctgtaacttacgtgtactttaccaacgagctgaagcagatgcaggacaagtactccaaaagtggcattgcttgtttcttaaaagaagatgacagttattgggaccccaatgacgaagagagtatgaacagcccctgctggcaagtcaagtggcaactccgtcagctcgttagaaagatgattttgagaacctctgaggaaaccatttctacagttcaagaaaagcaacaaaatatttctcccctagtgagagaaagaggtcctcagagagtagcagctcacataactgggaccagaggaagaagcaacacattgtcttctccaaactccaagaatgaaaaggctctgggccgcaaaataaactcctgggaatcatcaaggagtgggcattcattcctgagcaacttgcacttgaggaatggtgaactggtcatccatgaaaaagggttttactacatctattcccaaacatactttcgatttcaggaggaaataaaagaaaacacaaagaacgacaaacaaatggtccaatatatttacaaatacacaagttatcctgaccctatattgttgatgaaaagtgctagaaatagttgttggtctaaagatgcagaatatggactctattccatctatcaagggggaatatttgagcttaaggaaaatgacagaatttttgtttctgtaacaaatgagcacttgatagacatggaccatgaagccagttttttcggggcctttttagttggctaactgacctggaaagaaaaagcaataacctcaaagtgactattcagttttcaggatgatacactatgaagatgtttcaaaaaatctgaccaaaacaaacaaacag

SEQ ID NO: 69919 - DNA, 781 bp, Homo Sapiens
cagtcgacggtaccggacatatgcccgggaattcggccattacggccggggacagaacccagaaaaacaactcattcgctttcatttcctcactgactataaaagaatagagaaggaagggcttcagtgaccggctgcctggctgacttacagcagtcagactctgacaggatcatggctatgatggaggtccaggggggacccagcctgggacagacctgcgtgctgatcgtgatcttcacagtgctcctgcagtctctctgtgtggctgtaacttacgtgtactttaccaacgagctgaagcagatgcaggacaagtactccaaaagtggcattgcttgtttcttaaaagaagatgacagttattgggaccccaatgacgaagagagtatgaacagcccctgctggcaagtcaagtggcaactccgtcagctcgttagaaagatgattttgagaacctctgaggaaaccatttctacagttcaagaaaagcaacaaaatatttctcccctagtgagagaaagaggtcctcagagagtagcagctcacataactgggaccagaggaagaagcaacacattgtcttctccaaactccaagaatgaaaaggctctgggccgcaaaataaactcctgggaatcatcaaggagtgggcattcattcctgagcaacttgcacttgaggaatggtgaactggtcatccatgaaaaagggttttactacatctattcccaaacatactttcgatttcaggaggaaataaacagaaaacacaaagaac

SEQ ID NO: 69920 - DNA, 998 bp, Homo Sapiens
  misc_feature (29)..(29): n is a, c, g, or t
  misc_feature (167)..(167): n is a, c, g, or t
  misc_feature (220)..(220): n is a, c, g, or t
  misc_feature (226)..(226): n is a, c, g, or t
  misc_feature (250)..(250): n is a, c, g, or t
  misc_feature (266)..(266): n is a, c, g, or t
  misc_feature (295)..(295): n is a, c, g, or t
aaaccgaggagtgtgcaacctgcgtgacnctgagccggcagtcagcaggcactttgtatataccaccgcatgcgagcagacagcaccctttcagtttggctctgccacagagaacagcgcgatacagacgcctgtgacttgtggcaggaccctgagcacagagacanggagcaagaccatgagccagagctccaggatcctcactcaacctcgccatgancgcagntgggtgtgagggggtcccagcctntcagtttctattcccntatttccagtgctttccagccggtttctngacccagagggtggaaccggcctggactcctcttcccaacttcctccaggtcatttcccagtgtgagcacaatgccaaccttagtgttctccagccagacagatgcctcagcatgaagggcttggggacttgtggatcattccttcctccctgcaggagcttcccaagctggtcacagagtctcctgggcacaggttatacagaccccagccccattcccatctactgaaacagggtctccacaagaggggccagggaatatgggtttttaacaagcgtcttacaaaacacttctctatcatgcagccggagagctggctgggagcccttttgttttagaacacacatccttcagcagctgagaaacgaacacgaatccatcccaaccgagatgccattaacattcatctaaaaatgttaggctctaaatggacgaaaaattctctcgccatcttaataacaaaataaactacaaattcctgacccaaggacactgtgttataagaggcgtgggctcccctggtggctgaccaggtcagctgccctggccttgcacccctctgcatgcagcacagaagggtgtgaccatgccctcagcaccactcttgtccccactgaacggcaactgagactgggtacctggagattctgaagtgcctttgctgtggttttcaaaataataaagatttgtattcaaaaaaaa

SEQ ID NO: 69921 - DNA, 2005 bp, Homo Sapiens
caggtgtggcgctgccctgggcgggcttgcacccccacacccaagtgagcggcctgctcactcctcagctgcaggagccagacgtgtggagtcccagcagaggccaacctgtgtctcttcatctccctgggaaaggtgcccccgaggtgaaagagatggcctggtggaaatcctggattgaacaggagggtgtcacagtgaagagcagctcccacttcaacccagaccctgatgcagagaccctctacaaagccatgaaggggatcgggaccaacgagcaggctatcatcgatgtgctcaccaagagaagcaacacgcagcggcagcagatcgccaagtccttcaaggctcagttcggcaaggacctcactgagaccttgaagtctgagctcagtggcaagtttgagaggctcattgtggcccttatgtatccgccatacagatacgaagccaaggagctgcatgacgccatgaagggcttaggaaccaaggagggtgtcatcattgagatcctggcctctcggaccaagaaccagctgcgggagataatgaaggcgtatgaggaagactatgggtccagcctggaggaggacatccaagcagacacaagtggctacctggagaggatcctggtgtgcctcctgcagggcagcagggatgatgtgagcagctttgtggacccaggcactggccctccaagacgcacaggatctgtatgcggcaggcgagaagattcgtgggactgatgagatgaaattcatcaccatcctgtgcacgcgcagtgccactcacctgctgagagtgtttgaagagtatgagaaaattgccaacaagagcattgaggacagcatcaagagtgagacccatggctcactggaggaggccatgctcactgtggtgaaatgcacccaaaacctccacagctactttgcagagagactctactatgccatgaagggagcagggacgcgtgatgggaccctgataagaaacatcgtttcaaggagcgagattgacttaaatcttatcaaatgtcacttcaagaagatgtacggcaagaccctcagcagcatgatcatggaagacaccagcggtgactacaagaacgccctgctgagcctggtgggcagcgacccctgaggcacagaagaacaagagcaaagaccatgaagccagagtctccaggactcctcactcaacctcggccatggacgcaggttgggtgtgaggggggtcccagcctttcggtcttctatttccctatttccagtgctttccagccgggtttctgacccagagggtggaaccggcctggactcctcttcccaacttcctccaggtcatttcccagtgtgagcacaatgccaacccttagtgtttctccagccagacagatgcctcagcatgaagggcatggaggacttcgtggatcattcctcaacctcggccatgcacgcaggtcatttcccaagctgagcacaaagccaacctgagcacaggttatacagaccacacagatgcctcagcatgaagggcttggggacttgtggatcattccttcctccctgcaggagcttcccaagtctgacaaaacacttctccagcacacagccggagagctggctgggagcccttttgttttagaacacacatccttcagcagctgagaaatgaacacgaatccatcccaaccgagatgccattaacattcatctaaaaatgttaggctctaaatggacgaaaaattctctcgccatcttaataacaaaataaactacaaattcctgacccaaggacactgtgttataagaggcgtgggctcccctggtggctgaccaggtcagctgccctggccttgcacccctctgcatgcagcacagaagggtgtgaccatgccctcagcaccactcttgtccccactgaacggcaactgagactgggtacctggagattctgaagtgcctttgctgtggttttcaaaataataaagatttgtattcaactc

SEQ ID NO: 69922 - DNA, 1710 bp, Homo Sapiens
  misc_feature (193)..(211): n is a, c, g, or t
cgggggtctcccgcgtccctccgcctcgccgggagctcgcgccctcgcccagccgagctcccacccccgcttttttccgagaggcgctgggcggcgccaccctccggccggagcccggcactgcacaaccccctccgactttcaatgttccacactccccggccagagcctcctcggcttctttttttccctnnnnnnnnnnnnnnnnnnnacagctgcctccatttccttaaggaagggtttttttctctctccctcccccacaccgtagcggcgcgcgagcgggccgggcgggcggccgagttttccaagagataacttcaccaagatgtccagtgataggcaaaggtccgatgatgagagccccagcaccagcagtggcagttcagatgcggaccagcgagacccagccgctccagagcctgaagaacaagaggaaagaaaaccttctgccacccagcagaagaaaaacaccaaactctctagcaaaaccactgctaagttatccactagtgctaaaagaattcagaaggagctagctgaaataacccttgatcctcctcctaattgcagtgctgggcctaaaggagataacatttatgaatggagatcaactatacttggtccaccgggttctgtatatgaaggtggtgtgttttttctggatatcacattttcatcagattatccatttaagccaccaaaggttactttccgcaccagaatctatcactgcaacatcaacagtcagggagtcatctgtctggacatccttaaagacaactggagtcccgctttgactatttcaaaggttttgctgtctatttgttcccttttgacagactgcaaccctgcggatcctctggttggaagcatagccactcagtatttgaccaacagagcagaacacgacaggatagccagacagtggaccaagagatacgcaacataattcacataatttgtatgcagtgtgaaggagcagaaggcatcttctcactgtgctgcaaatctttatagcctttacaatacggacttctgtgtatatgttatactgattctactctgcttttatcctttggagcctgggagactccccaaaaaggtaaatgctatcaagagtagaactttgtagctgtagattagttatgtttaaaacgcctacttgcaagtcttgcttctttgggatatcaaaatgtattttgtgatgtactaaggatactggtcctgaagtctaccaaatattatagtgcattttagcctaattcattatctgtatgaagttataaaagtagctgtagatggctaggaattatgtcatttgtattaaacccagatctatttctgagtatgtggttcatgctgttgtgaaaaatgttttaccttttacctttgtcagtttgtaatgagaggatttccttttaccctttgtagctcagagagcacctgatgtatcatctcaaacacaataaacatgctcctgaaggcatagtttcctgtcgtaatattttaagtcagtcttgttagaaagtgtgtctgagatgattgttgatgaagtaaaaatgtggctatgaagattactaaagactagcacaaataaaaccattcttaaattgcaaaccatttaaaatcctattaaatgcatagagttttttcctttgttattgacagaatgaccttaaataatcaagagtggatttggagccattg

SEQ ID NO: 69923 - DNA, 357 bp, Homo Sapiens
  misc_feature (72)..(81): n is a, c, g, or t
gcgcccagcctcatgagggtctattctttacattcaccatggtctgatggttgctacatgtttgtctatgannnnnnnnnnctattatcaggtgtcttggccggttcatgccccacgatgaaagggccagaggttttcatatgagtaaaagaaaaaagcagaaatgtgaaacctacaattaggctaaacaaaaatcaactggaaaagtacaggctgaggggagaagagttggctacatgtttatgttaggggaggagggagtacattttagctatgtattcaaacagctaatagtttaatgttgctgcttataaacttaattttaggctgcattaataaaagtgtagtctccaaaac

SEQ ID NO: 69924 - DNA, 989 bp, Homo Sapiens
gctgagacctgaagggtgagtagatgacaaacaggcagggtaaagggaagagcatcccaggcagagaggctagcatataatgaaggctctgagtaggaactgggaggaattgcttggaatgaaaaatgaagagggagtggctagatgaagactgcaggctggttaaggacttttgccctctggagaaggagctgagaagtgttttaagcagaaatttgactgcatgggagaagtatagagttgagaaaagtagtcctctgaggcttaagatagtgtcatctagactccagttccctcatcttgggtagcatagtagccccagcccaaaactgcaagcatgatccccgtctgggtttccttcacaagcactggagcatcttgtgctatgtgctgaactcaggtggataagaggttgaggcggttcccaaagctcctgctgcacccaggtgttgagcctaaatctgaaccttgtggagaggtcacaagaaagatccctaacagcactttggtttagtcagggctaggtgtcatcacctgtatgccctttggccaaggaaaccagaatttttcaggattttccccacctctggaaggctggaggaaggggaagacccactcagcagattcccatagtgcagggatcctcacaggcatgactttgccctttgtcatggatactgcagctcccagacagtcttctgggctttgatcagcctgcaatcatctgactagagcttgatttttggggcagggaaggtggtccttatatgagctgccacttaatgggccactggggatttttcaacatgaaaggtaccgagtctccaaatgctggttgtagggcctaaaaacagggctcaactccaggttctgccactttctagctgagtgatgagggctaacgtctggggagcaagatccctattttttcccattgtaaaattgggctaataaaagatgctacccactgactattaaataatatatgt

SEQ ID NO: 69925 - DNA, 988 bp, Homo Sapiens
cagtcgacggtaccggacatatgcccgggaattcggccattacggccgggggggaaagagcttgtcgctgcggtgttgctgttggagactcgattgttggtgacagcgaaagaacgataacaaaatgccggagcgagatagtgagccgttctccaaccctttggcccccgatggccacgatgtggatgatcctcactccttccaccaatcaaaactcaccaatgaagacttcaggaaacttctcatgacccccagggctgcacctacctctgcaccaccttctaagtcacgtcaccatgagatgccaagggagtacaatgaggatgaagacccagctgcacgaaggaggaaaaagaaaagttattatgccaagctacgccaacaagaaattgcgagagagagagagctagcagagaagtaccgggatcgtgccaaggaacggagagatggagtgaacaaagattatgaagaaaccgagcttatcagcaccacagctaactatagggctgttggccccactgctgaggcggacaaatcagctgcagagaagagaagacagttgatccaggagtccaaattcttgggtggtgacatggaacacacccatttggtgaaaggcttggattttgctctgcttcaaaaggtacgagctgagattgccagcaaagagaaagaggaagaggaactgatggaaaagccccagaaagaaaccaagaaagatgaggatcctgaaaataaaattgaatttaaaacacgtctgggccgcaatgtttaccgaatgctttttaagagcaaagcatatgagcggaatgagttgttcctgccgggccgcatggcctatgtggtacacctggatgatgaatatgctgacacagatatccccacccactcttatccgcagcaaggctgattggccccaccatgggaggccagaccacacctgaccacaaatgaactttgtcattagcaagctggacccagatccttt

SEQ ID NO: 69926 - DNA, 1928 bp, Homo Sapiens
  misc_feature (368)..(382): n is a, c, g, or t
  misc_feature (1166)..(1240): n is a, c, g, or t
ccaaggtagcgaggcctgggtggcgaattcggcacgagggtcgctgcggtgttgctgttggagactcgattgttggtgacagcgaaagaacgataacaaaatgccggagcgagatagtgagccgttctccaaccctttggcccccgatggccacgatgtggatgatcctcactccttccaccaatcaaaactcaccaatgaagacttcaggaaacttctcatgacccccagggctgcacctacctctgcaccaccttctaagtcacgtcaccatgagatgccaagggagtacaatgaggatgaagacccagctgcacgaaggaggaaaaagaaaagttattatgccaagctacgccaacaagaaattnnnnnnnnnnnnnnnctagcagagaagtaccgggatcgtgccaaggaacggagagatggagtgaacaaagattatgaagaaaccgagcttatcagcaccacagctaactatagggctgttggccccactgctgaggcggacaaatcagctgcagagaagagaagacagttgatccaggagtccaaattcttgggtggtgacatggaacacacccatttggtgaaaggcttggattttgctctgcttcaaaaggtacgagctgagattgccagcaaagagaaagaggaagaggaactgatggaaaagccccagaaagaaaccaagaaagatgaggatcctgaaaataaaattgaatttaaaacacgtctgggccgcaatgtttaccgaatgctttttaagagcaaagcatatgagcggaatgagttgttcctgccgggccgcatggcctatgtggtagacctggatgatgagtatgctgacacagatatccccaccactcttatccgcagcaaggctgattgccccaccatggaggcccagaccacactgaccacaaatgacattgtcattagcaagctgacccagatcctttcatacctgaggcagggaacccgtaacaagaagcttaagaagaaggataaagggaagctggaagagaagaaacctcctgaggctgacatgaatacttttgaagacattggggattacgtaccctccacaaccaagacacctcgggacaaggagcgggagagatatcgggaacgggagcgtgatcgggaaagagacagagaccgtgacnnnnnnnnnnnnnnnnnnnnnnnnnnnnnnnnnnnnnnnnnnnnnnnnnnnnnnnnnnnnnnnnnnnnnnnnnnncacagctactttgagaagccaaaagtagatgatgagcccatggacgttgacaaaggacctgggtctaccaaggagttgatcaagtccatcaatgaaaagtttgctgggtctgctggctgggaaggcacagaatcgctgaagaagccagaagacaaaaagcagctgggagatttctttggcatgtccaacagttatgcagagtgctacccagccacgatggatgacatggctgtggatagtgatgaggaggtggattatagcaaaatggaccagggtaacaagaaggggcccttaggccgttgggactttgatacccaggaagaatacagcgagtatatgaacaacaaagaagctttgcccaaggctgcattccagtatggtatcaaaatgtctgaagggcggaaaaccaggcgcttcaaggaaaccaatgacaaagcagagcttgatcgccagtggaagaagattagtgcaatcattgagaagaggaagaagatggaagctgatggggttgaagtcaaaagaccaaaatactaatcactagttacaaccagagatgctccacaaggatatgctccccactgttttctttctacaatttccaaaggttgcaagatgtttttttgtggatgaatataaaattttattgtgtaattacttggttccattaaaattggttaacttgctaaaa

SEQ ID NO: 69927 - DNA, 953 bp, Homo Sapiens
  misc_feature (343)..(357): n is a, c, g, or t
cgacgagggagcttgtcgctgcggtgttgctgttggagactcgattgttggtgacagcgaaagaacgataacaaaatgccggagcgagatagtgagccgttctccaaccctttggcccccgatggccacgatgtggatgatcctcactccttccaccaatcaaaactcaccaatgaagacttcaggaaacttctcatgacccccagggctgcacctacctctgcaccaccttctaagtcacgtcaccatgagatgccaagggagtacaatgaggatgaagacccagctgcacgaaggaggaaaaagaaaagttattatgccaagctacgccaacaagaaattnnnnnnnnnnnnnnnctagcagagaagtaccgggatcgtgccaaggaacggagagatggagtgaacaaagattatgaagaaaccgagcttatcagcaccacagctaactatagggctgttggccccactgctgaggcggacaaatcagctgcagagaagagaagacagttgatccaggagtccaaattcttgggtggtgacatggaacacacccatttggtgaaaggcttggattttgctctgcttcaaaaggtacgagctgagattgccagcaaagagaaaagaggaagaggaactgatgggaaaagcccccagaaagaaaccaaggaaagatgaggatcctttcatacctgaggcagggaacccgtaacaagaagcttaagaagaaggataaaggggaagctggggtctaccaaggagttgatcaagtccatcaatgaaaaagttgctgggtctgctggctgggaaggcacagaatcgctgaaagaagccagagacaaaagcagctgggagatttctttggcatgttcaacagttatgcagagtgctacccacccacgatggatgacatggctgtggataatgatgaagaagtggaattatagcaaaag

SEQ ID NO: 69928 - DNA, 1657 bp, Homo Sapiens
  misc_feature (1139)..(1433): n is a, c, g, or t
cgaaccgctattgagccgcggcgtctatgcagcgccccgaggagagcgcctcgcgtgcctggccccgcgcgcggggaaccccgcagtggacgcgagcacctgagggtcgtccgagaggcccccctgcaacgcgctggcacgaaaccctctcgactcgggcaacctgactaaccccgggcaacacgaccaggcacccaccagcaagcaatgggaaccaatctgtgggcacgggaaccaggccaggagcccacagtctgagggcctgccctggccgcagcggagccccttctaggctggactgtcatctgtgatgggaggactgctgaaatgacccctaaagacaggtccctttggcgctggcatgccaaccagttgtgacccccacagcaggcactgcctcttatatgcacccccacttcacacctcctcaatggagggtgggaacacccaactcccacatgctcacccactcacacctcctcactgagggtgggaacacacgaagctctgctctcatgcgtttccaaactctgcttccgctctgcaaaccacatccttcccctcccccagacaaagagatctacaaatctgggtcccttcccaccctccaccattcactctcaaaaaagggactgaggttaggagacggtgagatcgttacagccatccccctgcgttggtattctgctcctcctgaagctttcgagacctttcccattgaagctccctgagaaggaaatgccactacctctctcatgagagatgtgggggggaagaggagaagagggctgcacccgttcatacccagcctgggccccgtcttcaaatctaacctaaccgccacagtagtccagtctggggaatgcaagcggcttgggaaagttggagaacagccacttggagatgagaaccccagcctttggtttgggctgagggagggaagaagtgttctgggtggggtgtcttggtttcaatgcacagaatcacttggacctctcactcttcaacatggcaacctcggggtagacttacttctcttcccatccagacaaaagttaagtttcgctctaagtgggccagccttgggcaagggcgtgggtgtgaatgagcaactcttctaagaatctctgaaggttacnnnnnnnnnnnnnnnnnnnnnnnnnnnnnnnnnnnnnnnnnnnnnnnnnnnnnnnnnnnnnnnnnnnnnnnnnnnnnnnnnnnnnnnnnnnnnnnnnnnnnnnnnnnnnnnnnnnnnnnnnnnnnnnnnnnnnnnnnnnnnnnnnnnnnnnnnnnnnnnnnnnnnnnnnnnnnnnnnnnnnnnnnnnnnnnnnnnnnnnnnnnnnnnnnnnnnnnnnnnnnnnnnnnnnnnnnnnnnnnnnnnnnnnnnnnnnnnnnnnnnnnnnnnnnnnnnnnnnnnnnnnnnnnnnnnnnnntgaaggttacttttcttttcagtggtttggggcagggagttacacagcttaatagattaagaagaataaaatgctgaatgctatcatttctttctaacatatttagcattaatgaaaagtgagtatttctgaggtcatcacaactgcctccccctcccccaagcccttgcaagtgcctaagaattcctcggccgattcgccaccaggcctcgtacctagcccta

SEQ ID NO: 69929 - DNA, 1034 bp, Homo Sapiens
  misc_feature (95)..(230): n is a, c, g, or t
  misc_feature (261)..(347): n is a, c, g, or t
  misc_feature (380)..(508): n is a, c, g, or t
  misc_feature (707)..(719): n is a, c, g, or t
  misc_feature (908)..(908): n is a, c, g, or t
gaaggtgacccgaacgggttgcactgctggctcaggcagcctgcgtttattcccttatctgaccccaaccacatcctgctgattggtccattttnnnnnnnnnnnnnnnnnnnnnnnnnnnnnnnnnnnnnnnnnnnnnnnnnnnnnnnnnnnnnnnnnnnnnnnnnnnnnnnnnnnnnnnnnnnnnnnnnnnnnnnnnnnnnnnnnnnnnnnnnnnnnnnnnnnnnnnnagttctccaagtccctagatttagctagacnnnnnnnnnnnnnnnnnnnnnnnnnnnnnnnnnnnnnnnnnnnnnnnnnnnnnnnnnnnnnnnnnnnnnnnnnnnnnnnnnnnnnnnagttctccaagtccccactggattagctagacnnnnnnnnnnnnnnnnnnnnnnnnnnnnnnnnnnnnnnnnnnnnnnnnnnnnnnnnnnnnnnnnnnnnnnnnnnnnnnnnnnnnnnnnnnnnnnnnnnnnnnnnnnnnnnnnnnnnnnnnnnnnnnnnnagttctccaagtccccacccgactcaggagtccagctggctttgcctactggatcccatgctggggccatgggtggagctgcctgctagtcccacaccatgcccccgcactcctcagcccttgggcggtcaatgggactggttgcaaagcagggggcggcgcccgtccgggaggctctggccatgagggagcagggcannnnnnnnnnnnnactcaggcatggcgggttgcaagtcccacgccctgctccacggggaggcagctgaggcccagcgagaattcaagcacagcccgggtgagctggcagtgctgggggacccggcacaccctccacagctgctggccggggtgctaagcccctcactgcctggggccggcggcaccagccggccactcctangtcggggcccgccaagccctcactggcccgcgagctctccctccacacctccccacaagcggagggagcccgctttggccttggccagtccagagaggggttccacagtgcagcggcgggctgaag

SEQ ID NO: 69930 - DNA, 2005 bp, Homo Sapiens
  misc_feature (1579)..(1588): n is a, c, g, or t
  misc_feature (1851)..(1863): n is a, c, g, or t
  misc_feature (1924)..(1947): n is a, c, g, or t
ccgatcgaccgcgagaaaacatgcccactggtgctacgggtcttcaccacaaataacggccgcccaccacgaaatggacgagttctcccggggaaaatgtaccgtccagcgagttgcagatctacacttggatggatgcaactttgaaagaactgacaagcttagtaaaagaagtctacccagaagctagaaagaagggcactcacttcaattttgcaatcgtttttacagatgttaaaagacctggctatcgttgattttctttcttacagagttaaggagattgccagcaccatgtctggcagaaaggggactgatgattccatgaccctgcagtcgcagaagttccagataggagattacttggacatagcaattacccctccaaatcgggcaccacctccttcagggcgcatgagaccatattaaattctatttactatttgttgaatttatttttccgtcagttatgtaaaataaacatactcttcttcctcccctgattattgccattaagcctttaaattctaaacaaattataatgcatcatctatttaggagttagatttggatgtgctattgtatgattacgaatagtctgtatgtttcaagcccttctgtaaaatatgaagaaaagtgctcttagcattctgtgtaaaactgtactgttaaatatatgtgtgtaatcagcctgagtgtgaaagttaatggaggcctgggaacaggggtttatactaacgtagtggaggagcgtatggttaagcccaaaggggcagaacaagaaagccacgggattgtatgaaatcaaacatgagtttgtggtgtagactgctgtatgcagttggaaaggacacgtgagagtgagctcaagtggcagcagaggcagtttggaataagctgcggcaagttgaagaagctgtgttggacgagattgccccgccttgatcagggtaccatgacataaaaggttaaagaacaggcaacacaatgagcacttaagtttttaacatgtggggaatagggcattttaaaggctggaaccagttcagaggaaacaagggtttgggtagaggtagaaaggtttaattaaccctggagatctgcaaatggagggaggggtgaaggaggaatcttaagaccgagggagaagagccaaggacaaggtcaggttgaatgagtaggaggtgttcacacatcctcttgtgtgctaggtagtggcgtgcatctgatctgagaggcagtaaagcagtgatgaagacagtgcagcagaacattgaagtcctgattgcagcagtgactctgcaaccttggataaattatttcaatctttattttgtaaaacggagataacggcctataggattgttaagactgaatattttaaaagagcttagaatggtgcctgacaaatgagaaacaataaatactgattattggccataaagtggtattaaaactggatctcttttcttccatggcactactctcattttgaagtttatgaacggtacgacagtgtattgtaaattccctttagtttgttacagtagccaattgaaaatgtatatcccaaaatttnnnnnnnnnngtactagcagcaataaaattgcactagttttatctggtacatacaaaaacagccatttaaaatctgatgattctgtggaattggtgtccctgttagcaatggcagagaccagcctggagcctagatctggtgcttcttctgtgctgtggtttaccccaaacctttaggttgtttattcattcagattagatagactggagccataaagttaatttgcacctagctttttggagaatagccatgattaactgctattcgtggtnnnnnnnnnnnnnaaccctatgatttactatgcagatgaagagggtaggaactaaataaaggacttttaagccnnnnnnnnnnnnnnnnnnnnnnnncctgagcaggcggccgcaaggttttttccctttgttgagggttattttagcttgccac

SEQ ID NO: 69931 - DNA, 1050 bp, Homo Sapiens
  misc_feature (78)..(112): n is a, c, g, or t
actgtactagactcatatagggcgcccgcgtagagccgaacgacgagcgcagcgagtattgagcgaggaagcggccgnnnnnnnnnnnnnnnnnnnnnnnnnnnnnnnnnnncagtcgacggtaccggacatatgcccgggaattcggccattacggccggggagtgctcatgctcgctgcaggggtcggaggtcagggcgagcgtctcgcaggccgtaggaggaagatggcggtggagtcgcgcgttacccaggaggaaattaagaaggagccagagaaaccgatcgaccgcgagaagacatgcccactgttgctacgggtcttcaccaccaataacggccgccaccaccgaatggacgagttctcccggggaaatgtaccgtccagcgagttgcagatctacacttggatggatgcaactttgaaagaactgacaagcttagtaaaagaagtctacccagaagctagaaagaagggcactcacttcaattttgcaatcgtttttacagatgttaaaagacctggctatcgagttaaggagattggcagcaccatgtctggcagaaaggggactgatgattccatgaccctgcagtcgcagaagttccagataggagattacttggacatagcaattacccctccaaatcgggcaccacctccttcagggcgcatgagaccatattaaattctatttactatttgttgaatttatttttccgtcagttatgtaaaataaacatactcttcttcctcccctgattattgccattaagcctttaaattctaaacaaattataatgcatcatctatttaggagttagatttggatgtgctattgtatgattacgaatagtctgtatgtttcaagcccttctgtaaaatatgaagaaaagtgctcttagcattctgtgtaaaactgtactgttaaatatatgtgtgtaatcagcctgagtgttgacagttactggaggcctgggaacagggtttatactaagtagtggaggagcgtatgggtaagcccaaaggggccagaacaagaaagccag

SEQ ID NO: 69932 - DNA, 741 bp, Homo Sapiens
  misc_feature (14)..(14): n is a, c, g, or t
  misc_feature (575)..(583): n is a, c, g, or t
gaaagggcacagtnctaaggaaaagaaaaagaatgtaaaactatactgacccgttttcagttgtaaagggtcgtgagaaactggctggtccaatgagatttacagcaacattttccattgctgaagtgaggtagcagctctcttctgtcagctgaatgttaaggatggggaaaaagaatgcctttaagtttgctcttaatcgtatggaagcttgagctatgtgttggaagtgccctggttttaatccatacacaaagacggtacataatcctacaggtttaaatgtacataaaaatatagtttggaattctttgctctactgtttacattgcagattgctataatttcaaggagtgagattataaataaaatgatgcactttaggatgtttcctatttttgaaatctgaacatgaatcattcacatgaccaaaaattgtttttttaaaaatacatgtctagtctgtcctttaatagctctcttaaataagctatgatattaatcagatcattaccagttagcttttaaagcacatttgtttaagactatgtttttggaaaaatacgctacagaannnnnnnnnaagctacaaataaatgagatgctactaattgttttggaatctgttgtttctgccaaaggtaaattaactaaagatttattcaggaatccccatttgaatttgtatgattcaataaaagaaaacaccaagtaagttatataaaataaattgtgtatgag

SEQ ID NO: 69933 - DNA, 1078 bp, Homo Sapiens
cagtcgacggtaccggacatatgcccgggaattcggccattacggccggggtccggtaggaatcagtggacttggcggcagaggcagtgcggatccggcgttctccactgatcttttccaaggctgtacagacatggcggcggcttttcggaaggcggctaagtcccggcagcgggaacacagagagcgaagccagcctggctttcgaaaacatctgggcctgctggagaaaaagaaagattacaaacttcgtgcagatgactaccgtaaaaaacaagaatacctcaaagctcttcggaagaaggctcttgaaaaaaatccagatgaattctactacaaaatgactcgggttaaactccaggatggagtacatattattaaggagactaaggaagaagtaaccccagaacaactaaagctgatgagaactcaggacgtcaaatatatagaaatgaagagggttgcagaagctaagaaaatcgaaagactaaaatcagagctccatctgctggatttccaggggaagcaacagaacaagcatgtgttcttttttgacaccaaaaaggaagttgaacagtttgatgtcgcaactcacctgcaaacagccccggagctagtcgacagagtctttaataggcccaggatagagaccttgcagaaagaaaaagtgaaaggagttaccaatcagactggacttaagcgaatagctaaagaaaggcaaaagcagtataactgcctgacacagcggattgaacgagagaagaaattgttcgttattgctcagaaaattcaaacacgcaaagatcttatggataaaactcagaaagtgaaggtgaagaaagaaacggtgaactccccagctatttataaatttcagagtcgtcgaaaacgttgacgtgttatagataagccttgtcattctgtatcaaaaatctgttgtcgttttctagtaacttcaaattccattactccaaatggcatggttttccggtttgtaaccataactaaattgtcagtctgacatttaatgtctttctatggacaacattaaatctccctcccttctgtaattgttaaa

SEQ ID NO: 69934 - DNA, 692 bp, Homo Sapiens
  misc_feature (487)..(524): n is a, c, g, or t
gaatcggcacgagggacattgagttttaacagaagggaaaaggaaagaagaaaagatttttgcagaatttctcaaaaatcagtttgtggattccagtagtatttatattgagagaaacaaattttagtccttctaactgtgctaaaacttggatatttgtgaaaactccttaccaccatacaagcgtcagaagagctctcttgttgttagcacttattgtttgcaagaacagaatacatccttttatccttttatgaaaaatgacaagtgaaggcaaaaggggaaggttatttgatctggaagatgagtgttctgatgtggtggcttttgcaaaaatctttattggtgttgaaaactggaaaaaataactcatccagaattcatattgtcttgacaagaactatggttctctgtttttagatattgtggaaaatgtttttgggcatttttctctgattttatttcttctcccccacccctttttctnnnnnnnnnnnnnnnnnnnnnnnnnnnnnnnnnnnnnncagaacaaaagaagagagaaggaaattttatcaattaaaaatgctgtgtgataaaatcccagcccagattgctcagctgtttgtacctgacttgccgcctgcataggagccagttctgttccttctgactagcccctcttcctccaggggagaacttccaaatgttaa

SEQ ID NO: 69935 - DNA, 2966 bp, Homo Sapiens
  misc_feature (16)..(16): n is a, c, g, or t
  misc_feature (23)..(23): n is a, c, g, or t
  misc_feature (39)..(39): n is a, c, g, or t
  misc_feature (42)..(42): n is a, c, g, or t
  misc_feature (53)..(53): n is a, c, g, or t
  misc_feature (56)..(56): n is a, c, g, or t
  misc_feature (58)..(58): n is a, c, g, or t
  misc_feature (69)..(69): n is a, c, g, or t
  misc_feature (86)..(86): n is a, c, g, or t
  misc_feature (91)..(91): n is a, c, g, or t
  misc_feature (97)..(97): n is a, c, g, or t
  misc_feature (101)..(101): n is a, c, g, or t
  misc_feature (108)..(108): n is a, c, g, or t
  misc_feature (126)..(126): n is a, c, g, or t
  misc_feature (155)..(155): n is a, c, g, or t
  misc_feature (161)..(161): n is a, c, g, or t
  misc_feature (947)..(962): n is a, c, g, or t
  misc_feature (1857)..(1870): n is a, c, g, or t
  misc_feature (2206)..(2214): n is a, c, g, or t
  misc_feature (2453)..(2466): n is a, c, g, or t
  misc_feature (2478)..(2535): n is a, c, g, or t
cccagggatttgggantttttantaggaaaaagcccccngcntttcagaaagnccntntatttcccaanccattgggagccggccnttaanatcatnattnaaccaanccaatttttttaatactnaaccagggttttatggattattgcaatgntatatnaataatatatatcaccccttagaatcttgatttcttggtcatttctcaacctgaggtgcatagcatattcccacattccatttggtagcaatatgcggtctgaatgcatgcattcatgagtccatgtggccaagtcagcctgtgtgctactgaactgtcgaaggaaatagccactctgataggtagatgtgagtaaaaagaacaggaaaaaattgcttcttttattggtttccaaagaaacaaaccaaaccaaccagctcttggatgtgaagataaaatagtgcttttttgaaatggagaggaaaaacttggggaggaagaggcctgctgtgggggcatcggagccagccatgtaagaatcagagctgctccttcctgtgaatcctaggtggccctatgtcttctgtggagttacagtataaagcagggagctaattaagagtattaaaacttaaaaccattttttgactctgattttaagtacatttttatatgtcagttgctgcccttcacactaccaggccctgcagccacagtgttctgttggagaaacttggggaagtgttttctgaaccagttctttttcttggggtagagcgtgaaatccagacctgtttttgaaaggacagcacaggaggagaaaagtgactgggacgatgcttcctctcatccaaaacacatgcagagtcacatcctcatcctagtgtttggcagtttgagaccgctaccctgaacttaagagctttaaatatgagggttgtgtttctgggggggttatttttttgnnnnnnnnnnnnnnnnattgtgcttagaacaggttgcagatttcatcttcacctaccaagaggcggccgcctccttggacaagccgctcatggaccattagacttgagaagacgacccacgtggtgactgcaaagccctgggtacttgccttcatgttctggtttggttttccctttttctgctgctcttggcagcagcctggtcatcatctgcttgtgggagtgggaaatgggtattttagacccaacacaggttctaaatttaaaacaaataataattggaacaaataaaggttcttgtacccagagtgattctacatgggaaaaacaaaccagcttttttcagagagtgaccgaataggaagaagggattcagaaatatgatgtagtagaacatgccctgcaggaagaaaatgttttctctcctgcgtatgttaagaggaaatcagtttaaaatgcctgctaatcaaatgtcgactcagctaaccatatgtccaggttgctgcagagtttctttcaaatctgagtgttgcctgctgaactcggaggggagtttggagaaattttagacagcagctctgtgttctttttttgccgcagccaataagataatagcagaattagccaatcctaaaaccttctaaagacgatttttgagcatcccactgggattatttaatttttctttttgacgtgtgtttttagtttagaagtgctgtattccacaaggtttaagtcagtgaggttggaagataccctatcttttttattcaaaaagcacaatcaatcttttgtttgaaaatctatataaagtacaacttgcttttagcatgattattttcctaaataaaaagacaaagaatttacttactttatgttaattacgggcatgaagcaaaaggttttctttnnnnnnnnnnnnnngtgcagtgatgtagggctgtggttagttaaccgtactgagttatccatctagcatctgtggcttgctggaagggtagtattaactatttaacatgtaatggtgtacttcactcttacctagcacgctgtcttctcattgctttgggggagggagggtctctctgctggcactgtctaacttgcttacctgctgactttgcagtttgcttgtgctatgacatttattgtaggtgctatttagggtaggcttaaagtgctgggtggtgatttgagttcaaacaataaaaaattgtattttttcaatattgtataaacaatagtgttctaattaccttnnnnnnnnntaatgaccagttaagaattgcttttgatcttgtcaaaaaactgaatagaccccagtttcgggaaggtgtgtgagcagtgccatgactctgccccttacctaatcccacatctctctaatgataagacattggctcgcctctgaccagagccccagcaccagagagcggaagatgcagaattgtcaaatgacctgctgggggaggttgtaggagtttagcagattttgagtgtggctgcnnnnnnnnnnnnnntgtgtcgtatgnnnnnnnnnnnnnnnnnnnnnnnnnnnnnnnnnnnnnnnnnnnnnnnnnnnnnnnnnnatgaaggtgggataaggctcctctgttagtgctggaagctcctgtaatcgccgatggatcccactgtgccctcttgttctgtgcaagtctgtcctgtttgggcactaaccttggtccatgcatgtttatgtctgggtggggctttggctctccactggaaaactgacttcgcgggttgaacagagtcccttatgctgtggctctccctggctgggagaggtggattagagccaacacaacggacagaagactggaaacgctgcccggatccagactctggcccacaaagaagaaccgtagccgagcgagggtaccacaagctccgggctcaacagactcaaccggaagcaacggaaagggagcgcacaacagggcccaaagaaggcctacactgcgcagagcgccaaaggaccccccggggaacacccagc

SEQ ID NO: 69936 - DNA, 2072 bp, Homo Sapiens
  misc_feature (44)..(52): n is a, c, g, or t
  misc_feature (290)..(354): n is a, c, g, or t
gggtccggaattcccgggatatcgtcgacccacgcgtccgcttnnnnnnnnntaatgaccagttaagaattgcttttgatcttgtcaaaaaactgaatagaccccagtttcgggaaggtgtgtgagcagtgccatgactctgccccttacctaatcccacatctctctaatgataagacattggctcgcctctgaccagagccccagcaccagagagcggaagatgcagaattgtcaaatgacctgctgggggaggttgtaggagtttagcagatttgagtgtggctgcnnnnnnnnnnnnnnnnnnnnnnnnnnnnnnnnnnnnnnnnnnnnnnnnnnnnnnnnnnnnnnnnnccatctaagtctgtgtgatgaaggtgggataaggctcctctgttagtgctggaagctcctgtaattgccgcatggatcccactgtgccctcttgttctgtgcaagtctgtcctgtctgggcactaaccttggtcccatgcatgtttatgttctgggtggggctttgcctctccactgggaaactgacttttgctgggttgaacagagtcccttatgctttttgtcctctccctgcgcctgggagaggtgggagtaggagcccaaacacacaggtacagaaagatctggaagaaggcctggcagtgaatccaaggactctgggcccccaacaatagatggtagcgtaagtctggagcagcggtgtttcaccaccaaatgcctttccaggctgcccttccaacactcaggagagcatccagatccctgggcagaggctctacattcttggctttagaggtggtggcagcggcagcaggtcagagccacttctggcggtttccctcccctttttagtgcccatagtttttggatcctcccttgagttttaccagcacaagccattctttgcccctgttcacataactgagctcaagctcttgccaaacaccaacaagcaagatggttgcaacctggcaacattgaatccaccacccttgggctccctctggaagccccagcaccggggggcttttgggcacagggtcagtggtagccatcttagacactgacatttggctttgtcgtcaatttcatcaccctccttgaggttactgtgcagtttcaaccagcattttatcctagtgaggtcattatcaggagttgccatatcatctctccagtacctaacatttctcatccacttcaaaagctgttctgactgccagctggctgatctaagctcctgaggaatgtctcctctcaaaggaatttttccctccaaaggccccctgaagtcctagttggcattggcctggcacatgctttatgttaggcctcccgttgggatggctgagaatcatgaaagacagatcctccgctagcctctgtgggtcaagtttctggacaccaagtctctgggaactagtgtttgattttaaatggcatgtggcccttccttgtttcagtgacttagaaaagtaaaagccatttaaaaaagttagcaagattttttatcgacttcccaactgggcttccagccttgttgaatgaaatcatctatctctgattgggcgcaacgaactgcatttctttggacttctgaatccatgtttgtgctttctctggcccgtgaacacctcggcgattctgttagggatgggatgagtgggaggaagccctttgagaagggggagccggccctgtcatgcgcaggttttccactcatctgaggaagagccagggctctgaatttagcctaacactcatcttggctgtgggcttgggaagaaatggccattatttacagattgtatttggtacatattgtgtgatacttgaaaagataaaagggactgccagcccctaactgaaatctgaagctttttatcgcttatttttcctcgccctgtctcctcccttccacctttctccttgcattgtgatgatctagtaggcacgtctgtcaacaggacacatgcctcctctgactataacctcttaatagttgtgtataatgaaaactgtaaacttttttaaataaacgtgtatataccttgaaa

SEQ ID NO: 69937 - DNA, 606 bp, Homo Sapiens
  misc_feature (414)..(455): n is a, c, g, or t
tgggggaggggcgagagtatttttttcttcgtgtaactgtaaatccagaatctatcctgcatcgcagcccaccgtgtatagagatataaatagagggaaagatataagaactaaatttgctaatgacatagttttaacctaaatgctatttatctctgagccgtccccgtcctccgtgcagagcaagttgaggtcattccttcttttcttctccgatcttttttcttggcttctgaccaaaaaccaagctctaccccatccccatcccagacctgcaggagacgagcgagcgggaaggcgccgggcccgggactgtccgttctcggggccagagctgctgggggaccgagtttgtacattttccattttggaattttgagttccaattgttgtaaaacttaatttctccccagnnnnnnnnnnnnnnnnnnnnnnnnnnnnnnnnnnnnnnnnnnaaaacaaaagccccagccctgccgaggcctgggcggcgtcctcagtcgggtggtcccggggcctttgcggtcccgcccggctgagacgctcgccccgacgcatggacccgagaggcgacgacacgagtgaataaagtgcacatggaccctg

SEQ ID NO: 69938 - DNA, 799 bp, Homo Sapiens
tttagggagagtaaagttattttattaaatcatgcacgtcacgtgtgttagtgcaaatagtttaatctgtactccagaaattctattgtactttatatctttacaaaatagatttaaaacaattatttactttaaaaaatgtaattctgaagttaagcatttcagaacaatatttgcaataacctatatacaagaggtactgggtaccactggcatattagcattctgtggtggagtggcttcctgcaacagaaaatgatgaaatgaactatatgacagtattttctacaagtcatttgtgactaattcctccataaatctagtgatcttcccaaaagcaatctcaaatagcttaaaatataacctttaaagtataaacagtgactgccaaacatcacaaggcaaattataccctaaactcctatttcaatatttggctagacctgtggattgccacagaacattcaagccaattcactgacattccctcccggtcttcactgactgaaaaatttaactatgtgatactttaggatattctatgacctaaataaactttattgacataactatgatgccgcacaaaaccatggctaaactttcacttgtgttttaaatttataatatcaagcagtgtttttaggtgcttcattgtgcatagaacactattaatcttgggaatagtgcttttcattaacagaaagtcccaattaacaacaataaaaagaaaataccatttgcataccaaccaggaaatttgttggtaggtacacgctcccctgaacatgattagctctga

SEQ ID NO: 69939 - DNA, 2645 bp, Homo Sapiens
aaagcaaggctggtacggtccggaatcccgggatatcgtcgaccacgcgtgccgctcgcgatctagaactagtcggacgcgtgggtgccgtccggctattagcctactgtggctagtcacccccggggtcccggccttctcgggctggggccgccgccaccgcggcaggacggggaggcgggccatggcgtcctgcgtggggagccggaccctaagcaaggatgatgtgaactacaaaatgcatttccggatgatcaacgagcagcaagtggaggacatcaccattgacttcttctaccggccgcataccatcaccctgctcagcttcaccatcgtcagcctcatgtacttcgcctttaccagggatgactctgttccagaagacaacatctggagaggcatcctctctgttattttcttctttcttatcatcagtgtgttagctttccccaatggtccgttcactcgacctcatccagccttatggcgaatggtttttggactcagtgtgctctacttcctgttcctggtattcctactcttcctgaatttcgagcaggttaaatctctaatgtattggctagatccaaatcttcgatacgccacaagggaagcagatgtcatggagtatgctgtgaactgccatgtgatcacctgggagaggattatcagccactttgatatttttgcatttggacatttctggggctgggccatgaaggccttgctgatccgtagttacggtctctgctggacaatcagtattacctgggagctgactgagctcttcttcatgcatctcctccccaattttgccgagtgctggtgggatcaagtcattctggacatcctgttgtgcaatggcggtggcatttggctgggcatggtcgtttgccggtttttagagatgaggacttaccactgggcaagcttcaaggacattcataccaccaccgggaagatcaagagagctgttctgcagttcactcctgctagctggacctatgttcgatggtttgaccccaaatcttcttttcagagagtagctggagtgtaccttttcatgatcatctggcagctgactgagttgaataccttcttcttgaagcatatctttgtgttccaagccagtcatccattaagttggggtagaattctctttattggtggcatcacagctcccacagtgagacagtactacgcttacctcaccgacacacagtgcaagcgcgtaggaacacaatgctgggtgtttggggtcattggtttcctggaggccattgtttgcataaaatttggacaagatctcttctctaagacccaaatactctatgttgtgctttggcttctttgcgtggctttcaccactttcctctgtctgtacggcatgatttggtatgcagaacactatggtcaccgagaaaagacctactcggagtgtgaagatggcacctacagtccagagatctcctggcatcacaggaaagggacaaaaggttctgaagacagcccacccaagcatgcaggcaacaacgaaagccattcttccaggagaaggaatcggcattccaagtcaaaagtcaccaatggcgttggaaagaaatgaaaaaccctggttaatcaaagatgttccagagtgcctagaactgagagggaaatggaactcatttggaactccccgtgaggaggtcgaggcgcacagggcaagcaggaagaggcgagggcacttgggggtcattatttgagatcgtaagtcttgtttcccacagacctggccgcgtcaggcagatcatcgcctggggggcctttgccaacgtggggtctcttctaacttcagcacttgacatgcggtcaccggtggcagcgcggtgtgttgaagggaaacggtagctattcattcacagttgccaagagcagctccgcgcctgctggatcgtggatgcagcgtaaacatcttccttcagacgaggcattaaccccatggttaatggactggtcaccagtttttattttatttttatgaatctacctttccattgattgatttaagttcaggccacttttctgtcttttatttggttactgttgttatttgtttttaagttaggatgctttttaacagcctttagaagccgctgctgaaattgatactgggggaagggttccccttccttctagagcagaaaagggagagaggtgttgtattcctgtttggtaacctcagtctcctgtaagacctcctaccacatggcgagtatacaccaatcaggagagggtagctgcctgcataggagcctcgcttccgattattcccttcccaatattattcatccagacttagccacagtgcacaaaagcaaacctgctagagaggcagtgaacaccacagcttctccccagctaggtgccttttacatcgggtttgttctccttccatggtgtgttgctgacattgtcactgagtcccatgtgaggtgctggtgagtattacctttcatctgtgccatgctctagaaccttgaccttgatagttcaccacctctgatggatccctgttttaaataaaaacgattcactttaaagcctaaaaacgaataggaaaaacacgaaacaaagaaccaccgcgaaagcagaaagacaaacag

SEQ ID NO: 69940 - DNA, 674 bp, Homo Sapiens
taaactgcagggttactctcaaagaccaaaactattggccacttttgtatgttgccagcatattttgaacttgtacctttttttatactagcaacactacaaaggagaagttactcatttcaaaatggatgaattgttattatgtgtgaagagactctgagtttatgatctgtgccataaaatttcagtgtaataagacttcttcaatacatcttccaataaggggtgcttctttgtgacagtatttttatttctgacattcattttatttgggtacatagtgtggttgttgataccttgcaatagtattgcttctgaaagtaataaaaaattttaggagaatttgagaagtttacagaattacttattcattgttttcttagtaagtcagtttaatgtttatttttctcattatttcatcactgcaataaagaataagggtgtttgagctcacctccatgcaaagacttcagttttaaaacattatttgcctaaaattagcattgtgatgctttctgaaagaaatattttataaatcctgtttaacagcagaatttctgaatgtgtagagactactacaaaattggaaaaagattggcaattctttgtaaagaatttgtgaattgtgtataaatttattctaacatttaataaaaatgtattttaacaaacat

SEQ ID NO: 69941 - DNA, 2751 bp, Homo Sapiens
  misc_feature (175)..(184): n is a, c, g, or t
  misc_feature (762)..(792): n is a, c, g, or t
attactcaccccagtagcgcagcagaggaaacttataacctcgggaggcaggtccttcccctcagtgcggtcacatacttccagaagagcggaccagggctgctgccagcacctgccactcagagcgcctctgtcgctgggacccttcagaactctctttgctcacaagttaccnnnnnnnnnngagccaacatgttggtattgctggctggtatctttgtggtccacatcgctactgttattatgctatttgttagcaccattgccaatgtctggttggtttccaatacggtagatgcatcagtaggtctttggaaaaactgtaccaacattagctgcagtgacagcctgtcatatgccagtgaagatgccctcaagacagtgcaggccttcatgattctctctatcatcttctgtgtcattgccctcctggtcttcgtgttccagctcttcaccatggagaagggaaaccggttcttcctctcaggggccaccacactggtgtgctggctgtgcattcttgtgggggtgtccatctacactagtcattatgcgaatcgtgatggaacgcagtatcaccacggctattcctacatcctgggctggatctgcttctgcttcagcttcatcatcggcgttctctatctggtcctgagaaagaaataaggccggacgagttcatggggatctggggggtggggaggaggaagccgttgaatctgggagggaagtggaggttgctgtacaggaaaaaccgagatnnnnnnnnnnnnnnnnnnnnnnnnnnnnnnnaggtcaaatcccaaaccattactgaggggattctctactgccaagcccctgccctggggagaaagtagttggctagtactttgatgctcccttgatggggtccagagagcctccctgcagccaccagacttggcctccagctgttcttagtgacacacactgtctggggccccatcagctgccacaacaccagccccacttctgggtcatgcactgaggtccacagacctactgcactgagttaaaatagcggtacaagttctggcaagagcagatactgtctttgtgctgaatacgctaagcctggaagccatcctgcccttctgacccaaagcaaaacatcacattccagtctgaagtgcctactggggggctttggcctgtgagccattgtccctctttggaacagatatttagctctgtggaattcagtgacaaaatgggaggaggaaagagagtttgtaaggtcatgctggtgggttagctaaaccaagaaggagaccttttcacaatggaaaacctgggggatggtcagagcccagtcgagacctcacacacggctgtccctcatgggagacctcatgccatggtctttgctaggcctcttgctgaaagccaaggcagctcttctggagtttctctaaagtcactagtgaacaattcggtggtaaaagtaccacacaaactatgggatccaaggggcagtcttgcaacagtgccatgttagggttatgtttttaggattcccctcaatgcagtcagtgtttcttttaagtatacaacaggagagagatggacatggctcattgtagcacaatcctattactcttcctctaacatttttgaggaagttttgtctaattatcaatattgaggatcagggctcctaggctcagtggtagctctggcttagacaccacctggagtgatcacctcttggggaccctgcctatcccacttcacaggtgaggcatggcaattctggaagctgattaaaacacacataaaccaaaaccaaacaacaggcccttgggtgaaaggtgctatataattgtgaagtattaagcctaccgtatttcagccatgataagaacagagtgcctgcattcccaggaaaatacgaaaatcccatgagataaataaaaatataggtgatgggcagatcttttctttaaaataaaaaagcaaaaactcttgtggtacctagtcagatggtagacgagctgtctgctgccgcaggagcacctctatacaggacttagaagtagtatgttattcctggttaagcaggcattgctttgccctggagcagctattttaagccatctcagattctgtctaaaggggttttttgggaagacgttttctttatcgccctgagaagatctaccccagggagaatctgagacatcttgcctacttttctttattagctttctcctcatccatttcttttatacctttcctttttggggagttgttatgccatgatttttggtatttatgtaaaaggattattactaattctatttctctatgtttattctagttaaggaaatgttgagggcaagccaccaaattacctaggctgaggttagagagattggccagcaaaaactgtgggaagatgaactttgtcattatgatttcattatcacatgattatagaaggctgtcttagtgcaaaaaacatacttacatttcagacatatccaaagggaatactcacattttgttaagaagttgaactatgactggagtaaaccatgtattcccttatcttttactttttttctgtgacatttatgtctcatgtaatttgcattactctggtggattgttctagtactgtattgggcttcttcgttaatagattatttcatatactataattgtaaatattttgatacaaatgtttataactctagggatataaaaacagattctgattcccttcaa

SEQ ID NO: 69942 - DNA, 877 bp, Homo Sapiens
cttatcagtcgacggtaccggacatatgcccgggaattcggccattacggccggggagtgcggtcacatacttccagaagagcggaccacgggctgctgccagcacctgccactcagagcgcctctgtcgctgggacccttcaggtaggacagctcccaacgctgtggggactctcagcaaaacttctccttcctttccacggctctgcttcttctgacctcatcttagttttgctttttcttttcttccttcgctatttttctatgatcctctaagaaccaagtccttgaaacttttggctcaaagtggatacagagacaactttttctagaaagttcagaaaagtgtattttgaggacggagtctggggaaatcactgggataggatcctgtttcatggcaggaaacaccacacaccttggcaaatgacatcgggcaactggccagatgtctttcacctcctccgtttgacttcccgacttgcttcagcgaccttgaaacctgttacctccgctcgcctggatagatcaggctcgcggacttcacattggcctggtggctggactcgactaacctgcgttctacacgtttcatctctgaccatttgctttatccctggcctggttttgcttccgctactaccacttctggtttacaacttaagtactctcttatactccttcaccaggatgcgcagcccaccgaagagcactcgggcaccggtgtaacaccgacccactggctgggcctgggcacgggctggcccctgtccctggacactccctagccacatctcaggcacgcgctagccgccgggccggaccacccctgacgcgccacggcgtccaccacacacgcctgggcccaacctggtca

SEQ ID NO: 69943 - DNA, 743 bp, Homo Sapiens
  misc_feature (383)..(411): n is a, c, g, or t
cctggaaatcacatgtgttgttgatgtgagtatctgatgaaaaaacaatgtcagaataaccgacatgaaaattttttaggataacttggtgcctacctgaaaaatgtattgtgttttagactcttgatttcaaaaggttccacagaactagtctgcgcttaccttacccatgtttatatatagctgtcctacagggagcttttatttagaaaatgtctgcataatgttagattcttctcctgtctacattatgcactacataattggacttcattatgcttttgaaatgcttatctgcctgtcacataagttaaactatttaatttgttttgaatgttttggattgctacacaatacaatattctaaatttaggcatgagggnnnnnnnnnnnnnnnnnnnnnnnnnnnnngtcatcgcactatggaacaaatgaaattctcttaatttataagaagatagtagcagttaaattttgaaaatggttgtaatgagccacgaaattcaatctttataatataggtactgctctttcagacaaacagtccattttcaatgacttattattttgttgaaattactttaactgctaatcactgtggttgccaaatatttacttcagaagcaaagattttcaaacaagcatacacgatgcaaaataccagtctggcttctagtctatttactgtttttgtttcactcagattagctcagttttctcatcaaagcagaatgctatcttgc

SEQ ID NO: 69944 - DNA, 1203 bp, Homo Sapiens
  misc_feature (1057)..(1131): n is a, c, g, or t
ccagtaaaggttaatgtggaccatgtgcaaagcaagatttcaattgagcagaagcttttagtttagcatgtttgtggtttggctggcccaaaggacactagagagtttacccatgcacttttagcttgaaacattaatttatcatgcatgtctgcatgtgagacaagcagatgcaaagcatgttctgcccttctgtctcggagggagagccatgacagccctgcagccccagcactgcccgtgttagctgatatataccaagtgatagaaactattctgtctagaaggcttgatttgactatagttgttaaagttgcctggttctttgtgttaccagagggaatactgagtgtctgaggttacattggtaggaaactccctgcataacattcctgatgtgaaagtcacagagattacccacttgggagaagagtcttatgaataaaatttgttgccagttatttagttttaaaattttctatggcttctgtgagtcatggaggttaatggaatacatttggtttcagggagatacatctggggactataagaaagctcttctgctgctctgtggagaagatgactaacgtgtcacggggaagagctccctgctgtgtgcctgcaccaccccactgccttccttcagcacctttagctgcatttgtatgccagtgcttaacacattgccttattcatactagcatgctcatgaccaacacatacacgtcatagaagaaaatagtggtgcttctttctgatctctagtggagatctctttgactgctgtagtactaaagtgtacttaatgttactaagtttaatgcctggccattttccatttatatatattttttaagaggctagagtgcttttagccttttttaaaaactccatttatattacatttgtaaccatgatactttaatcagaagcttagccttgaaattgtgaactcttggaaatgttattagtgaagttcgcaactaaactaaacctgtaaaattatgatgattgtattcaaaagattaatgaaaaataaacatttctgtccccctgnnnnnnnnnnnnnnnnnnnnnnnnnnnnnnnnnnnnnnnnnnnnnnnnnnnnnnnnnnnnnnnnnnnnnnnnnnncatggtcggcccgcctcgggcccttcaaaaaactttttctaaaccatttcctttggggcgcgcggggcccca

SEQ ID NO: 69945 - DNA, 1014 bp, Homo Sapiens
tagctagtgcgaggctggtgtcgaatcggcacgaggctggtgggaactgggaacactggagactgatttctaactgacgctaccgtcgcggcgccggcaagttcctttactgtgttttcttggttcagccttgaagtgagtcgtggacgatcctctctcagcgtccagcctagacggcggtgttgctccggcagcgttcctgggagccgagggccagagactaagttaaaaggcccctccccatcttcagaacagtcctgggttctgagcctgccatccaaggaactcaggaggaggagttgacagtctcttcgttcctaaccagtgtgggacgacttcagcatgtctcaggccaccaagaggaagcatgtggtgaaggaggtgctaggggagcacatagtgccctccgaccagcagcagattgtcagggtactcaggaccccagggaacaatctgcatgaggtggagacagcccaagggcagcgcttcctggtgagcatgccctccaaataccgcaagaacatctggatcaagagaggggactttctcattgttgaccccattgaagagggagaaaaggtgaaggctgaaatctcgtttgtgctctgcaaggaccacgtgcgctctctgcagaaggaggggttttggcctgaggccttctctgaagtggctgagaaacacaacaacaggaacagacaaactcaaccagaactcccagctgagccacagttatcaggagaggagtccagctcagaagatgattctgacctgtttgttaacacaaaccgcagacagtatcatgagagtgaggaggagagtgaagaggaggaggcagcctgagactccaggacccaattctccacttgctcagggactggcccctggctcttctgggcttggacattcccagggtgctctgcacatcttcacccctgcatgaggacaaagcagggctcctctctgaactgatcttttgattcagagaattaaacccctggtgggttggtgacttgt

SEQ ID NO: 69946 - DNA, 1283 bp, Homo Sapiens
  misc_feature (25)..(25): n is a, c, g, or t
  misc_feature (46)..(46): n is a, c, g, or t
  misc_feature (87)..(87): n is a, c, g, or t
  misc_feature (100)..(100): n is a, c, g, or t
  misc_feature (108)..(109): n is a, c, g, or t
  misc_feature (125)..(125): n is a, c, g, or t
  misc_feature (137)..(137): n is a, c, g, or t
  misc_feature (149)..(149): n is a, c, g, or t
  misc_feature (156)..(158): n is a, c, g, or t
  misc_feature (169)..(169): n is a, c, g, or t
  misc_feature (172)..(172): n is a, c, g, or t
  misc_feature (176)..(176): n is a, c, g, or t
  misc_feature (182)..(182): n is a, c, g, or t
  misc_feature (209)..(209): n is a, c, g, or t
  misc_feature (211)..(211): n is a, c, g, or t
ctgaagcggcagtggcgcacgcaantatttgatagctccatcatangcaccccagctttacatttttgctcccgctcgtatgtgtgntggaatgtgagcngatacatnntcacaccaggaacagntatgacatgatnacgaatttatanggactcnnntataggggatntgncccntcgagnccaagaaatcgcacgggagcccatctntnggacacgaagtgtgtctcatttgagaaaggtgttgacaaagtacatgactatatcaggatttcaaattgaggaaaccattgaccgcgagacttctggcaatttagagcaactactccttgctgttgtgaaatctattcgaagtatacctgcctaccttgcagagaccctctattatgctatgaagggagctgggacagatgatcataccctcatcagagtcatggtttccaggagtgagattgatctgtttaacatcaggaaggagtttaggaagaattttgccacctctctttattccatgattaagggagatacatctggggactataagaaagctcttctgctgctctgtggagaagatgactaacgtgtcacggggaagagctccctgctgtgtgcctgcaccaccccactgccttccttcagcacctttagctgcatttgtatgccagtgcttaacacattgccttattcatactagcatgctcatgaccaacacatacacgtcatagaagaaaatagtggtgcttctttctgatctctagtggagatctctttgactgctgtagtactaaagtgtacttaatgttactaagtttaatgcctggccattttccatttatatatattttttaagaggctagagtgcttttagccttttttaaaaactccatttatattacatttgtaaccatgatactttaatcagaagcttagccttgaaattgtgaactcttggaaatgttattagtgaagttcgcaactaaactaaacctgtaaaattatgatgattgtattcaaaagattaatgaaaaataaacatttctgtccccctgaattatgtgtacatgtgtgtttagatttattattaaattaatttaacaatgttctctctttttaagctaataattgacagtggtgttagttgagaactgaatttacagttgggctttttgggcagtaagaaatgcaaaccatagactgaatttccttcatagaacatgatttttcctaaatataggaaagaacgaaggggtcccctgggttattttgccccatgtttattttagg

SEQ ID NO: 69947 - DNA, 950 bp, Homo Sapiens
  misc_feature (48)..(60): n is a, c, g, or t
  misc_feature (939)..(939): n is a, c, g, or t
cagtcgacggtaccggacatatgcccgggaattcggccattacggccnnnnnnnnnnnnnccgctggcgtttccgttgcttggatcagtctaggtgcagctgccggatccttcagcgtctgcatctcggcgtcgccccgcgtaccgtcgcccggctctccgccgctctcccggggtttcggggcacttgggtcccacagtctggtcctgcttcaccttcccctgacctgagtagtcgccatggcacaggttctcagaggcactgtgactgacttccctggatttgatgagcgggctgatgcagaaactcttcggaaggctatgaaaggcttgggcacagatgaggagagcatcctgactctgttgacatcccgaagtaatgctcagcgccaggaaatctctgcagcttttaagactctgtttggcagggatcttctggatgacctgaaatcagaactaactggaaaatttgaaaaattaattgtggctctgatgaaaccctctcggctttatgatgcttatgaactgaaacatgccttgaagggagctggaacaaatgaaaaagtactgacagaaattattgcttcaaggacacctgaagaactgagagccatcaaacaagtttatgaagaagaatatggctcaagcctggaagatgacgtggtgggggacacttcagggtactaccagcggatgttggtggttctccttcaggctaacagagaccctgatgctggaattgatgaagctcaagttgaacaagatgctcagggctttatttcaggctggaagaacttaaatggggggacagatgaagaacaaggtttatcacccatctttgggacacgaagtgtgtctcattttgaaaaaagtgttttgacaagtaccttgactatttcaggaatttcaaattgaggaaaccctttgaccgcgagacttnctggcaattta

SEQ ID NO: 69948 - DNA, 625 bp, Homo Sapiens
  misc_feature (304)..(304): n is a, c, g, or t
gggctaggtacgaggactgggtgtgtgaattcggcacgaggcctcgtgccgaggaagtcctctccctggaggcctatctccctcagaactgcgcgagaagcgagaccttagaaggcagcgcttcccgcgaaggaccggaaaggagcgcctactaaggacgccgtcgaggtccggggcgcctcaactctatagctctaactggctagaagtgcccaacgtggaatgtttcttttttaaaggcggctcttgaagcgacccggaagcggaagtggaagaaagttctagtggcttgagagagaccctntggttagctttccacgccaagtggccgttccaggcaggcagtgtcgtcttggttcagccaaggtcacagagggagtgatagcttccgcgcagccctggctacggactctgggcatctttccactgccccgcttgcgccacctgttaggcaggatcgtttttcctctggggcaagatcaaaatccaggtcctgcaggaagaaactcctcttaaaaataattaagcctgatcaagatgacaactcccaaaagcaccgagacttcgtggcagagcccaatgggggagaagccagtgggggagcctgggctggggatgggtgaag

SEQ ID NO: 69949 - DNA, 626 bp, Homo Sapiens
gggagtggcttgaggtatccgcaggagcggccgggtggcgggaggaaccgttacgggaactgaagttgcgggcctatgttgtccttggccagtttctggtgctaaagaaagatgaagacctcttccgggaatggctgaaagacacttgtggcgccaacgccaagcagtcccgggactgcttcggatgccttcgagagtggtgcgacgccttcttgtgatgctctctgggaagctctcaatccccagccctcatccagagtttgcagccgagtagggactcctcccctgtcctctacgaaggaaaagattgctattgtcgtactcacctccgacgtactccggggtcttttgggagttttctcccctaaccatttcaacttttttttggattctcgctcttgcatgcctcccccgtcctttttcccttgccagttccctggtgacagttaccagctttcctgaatggattcccggccccatccctcacccccaccctcactttcaatccgtttgataccatttggctccttttttggcagaacagtcactgtccttgtaaagttttttagatcaataaagtcagtggcttcctctgtcggacagcgagctacaagccaaacaccttg

SEQ ID NO: 69950 - DNA, 884 bp, Homo Sapiens
gggaggtgcagctgccggatccttcagcgtctgcatctcggcgtcgccccgcgtaccgtcgcccggctctccgccgctctcccggggtttcggggcacttgggtcccacagtctggtcctgcttcaccttcccctgacctgagtagtcgccatggcacaggttctcagaggcactgtgactgacttccctggatttgatgagcgggctgatgcagaaactcttcggaaggctatgaaaggcttgggcacagatgaggagagcatcctgactctgttgacatcccgaagtaatgctcagcgccaggaaatctctgcagcttttaagactctgtttggcagggatcttctggatgacctgaaatcagaactaactggaaaatttgaaaaattaattgtggctctgatgaaaccctctcggctttatgatgcttatgaactgaaacatgccttgaagggagctggaacaaatgaaaaagtactgacagaaattattgcttcaaggacacctgaagaactgagagccatcaaacaagtttatgaagaagaatatggctcaagcctggaagatgacgtggtgggggacacttcagggtactaccagcggatgttggtggttctcccttcagggctaacagagaccctgatgctggaattgatgaagctccaagttgaaaaagatgctcaggctttatttcaggctggagaacctaaatggggggacagatgaagaaaagtttattcaccatcttttggaacaccaagtgtgtctcatttgagaaaggtgttttggacaagtacatgactatattcaggatttccaaatgaaggaaaccttggaccgccgagacttctgggcatttagagcaactactccctgcctgttg

SEQ ID NO: 69951 - DNA, 1892 bp, Homo Sapiens
  misc_feature (371)..(371): n is a, c, g, or t
  misc_feature (1744)..(1744): n is a, c, g, or t
  misc_feature (1771)..(1771): n is a, c, g, or t
  misc_feature (1776)..(1776): n is a, c, g, or t
  misc_feature (1784)..(1784): n is a, c, g, or t
  misc_feature (1844)..(1844): n is a, c, g, or t
cccaagttcccccagaccccacccaggggggtttaatttcttctggaatccaaaaagatccagttccagagagggaggccctggctttggtcctacatgcaggggtgaaggatgtgccagagccgccctggaaagttcccaagcccagaaagaagccagggggccagtcccctgagcaaagtggagaattggggtccgggagtctcaggctggcctcctcctttgcactgtcctcctcactttcaatgatactgtctgcgggttggtgttaacaaacaggtcagaatcatcttctgagctggactcctctcctgataactgtggctcagctgggagttctggttgagtttgtctgttcctgttgttgtgtntctcagccacttcagagaaggcctcaggccaaaacccctccttctgcagagagcgcacgtggtccttgcagagcacaaacgagatttcagccttcaccttttctccctcttcaatggggtcaacaatgagaaagtcccctctcatgatccagatgttcttgcggtatttggagggcatgctcaccaggaagcgctgcccttgggctgtctccacctcatgcagattgttccctggggtcctgagtaccctgacaatctgctgctggtcggagggcactatgtgctcccctagcacctccttcaccacatgcttcctcttggtggcctgagacatgctgaagtcgtcccacacggcggccgcgacggtagcgtcagttagaaatcaggtctccagtgttcccagttcccaccagtccaactgcgaggagtgcgacgtgagtctgagtctgatccctccgaaaaccgtacttccggcgctgtctcggaggcctcccgtcccctcccttgtccgtcttctaactcttccccacgccaggtccgtcaagcctaagtccttgagttccgggtccgggcagcagagaaaggaagtcctctccctggaggcctatctccctcagaacggcgcgagaagcgagaccttagaaggcagcgcttcccgcgaaggaccggaaaggagcgcctactaaggacgccgtcgaggtccggggcgcctcaactctatagctctaactggctagaagtgcccaacgtggaatgtttcttttttaaaggcggctcttgaagcgacccggaagcggaagtggaagaaagttctagtggcttgagattaagcctgatcaagatgacaacctcccaaaagcaccgagacttcgtggcagagcccatgggggagaagccagtggggagcctggctgggattggtgaagtcctgggcaagaagctggaggaaaggggttttgacaaggcctatgttgtccttggccagtttctggtgctaaagaaagatgaagacctcttccgggaatggctgaaagacacttgtggcgccaacgccaagcagtcccgggactgcttcggatgccttcgagagtggtgcgacgccttcttgtgatgctctctgggaagctctcaatccccagccctcatccagagtttgcagccgagtagggactcctcccctgtcctctacgaaggaaaagattgctattgtcgtactcacctccgacgtactccggggtcttttgggagttttctcccctaaccatttcaacttttttttggattctcgctcttgcatgcctcccccgtcctttttcccttgccagttcccctggtggacagttaccaacctttcctgaaatggattccccggnccccattccctcaccccccaccctcanttttnaatcccgnttggatacccattttgggctccttttttttgggcaaaaccaggtcacctggccccttggnaaaaggttttttttagaaatcaattaaaaagtcccaggtggccctttt

SEQ ID NO: 69952 - DNA, 1029 bp, Homo Sapiens
gtggggtgtgcaggcacacagcagggactcttccccgtgacacgttagtcatcttctccacagagcagcagaagagctttcttatagtccccagatgtatctcccttaatcatggaataaagagaggtggcaaaattcttcctaaactccttcctgatgttaaacagatcaatctcactcctggaaaccatgactctgatgagggtatgatcatctgtcccagctcccttcatagcataatagagggtctctgcaaggtaggcaggtatacttcgaatagatttcacaacagcaaggagtagttgctctaaattgccagaagtctcgcggtcaatggtttcctcaatttgaaatcctgatatagtcatgtacttgtcaaacacctttctcaaatgagacacacttcgtgttccaaagatggtgataaacttttcttcatctgtcccccatttaagttctccagcctgaaataaagcctgagcatcttgttcaacttgagcttcatcaattccagcatcagggtctctgttagcctgaaggagaaccaccaacatccgctggtagtaccctgaagtgtcccccaccacgtcatcttccaggcttgagccatattcttcttcataaacttgtttgatggctctcagttcttcaggtgtccttgaagcaataatttctgtcagtactttttcatttgttccagctcccttcaaggcatgtttcagttcataagcatcataaagccgagagggtttcatcagagccacaattaatttttcaaattttccagttagttctgatttcaggtcatccagaagatccctgccaacagagtcttaaaagctgcagagatttcctggcgctgagcattacttcgggatgtcaacagagtcaggatgctctcctcatctgtgcccaagcctttcatagccttccgaagagtttctgccgacgcgtggtcgacgatatcccgggaattccggaccgtaccagcctgcttttgtaacccactgttcatagtacagtgcactc

SEQ ID NO: 69953 - DNA, 808 bp, Homo Sapiens
gggggacccggaagcggaagtggaagaaagttctagtggcttgaggtatccgcaggagcggccgggtggcgggaggaaccgttacgggaactgaagttgcggattaagcctgatcaagatgacaacctcccaaaagcaccgagacttcgtggcagagcccatgggggagaagccagtggggagcctggctgggattggtgaagtcctgggcaagaagctggaggaaaggggttttgacaaggcctatgttgtccttggccagtttctggtgctaaagaaagatgaagacctcttccgggaatggctgaaagacacttgtggcgccaacgccaagcagtcccgggactgcttcggatgccttcgagagtggtgcgacgccttcttgtgatgctctctgggaagctctcaatccccagccctcatccagagtttgcagccgagtagggactcctcccctgtcctctacgaaggaaaagattgctattgtcgtactcacctccgacgtactccggggtcttttgggagttttctcccctaaccatttcaacttttttttggattctcgctcttgcatgcctcccccgtcctttttcccttgccagttccctggtgacagttaccagctttcctgaatggattcccggccccatccctcacccccaccctcactttcaatccgtttgataccatttggctccttttttggcagaacagtcactgtccttgtaaagttttttagatcaataaagtcagtggctttcattaagaaacacaactcacaaataacaccgcaacaacacaaaccaca

SEQ ID NO: 69954 - DNA, 807 bp, Homo Sapiens
  misc_feature (685)..(693): n is a, c, g, or t
  misc_feature (773)..(773): n is a, c, g, or t
gggagtggcttgaggtatccgcaggagcggccgggtggcgggaggaaccgttacgggaactgaagttgcggattaagcctgatcaagatgacaacctcccaaaagcaccgagacttcgtggcagagcccatgggggagaagccagtggggagcctggctgggattggtgaagtcctgggcaagaagctggaggaaaggggttttgacaaggcctatgttgtccttggccagtttctggtgctaaagaaagatgaagacctcttccgggaatggctgaaagacacttgtggcgccaacgccaagcagtcccgggactgcttcggatgccttcgagagtggtgcgacgccttcttgtgatgctctctgggaagctctcaatccccagccctcatccagagtttgcagccgagtagggactcctcccctgtcctctacgaaggaaaagattgctattgtcgtactcacctccgacgtactccggggtcttttgggagttttctcccctaaccatttcaacttttttttggattctcgctcttgcatgcctcccccgtcctttttctccttgccagttcccctggcgacagttaccagcctttccctgaatgggattcccgggccccaatcccctcaacccccacccctcacttttccaatcccgttttgattaccatttggccttccnnnnnnnnnggccagaaaaagaccccctggtcccttggtaaaggtttttcttttacatccattaaagattcagcggggctcttccccancttttacacgaacccataccgccaccgccacccg

SEQ ID NO: 69955 - DNA, 545 bp, Homo Sapiens
ggacagggctgggtgatgataacgtgaaatagtgcaggattgatcttaataaaagcatattattcctagagaaagagtgttattgaataaccatcaggtggaaccatttttccttttgaatgaaaatgctctatagttcagtaatgtgacatattacctctcataggctaacagagaccctgatgctggaattgatgaagctcaagttgaacaagatgctcaggctttatttcaggctggagaacttaaatgggggacagatgaagaaaagtttatcaccatctttggaacacgaagtgtgtctcatttgagaaaggtgtttgacaagtacatgactatatcaggatttcaaattgaggaaaccattgaccgcgagacttctggcaatttagagcaactactccttgctgttgtgaaatctattcgaagtatacctgcctaccttgcagagaccctctattatgctatgaagggagctgggacagatgatcatagcttcatcagagtcatggtttccaggagtgagattgatctgtttacatcag

SEQ ID NO: 69956 - DNA, 1008 bp, Homo Sapiens
  misc_feature (33)..(33): n is a, c, g, or t
  misc_feature (437)..(451): n is a, c, g, or t
  misc_feature (460)..(476): n is a, c, g, or t
cctcaccaccacagaaccatggtgagctcgatntgaggggcaactcacttccgattttcctagacctgctgtgcctgccacagctgttcaccaggcacctccagggagcctgcccctagctcgaggcctaactcgaggattctcagccccttccatttcttgtctttgggtatttacatgacttactctggcaacaggaaatcaaccatgaccatcctttagttccatcctttagtttagatgccacctcatccaggaagccttccccaccaattcggcactcaggcacttcactgctcactgcctgtcccactaaccacggtcacccatagcctcaacatgcaggcaagagggaatcccgagtgtcggcgagacagtcccttccaagaaacatgtgccccagatgcactgggagcttgcacccttcctccaagtcnnnnnnnnnnnnnnngagttattnnnnnnnnnnnnnnnnncacaaccaaaagaactgacgagaggaagacaaagcctcgggatcagccagagaccgagcggcacgggatgaggcacaggtcaggcctagctggatctgtggagcaaggtggtgggaagtcccgaggcctttgggcatgtggggtctgtggaaggagaggaggtcacttaaaaaaatacatatactgtacacatctatatgaagcgtcctgtgttgggggagtggggtgaggtcatgggagctcgtccactttctccttggaccagcctccccgcaggctcactggcttggccagcacagggacccctgaagctggctgtcttcttctgtggagcgagggaaggtaacagtttagttccaacccatggtgggcagaggtcggtggaggtcagaggcatggggatggccactgctcggctaggaaatccctgtgcctggtgctggtgctcgtcatacagtctgctctgctgtcttcttctttttcttctttttattctgagtcaccgtcccagaagaaaaagaagaaaaagaag

SEQ ID NO: 69957 - DNA, 594 bp, Homo Sapiens
  misc_feature (101)..(169): n is a, c, g, or t
  misc_feature (202)..(228): n is a, c, g, or t
agcggccgcctactactactactatacggctgcgagaagacgacagaaggggatggggacggttgaaggtggagatcaaagcaacccaaagagcaagaagnnnnnnnnnnnnnnnnnnnnnnnnnnnnnnnnnnnnnnnnnnnnnnnnnnnnnnnnnnnnnnnnnnnnnggcctcaaccaaagattctgagtcaccgtcccnnnnnnnnnnnnnnnnnnnnnnnnnnncagcagagcagactgtatgacgggcaccagcaccaggcacagggatttcctagccgagcagtggccatccccatgcctctgacctccaccgacctctgcccaccatgggttggaactaaactgttaccttccctcgctccacagaagaagacagccagcttcaggggtccctgtgctggccaagccagtgagcctgcggggaggctggtccaaggagaaagtggaccagctcccatgacctcaccccactcccccaacacaggacgcttcatatagatgtgtacagtatatgtatttttttaagtgacctcctctccttccacagaccccacatgcccaaaggcctcgggacttcccaccaccttg

SEQ ID NO: 69958 - DNA, 765 bp, Homo Sapiens
  misc_feature (513)..(580): n is a, c, g, or t
  misc_feature (612)..(638): n is a, c, g, or t
tcaagcacaccccaagaagttccgaagccaagaaggggctgggaccccaaggctcaaccctggcgctgaaagcacatcacccagtgcctcctgggccaacctggcccctgaatgaggcccaggtgcaggcctcagtggtgaaggtcctgactgagctgctggaacaggaaagaaagaaggtggtggcaccccaagggagagcagcaggaagggctgggagagccgcaagcggaagctatcgggagaccagccagctgccaggacccccaggagcaagaagaagaagaagctgggggccggggaaggtggggaggcctctgtttccccagaaaagacctccacgacttccaaggggaaagcaaagagagacaaagcaagtggtgatgtcaaggagaagaaagggaaggggtctcttggctcccaaggggccaaggacgagccagaagaggagcttcagaaggggatggggacggttgaaggtggagatcaaagcaacccaaagagcaagaaggnnnnnnnnnnnnnnnnnnnnnnnnnnnnnnnnnnnnnnnnnnnnnnnnnnnnnnnnnnnnnnnnnnnngcctcaaccaaagattctgagtcaccgtcccnnnnnnnnnnnnnnnnnnnnnnnnnnncagcagagcagactgtatgacgagcaccagcaccaggcacagggatttcctagccgagcagtggccatccccatgcctctgacctccaccgacctctgcccaccatgggttggaactaaactgttac

SEQ ID NO: 69959 - DNA, 731 bp, Homo Sapiens
agaggctctaccctcacaacctaattacctcccagtgaccccacctccaataccatcccacaggtgggttagagttcaacatatgaatttggagtgtgagagaaacacaagcattcagtccatagcagagcccaattgtgtctttaatagaattcatactaagctgcatttccaaatacattttcctgtgcttttaactccattaaaataaagattcatgaacacaaaacagtaaaatcagtaaaccaaactccactcctgctggctaaataatattcctccgtaagaattggtggttgttgggacaatttcttggatttattgcctttcccgcttgcttctggccagcaggatccccacaaggcttgcggcagccagcaggcctgctgccacacctactgtcgtgactgcaccagtgacctgcagcagaagagaagggagagcacactcagcatcagggcgggaccacgatacatacaccaggaaactacagctcaggaaagactcatctggcccagtcctcttcatttgaatcacagagggaacaaatattggctgggagaggggatgccaagaggtcaggccacccaggaaagaggagtggagatgtctggtgggcacagaatgaatggaagaatgaagccataggcgtgatatacacagagtcaaaggaggaaaaccagatgcacctgtgggtattaaaagcataataggtcgggctcagtggtaaa

SEQ ID NO: 69960 - DNA, 701 bp, Homo Sapiens
aacaagtcgtaacacaaccaaaatgtatatattaatgttttgtcaggaaagggtcaaaatggaaaattgcaacaaagacaaactacaatagaacaagtgcaaacagaagctgacaaatatatgcccctcgttgggagttcagcccatggaatgttatgtaggacaaaaggaatggaagagatatttcagtaacattttgttctctgtcaaaaaccttctgaaatataaatctgctgtgtattggagaatggatacagcaattgattcaagttgaatagctttcatttaactagaatatcccacagaaagcagttcttgttctgacaaccatatttttgctttctttcacttaaagaaaattgaattcatgtttacatatcttatagggttgttttatggacaaagacacgggtcaaaccccatcacagtggctagtgttacaacaaatagaaacatttctaaatgaaataacatttctaagccagggccagtgcctgcagtaataatactaggttggtattatgaagccatttgcaactataaataattcagtcatagatgtgctttttttaaaatcctggttttttaaaattctagtcttttgccaatacacacacccatacacatacttcacctatttgcataatagaggaggaatatgaatatgtatataataaagtcactttattttggactttctg

SEQ ID NO: 69961 - DNA, 585 bp, Homo Sapiens
  misc_feature (60)..(84): n is a, c, g, or t
  misc_feature (122)..(122): n is a, c, g, or t
  misc_feature (310)..(358): n is a, c, g, or t
gcacgaggacactgcctactttgcaagccagtgacctgccttttgaggggacattggacnnnnnnnnnnnnnnnnnnnnnnnnnttgggtttgagctacagtcatgaacttttggcgtctantgattcctccaactctccaccccacaaaataacggggaccaatatttttaactttgcctatttgtttttgggtgagtttcccccctccttattctgtcctgagaccacgggcaaagctcttcattttgagagagaagaaaaactgtttggaaccacaccaatgatatttttctttgtaatacttgaannnnnnnnnnnnnnnnnnnnnnnnnnnnnnnnnnnnnnnnnnnnnnnnntatgtataaggagcctaaacaatagaaagctgtagagattgggtttcattgttaattggtttgggagcctcctatgtgtgacttatgacttctctgtgttctgtgtatttgtctgaattaatgacctgggatataaagctatgctagctttcaaacaggagatgcctttcagaaatttgtatattttgcagttgccagaccaataaaatacctggttgaaatccaaa

SEQ ID NO: 69962 - DNA, 961 bp, Homo Sapiens
  misc_feature (266)..(284): n is a, c, g, or t
taaatagcacatctgctatcaaaataataaaaaaataaatttcaggtattacaaagaaaaatatcattggtgtggttccaaacagtttttcttctctctcaaaatgaagagctttgcccgtggtctcaggacagaataaggaggggggaaactcacccaaaaacaaataggcaaagttaaaaatattggtccccgttattttgtggggtggagagttggaggaatcagtagacgccaaaagttcatgactgtagctcaaacccaannnnnnnnnnnnnnnnnnntccaatgtcccctcaaaaggcaggtcactggcttgcaaagtaggcagtgttctcctttctatagtatctccctcccctgtccagattcatggttacctctctccctatctaggcccttcgcaaactaaaagtcccgtgttagaccaaggcttctgtatttaggtattgattttaggtagtcagaggggagaggggaccacagctatcaagcccctatctgtatcaaacttcagagttgatgttcaaagaatgaggcctgcgagggggacacgagaaactattctcaagagcaaagcaacaggccttccatgtcaaatcgaaaaatacaaccaagttaagcacaatcatgcacccgtgcacgtccaccccctacccacatattctgatgagactcaacatccagggagagagagaaaactgcgcgagcctggagctgcacgggaatgcggacagagacatcctctccagcagacgccagccaaagtgggtgcaacgggcggggagggcttgaatggttcagcatgaaaatcccccacttgattgtaccatacctgaagcacagcctcagttcctactcaattccaaccaggaaaaaaacatgaattctttaaaagctcttcccaaaaaacaaacagcaacggctcttctctccacgcccagtttcaggtgtctaaatc

SEQ ID NO: 69963 - DNA, 795 bp, Homo Sapiens
  misc_feature (65)..(83): n is a, c, g, or t
  misc_feature (583)..(590): n is a, c, g, or t
  misc_feature (593)..(594): n is a, c, g, or t
  misc_feature (601)..(601): n is a, c, g, or t
  misc_feature (659)..(659): n is a, c, g, or t
ggatagaaaggagaacactgcctactttgcaagccagtgacctgccttttgaggggacattggannnnnnnnnnnnnnnnnnnttgggtttgagctacagtcatgaacttttggcgtctactgattcctccaactctccaccccacaaaataacggggaccaatattgttaactttgcctatttgttcttgggtgagtttcccccctccttattctgtcctgagaccacgggcaaagctcttcattttgagagagaagaaaaactgtttggaaccacaccaatgatatttttctttgtaatacttgaaatttatttttttattattttgatagcagatgtgctatttatttatttaatatgtataaggagcctaaacaatagaaagctgtagagattgggtttcattgttaattggtttgggagcctcctatgtgtgacttatgacttctctgtgttctgtgtatttgtctgaattaatgacctgggatataaagctatgctagctttcaaacaggagatgcctttcagaaatttgtatattttgcagttgccagaccaataaaatacctggttgaaataccnnnnnnnnganngggaagnaaacgaaccgcaaaacaacccggcggggggaaaaaaacacacgggacgagaaaaaaanctttggtggccggccccggccccccaaaagctttctaaaaccttcgtttggggccggggcccccgggggaaagggaaacgggggcttagctgtttcccaggaaaacctgggcctgaccagggcttggattcccccc

SEQ ID NO: 69964 - DNA, 1046 bp, Homo Sapiens
  misc_feature (288)..(288): n is a, c, g, or t
  misc_feature (299)..(316): n is a, c, g, or t
  misc_feature (542)..(589): n is a, c, g, or t
  misc_feature (815)..(866): n is a, c, g, or t
  misc_feature (868)..(869): n is a, c, g, or t
  misc_feature (874)..(876): n is a, c, g, or t
  misc_feature (880)..(882): n is a, c, g, or t
  misc_feature (884)..(884): n is a, c, g, or t
  misc_feature (887)..(889): n is a, c, g, or t
  misc_feature (892)..(892): n is a, c, g, or t
  misc_feature (895)..(901): n is a, c, g, or t
gaaagcctgtgctgtgctcctgagaataatttctcgtgtcaccctcgcagccccaatttttgaacatcaactctgaagttgatcccgatagggcctgatacatgtgtcccctctccctctgactacctaaaatcaatacctaaatacagaagccttgtctaacacggactttaagtttgcgaagggcttagatagggagagaggtaacatgaatctggacagggagggagatactatagaaaggagaacactgcgtactttgcaagccagtgacctgccttgtgaggngacattggacnnnnnnnnnnnnnnnnnnttgggtttgagctacagtcatgaacttttggcgtctactgattcctccaactctccaccccacaaaataacggggaccaatatttttaactttgcctatttgtttttgggtgagtttcccccctccttattctgtcctgagaccacgggcaaagctcttcattttgagagagaagaaaaactgtttggaaccacaccaatgatatttttctttgtaatacttgaannnnnnnnnnnnnnnnnnnnnnnnnnnnnnnnnnnnnnnnnnnnnnnnatatgtataaggagcctaaacaatagaaagctgtagagattgggtttcattgttaattggtttgggagcctcctatgtgtgacttatgacttctctgtgttctgtgtatttgtctgaattaatgacctgggatataaagctatgctagctttcaaacaggagatgcctttcagaaatttgtatattttgcagttgccagaccaataaaatacctggttgaaatacnnnnnnnnnnnnnnnnnnnnnnnnnnnnnnnnnnnnnnnnnnnnnnnnnnnnannattgnnnaaannnanaannnaanaannnnnnnccttggcggccgccctcggcccctaaaaaacttttctaaacatttcttttgggggcgcggcccccaaagggaaagggaacagtgggcaaaaccttgttcccaaaggaaaccccggggaaagaaataaagggttggaattctcccc

SEQ ID NO: 69965 - DNA, 930 bp, Homo Sapiens
  misc_feature (79)..(79): n is a, c, g, or t
  misc_feature (91)..(91): n is a, c, g, or t
  misc_feature (100)..(100): n is a, c, g, or t
  misc_feature (802)..(820): n is a, c, g, or t
  misc_feature (871)..(880): n is a, c, g, or t
tcccctccatgctggcgctggacggttatatacaggcatgtagaggacttatgatcgctgctgtcagcctgggcttctntggttccatatntgcgctctntggaatgaagtgtaccaaagtcggaggctccgataaagccaaagctaaaattgcttgtttggctgggattgtattcatactgtcagggctgtgctcaatgactggatgttccctatatgcaaacaaaatcacaacggaattctttgatcctctctttgatgagcaaaagtatgaattaggagccgctctgtttattggataggcaggagcctcactgtgcataattggtggtgtcatattttgcttttcaatatctgacaacaacaaaacaccacagatacacatacaacggggccacatctgtcatgtcttctcggacaaagtatcatggtggagaagattttaaaacaacaaacccttcaaaacagtttgataaaaatgcttatgtctaaaagagctcgctggcaagctgcctcttgagtttgttataaaagcgaactgttcacaaaatgatcccatcaaggccctcccataattaacactcaaaactatttttaaaatatgcatttgaagcatctgttgattgtatggatgtaagtgttcttacatagttagttatatactaatcattttctgttgtggctttctataaaaaataaacagtttatttacgaactggacgacatgaagaaaagctgctgccaagaaagactgagcccctcccctgccctctccctgaaaataaaaaaactttttgacagnnnnnnnnnnnnnnnnnnntccctttgggggccccccggcccccaaaaaattttttaaaacttttttttnnnnnnnnnnccccaaaaggaaagaaaaaggggcaaaaccttttcccaaaaaaacccggg

SEQ ID NO: 69966 - DNA, 2359 bp, Homo Sapiens
  misc_feature (1888)..(1919): n is a, c, g, or t
cgatcgctaggtacgaggcctgggtgttgaattcggcacgaggggccgaaccgcagcttcttggcttaggtacttctactcacagcggccgattccgaggccaactccagcaatggctttgcaaatctgcggaaagtgctcatcagtgacagcctggacccttgctgccggaagatcttgcaagatggagggctgcaggtggtggaaaagcagaaccttagcaaagaggagctgatagcggagctgcaggactgtgaaggccttattgttcgctctgccaccaaggtgaccgctgatgtcatcaacgcagctgagaaactccaggtggtgggcagggctggcacaggtgtggacaatgtggatctggaggccgcaacaaggaagggcatcttggttatgaacacccccaatgggaacagcctcagtgccgcagaactcacttgtggaatgatcatgtgcctggccaggcagattccccaggcgacggcttcgatgaaggacggcaaatgggagcggaagaagttcatgggaacagagctgaatggaaagaccctgggaattcttggcctgggcaggattgggagagaggtagctacccggatgcagtcctttgggatgaagactatagggtatgaccccatcatttccccagaggtctcggcctcctttggtgttcagcagctgcccctggaggagatctggcctctctgtgatttcatcactgtgcacactcctctcctgccctccacgacaggcttgctgaatgacaacacctttgcccagtgcaagaagggggtgcgtgtggtgaactgtgcccgtggagggatcgtggacgaaggcgccctgctccgggccctgcagtctggccagtgtgccggggctgcactggacgtgtttacggaagagccgccacgggaccgggccttggtggaccatgagaatgtcatcagctgtccccacctgggtgccagcaccaaggaggctcagagccgctgtggggaggaaattgctgttcagttcgtggacatggtgaaggggaaatctctcacgggggttgtgaatgcccaggcccttaccagtgccttctctccacacaccaagccttggattggtctggcagaagctctggggacactgatgcgagcctgggctggggtcccccaaagggaccatccaggtgataacacagggaacatccctgaagaatgctgggaactgcctaagccccgcagtcattgtcggcctcctgaaagaggcttccaagcaggcggatgtgaacttggtgaacgctaagctgctggtgaaagaggctggcctcaatgtcaccacctcccacagccctgctgcaccaggggagcaaggcttcggggaatgcctcctggccgtggccctggcaggcgccccttaccaggctgtgggcttggtccaaggcactacacctgtactgcaggggctcaatggagctgtcttcaggccagaagtgcctctccgcagggacctgcccctgctcctattccggactcagacctctgaccctgcaatgctgcctaccatgattggcctcctggcagaggcaggcgtgcggctgctgtcctaccagacttcactggtgtcagatggggagacctggcacgtcatgggcatctcctccttgctgcccagcctggaagcgtggaagcagcatgtgactgaagccttccagttccacttctaaccttggagctcactggtccctgcctctggggcttttctgaagaaacccacccactgtgatcaatagggagagaaaatccacattcttgggctgaacgcgggcctctgacactgcttacactgcactctgaccctgtagtacagcaataaccgtctaataaagagcctacccccnnnnnnnnnnnnnnnnnnnnnnnnnnnnnnnngagggggcggccgcgccctctaaaagtttatcccccgggggggccccaagttacggcggtaaccccgagtttttggtcacaagggggcccccatatagggggagccgaatataaaaagcagggcaccgggcccgccgtttaaccccgtggggcgggcaaaccggcccggggaaccttggggaaggggacccctactttctgcgcgggctgcccttgttggcggcccctcccccccggaaaatattaagagtccgcagcggacatccaaaccttctgccggctcttcactgggtctcacccccaacgacgcctatatggctcgggggctggacgaattgggctccgcggcatttgttctgcaacatttacaggggtctgtcaataacaacacccctccccacacccctccacaccccgccagtcgccctacccagcagaag

SEQ ID NO: 69967 - DNA, 1110 bp, Homo Sapiens
aataactggctaggtacgatgctgggtggcgaattcggcacgaggggaggaggaggagatgactggggagcgggagctggagaatactgcccagttactctagcgcgccaggccgaaccgcagcttcttggcttaggtacttctactcacagcggccgattccgaggccaactccagcaatggcttttgcaaatctgcggaaagtgctcatcagtgacagcctggacccttgctgccggaagatcttgcaagatggagggctgcaggtggtggaaaagcagaaccttagcaaagaggagctgatagcggagctgcaggactgtgaaggccttattgttcgctctgccaccaaggtgaccgctgatgtcatcaacgcagctgagaaactccaggtggtgggcagggctggcacaggtgtggacaatgtggatctggaggccgcaacaaggaagggcatcttggttatgaacacccccaatgggaacagcctcagtgccgcagaactcacttgtggaatgatcatgtgcctggccaggcagattccccaggcgacggcttcgatgaaggacggcaaatgggagcggaagaagttcatgggaacagagctgaatggaaagaccctgggaattcttggcctgggcaggattgggagagaggtagctacccggatgcagtcctttgggatgaagactatagggtatgaccccatcatttccccagaggtctcggcctcctttggtgttcagcagctgcccctggaggagatctggcctctctgtgatttcatcactgtgcacactcctctcctgccctccacgacaggcttgctgaatgacaacacctttgcccagtgcaagaagggggtgcgtgtggtgaactgtgcccgtggagggatcgtggacgaaggcgccctgctccggggccctgcagtctggccagtgtgcccggggctgcactgggacgtggtttacggaaagagccggccacggggaccggggcccctgggtgggaccatggagaatggtcatcagcctggtccccaccctggggtgccagccacccaagggaaggttcaaaagaccccctggtgggggaaggaaaaatgcctgg

SEQ ID NO: 69968 - DNA, 631 bp, Homo Sapiens
  misc_feature (609)..(609): n is a, c, g, or t
  misc_feature (620)..(620): n is a, c, g, or t
ttgagagccactgtcctctgcactgaggaggctccttacctggcggaacatcaggcaggtcttgccaggccaggtttcagaacttacggaaagctggtctggatgcagtgcttgtagagaagcttctgagagattgggcacatcctgttacgttgctgcttctcctgtccttatgttattagtaagttctgaagtgatgtaaatgctagaactactgtagaactgtatgccagacactaagagagactatgtaacattccaggatataaaggaatgtatgttgtcactgggcagcaaaccacaccctaaagacaattcagaaagagtccgagggagaggaatataggccaggcaatctgctggctgcagatccctgccccttcattaagctgagtgcctcctgattctgtctgagtattcgcctttgtaagcccaggccagtaatcaaggggcagggcattgttgtgtgttaaccttgaaggccttctggggagagacagtacagggacctcaaatgaaaccaaaggggaaacggggactgggcacccacctccccaatctcgttttgtttttgtttttgttaagacaggatcttgccatcttgcctangctggcatcanactcctgagct

SEQ ID NO: 69969 - DNA, 1623 bp, Homo Sapiens
  misc_feature (1041)..(1099): n is a, c, g, or t
  misc_feature (1514)..(1514): n is a, c, g, or t
ccacgacacgtccttaaagcatgccttagcacggtcttaacacaccctctgaggctaccagctgtaccttgaactgtgagcaaaatgccgagaaacgcagctggcacttacacaaaatgttgacctcaggtctatagttcctaaatgtggctaattctgtaacacagtcttggtatttcttaattatgaatgcacatcctatttccaggcaggctctcttacttgaacacaaactccaaaaactaattcagagtcttttttgcccagatcttttaagacttacaccccagagatttaagaagaaaacctctaaatttcaaaattatgaagaattacagaattactcatttaaggtactttaaaagaagtttgtacattgtcaaagtaaattttaattcaaatcatgtctgtaaaacttgacgtattctgtgtatgcatgttttcattttgcaaatatttaatatatagacctatgatgtacaggtacgacatgtataggttacctagatgttatgagaaattttagtttattgtgagtactcaagttgcttagagagccaccagggtgatttgctgctggctttctatcatttttatgttttaatgcaaaggaaattttaaaatgttctggaagtgtttttgattaagcaatgcagcctagaagcaatggttctgttcaatcattcagatgttagtggaagcataaaagtcaagactgcatgttgaaacctttcttttgatagttactgaactgcttggttaaactaaatggaaccatgtgctaatttttcacaattattgacctgtattgattgccactgtagtttggtatttccctttactttggtggcctgcttccctcatgccctggaatacaactcagagctccaggcagcggaaccatctattgttttgtttgccagaaagtgcaccctgtatggtctcctgtctaagttggaaatattatgcatgtgcaggactattcgagtattttataaacagtagcacacaataaattccatgcatgggccgctgctcctnnnnnnnnnnnnnnnnnnnnnnnnnnnnnnnnnnnnnnnnnnnnnnnnnnnnnnnnnnngggggggcggcgcgacaaaaaaattaccccccggaggggccccacaagatatgatgcccgaacccccgttttgtggtaaacagggcggccccataggagaggcgataataaaaaggcaggcagcacggccggagggactttaaacaacggccctggtgcgggacacacgttggcccgaggaagccactttgggaaaagaaccccaccctccggggtgggctgggacaggctgtcgggaaccaccacctccccaaacgagagatgtataagcggccctgagggcgaacaattcaaaaccatgagcgatgtactaaggtggtgacccacacgaggcaaataatgtcggtgggggaaaaaaatttggccacgggagtgatttgtgatacttttttcccggcgtctgctcatttaacanagtcatacacacgtacgcagacaaaacgaaagcacacgaagctagaacagagatatagatcagagatacatagaataacagagtgagcaacgacatcgtagaccaagta

SEQ ID NO: 69970 - DNA, 1388 bp, Homo Sapiens
  misc_feature (83)..(117): n is a, c, g, or t
aactgtataatcactatagggcgcctagctccgccgcagccgaacgacgagcgcagcgacgtagtgagcgaggaagccggcgnnnnnnnnnnnnnnnnnnnnnnnnnnnnnnnnnnncagtcgacgggaccggacatatgcccgggaattcggccattacggccgggggttgcccttagggacggctgtgggcctgctgggggtgggggcccgaagcgccagagatggctgctcagcgagggatgcccagctccgccgtgagggtcctggaagaggcgttgggcatgggtttgacggcagccggggacgcgagggacacggcggacgcggtggcggctgagggcgcctactacctggaacaggtcaccataactgaagcatctgaagatgactatgaatatgaagagataccagatgacaattttagcatcccagaaggtgaagaagatctggcaaaagcaattcagatggcccaagaacaggctacagatactgaaattttggaacggaaaacagttcttccttcaaagcatgcagtacctgaagtaatagaagactttctctgcaatttcttgatcaaaatgggaatgaccagaactcttgattgctttcagtctgaatggtatgagttaatacagaaaggagtgactgaacttagaactgttgggaatgttccagatgtctacacccagattatgcttttggaaaatgagaacaaaaatttaaagaaagatttgaagcactacaaacaagcagctgagtatgttattttttaaatgacattttcttctttttcttttggactaaataaaagagttgagtgaagctgatatatgtaatataccagagccttaatttttgaaaactgaatttttctagttgtaaagaatgtgagaggcttcattagcaaattaattaaacagatgatcagaactatcacaattataacttaccaacaagaagggaatgcaggtagttgtttaggagatggtacatttttgatataaaattcacttccttgtgtatttgatagtcttttcatggtttataacattttctcctgtaaagataggctaatttctgaaataataattaaatttatagaaagccgagaggaaattgctagtttattcctggtagaggaatttctgtatttgaaaattctccagaaggaataatataaactgtggactttgggtgataatgatatgtaggttcgtcagttgttaacaaatgtatccctctgttgggggctattgataatggggaaggctgtgcatgtgtgggagtaggaggtgtatgggacatctctgtaccttctaatcaattttgctatgaacttaaaactgctctaaaaataaagtttattaaaaaaaagttaattctct

SEQ ID NO: 69971 - DNA, 594 bp, Homo Sapiens
ctttcagtctgaatggtatgagttaatacagaaaggagtgactgaacttagaactgttgggaatgttccagatgtctacacccagattatgcttttggaaaatgagaacaaaaatttaaagaaagatttgaagcactacaaacaagcagctgacaaagctagagaagatttgctgaaaattcagaaagaacgtgattttcatcgaatgcatcataagcgaatagtccaggaaaaaaacaaattaattaatgacctcaaagggttgaagttacattatgcatcttatgaaccgactataagggtgttacatgagaaacaccacactttactgaaggagaaaatgctgacctccttggaaagagacaaagtagttgggcagatttctggacttcaagaaacattgaagaaactgcaaagaggacatagttaccatggtcctcaaattaaaggtaaatgtaaaatgtgatgaagctctcatttaatatagtttggtgatttctcaaccttatcagtgattaatattctagagatatttaaaagtgagtaagtggtggctatttcacaaattaaaattttaataaaaagattaagaaa

SEQ ID NO: 69972 - DNA, 711 bp, Homo Sapiens
cggcacgaggataaaaatgtagagaagatgagaggccagatggagtctcatctgaaggagttagagcgtgtctgcgattccttgacggcggcggaacggaggcttcacgagtgtcaggagagtctgcagtgctgcaaggggaagtgtgcagaccaggaacacaccattagggagcttcagggccaggttgatggaaatcacaatcttctgacaaagctttctctggaagaggaaaactgtcttattcagctgaagtgtgaaaaccttcaacaaaaattagaacagatggacgcagaaaataaagagcttgagaagaagctggcaaaccaagaagaatgtcttaagcacagcaatcttaagtttaaagagaaatctgcagagtatacagcattggccagacaactggaagctgctttagaagaaggaagacaaaaggttgctgaagaaatagagaaaatgtcatctagagagagtgctttacaaattaaaatattagatctggaaactgagcttagaaagaaaaatgaagagcaaaatcaacttgtttgcaaaatgaacagtaaagcacaacatcaggaagtgtgtttgaaagaagtacaaaatagtcttgagaagtcggaaaatcaaaatgagagtattaagaattatttacagtttcttaaaacttcttatgtaacaatgtttgaataaattgtcaaatttattttctct

SEQ ID NO: 69973 - DNA, 3035 bp, Homo Sapiens
  misc_feature (616)..(616): n is a, c, g, or t
  misc_feature (983)..(1054): n is a, c, g, or t
gctggaccggtccggaattcccgggatatcgtcgacccacgcgtccgggcaaggatgcagcagcagagtacgatgagttggcagaacctcaagactttcaggacgatcctgacattatagccttcagaaaggccaacaaagtgggtattttcatcaaagttacaccacagcgtgaggagggtgaagtgaccgtgtgcttcaagatgaagcatgattttaaaaacctggcagcccccattcgccccattgaagaaagtgaccagggaacagaagtcatctggctcacccagcatgtggaacttagcttgggcccacttcttccttaaaaggttccactggagggcagatcccaaaggacagtatcaccgtaaacctgcgttaaaatgtggaagctgctgcttcattaggccttgtttataacgatgtacccatgcactacggaattctattgctaagaaagtgggagcataggcaaggcattgggaacacagggtagctgctgttgctcttgctctcacccctgttgacaccagtaagtctgtgtctccctcactgaaccctgcacgttgagtaacagcagcataattccatcctaggaaaggggatgggtgttccnttggaatggcattgtatttaccacctgagaaactctgtactgtctcttgatctgatctcactaaggatcacaatgtcacagatgaaacttaaatgataacccaaaaggagacctgctgttaatgatccagcattggtcacaatgtaccaactgctttctgcatttcgttaaatatcatctaacagtctaaaacatatcccttcattgccataagggctgccattttgccataaatttccatataactgaaaaactgaattgtcactttatctttagtatcatgatgattggaaaaacctgtgaagttgttaaggcactctcatttgccctctttttctaagtgaatacaggacacgtattagttgtnnnnnnnnnnnnnnnnnnnnnnnnnnnnnnnnnnnnnnnnnnnnnnnnnnnnnnnnnnnnnnnnnnnnnnnncaagggggtagcagattccattcgttttcaatattgccacaatacccagggattaatgctgccacaggggggcaatctttatttgtcttacttcctaccccttccctgttctgcctctttaactcagttaagttgttctgtttgggacctggaaaagaacccaaagaaaacctgagtggacaggttcatttctggaatgcagaaaacattttaaaggctagatttttagaatattctcaactagcattctttccattgatttgaaggggaaattaactattataatctcttgaatccaaaactggatattaagaactttcccccttactaagtttaagacttttgtcatgtggtgagtcaaataagaccattttgattgtaaaccataaaatagttcagcaagtagcccacagttctggcctaacagcagacttgctgttttcacttggtatcctggagttgggttgctaaccttaatttctatgatgttttctaaaatgaaacttgataaagtagaccaccagctgcaccgtgttttctgtaaaagtattgttagtaagtggccaagagacttgaggaaaatacagattttttgtttaccttggtcttgttttaagtcttaaaaaattaaagataacattataatgtagaatacagatgggacatagtccttgtaagcttcccttgaaaatgttttaaatatttaggaagcttttaaaagacactaaattgtactctaaaagacactaaattgtactaattgtacaaaggtcaagccaattttatgaaacagtcctacagagtaatatatgtgatgcagtgtaagaaggaaaatactcatctctaacattatggtaataacatttagcctcttaggagttggagcagggggatgggtaattacagatttgcagactatagaaagagtttcatttttttgtgaccccacagagtctcaaatttttatttcactacctgctagagcctactgtgaaatcactgctccatatttgccagtggaggaaatgggcatagagtagagaatagcttcatatgtttacacgtttgcatagactacacacatgtcatgcgtttatggcaggtagctggtatttattccccaaagtaataatgttgaagtatgggtctcatcattcccatacacagaaacacaaaacactttgatcataaacttttttcttcagaagccaaactaacttgcagaataatagagccactggtttaatgtttcctcaagataggttttagtgtaagctagtattctgtgtgttcgtagaaatgattcaatacctgcagctggtgaattaggaattgtatttgttgccttttttatattagatgaggtgcaaaaattttaatgctagtcagtatgcaccaccacaggaaagttagatcccattagcacttgaaactacagctttggaaacttaggctaagttaatttggatttgttacttgattcacctactgaccttttcttttgtttgaagtgcttatcagcataatgagctaagtgtcatgcatatttgtgaagaaacaccctttttggtcccttttgggacagagaggtactccttgatctttatgaatgacaggttactgttttgccttattgcttaacttaatgtagtgaaataaagcagacaaagcttgagcgtgtcttttgtttgctctcatgtagatactaagtagcatggctcagagccaaaagacaagcgtgaagttaagagagttggctaagagagttggtggggcatgctcccttccattccttaaatgaagtaatctaaaatctcttagcaggttagttcaccataatatataagtagatgttgctttgagcttcttatatacatattcacagaaccattatataaatgttgttagacctctaccagtttttatcctgggtcattgcttctaaagatatcctttacaatatacacagtggtctgactcc

SEQ ID NO: 69974 - DNA, 849 bp, Homo Sapiens
  misc_feature (407)..(421): n is a, c, g, or t
  misc_feature (712)..(737): n is a, c, g, or t
aaaggagcagggaaaagatccagaagcatgttagttcgacatcatcatcttttcttgaagtatgatgcatattgcattattttatttgcaaactaggaattgcagtctgaggatcatttagaagggcaagttcaagaggatatgaagatttgagaactttttaactattcattgactaaaaatgaacattaatgttaaagacttaagactttaacctgctggcagtcccaaatgaaattatgcaactttgatatcatattccttgatttaaattggcttttgtgattgagtgaaactttataaagcatatggtcagttatttaattaaaaaggcaaaacctgaaccaccttctgcacttaaagaagtctaacagtacaaatacactatctatcttagatagatatannnnnnnnnnnnnnnaaatattgtactatttatggtggtggggctttcttactaatacacaaataaatttaatcatttcaaaggcattctatttggtttagaagttgattcccaggagtgccatatttcagctactgtatttcctttttcttgtaatgtaagcagctcagataccatgtgctatcatttttgtatcaagttttttgcacaggatgtgaccactgtcagatcactgttcttttctttctttttgtgattgaaaagcctatactacaatttgaagtaaatttttgtttttcctaaaannnnnnnnnnnnnnnnnnnnnnnnnnaacacacaccaatcaacaccaccaatccaacacaaacataacaaatatcacaccctacctacctcccaaaaaccataaaaacacctttaacaaaaaacacctacacgctcca

SEQ ID NO: 69975 - DNA, 809 bp, Homo Sapiens
gagatcattagatatttgatgattactctgatgtgatgaggagtgatactctggcaaatgccatgagtcttgatattgaagaccggaagttgcagatataggaaacacagtgaaaaagcagtatgaaggaggtatctttaaaatagcttcctgggcagatctagtaaatgctcacgtggtgccaggctcaggagttgtgaaaggcctgcaagaagtgggcctgcctttgcatcgggggtgcctccttattgcggaaatgagctccaccggctccctggccactggggactacactagagcagcggttagaatggctgaggagcactctgaatttgttgttggttttatttctggctcccgagtaagcatgaaaccagaatttcttcacttgactccaggagttcagttggaagcaggaggagataatcttggccaacagtacaatagcccacaagaagttattggcaaacgaggttccgatatcatcattgtaggtcgtggcataatctcagcagctgatcgtctggaagcagcagagatgtacagaaaagctgcttgggaagcgtatttgagtagacttggtgtttgagtgcttcagatacatttttcagatacaatgtgaagacattgaagatatgtggtcctcctgaaagtcactggctggaaataatccaattattcctgcttggattcttccacagggcctgtgtaagaatgggttctggagttctcatggtctttaggaaatattgagtaatttgtaatcaccgcattgatactataataagttcattcttaagcttgcaaaa

SEQ ID NO: 69976 - DNA, 930 bp, Homo Sapiens
aattataccctacggtcaagaaagtaaagaaaatacatggtaagattcctggtgctgtaacttccacaggaaaaaacatttcagcaaaagtaaatacataacaagtagggctaatccctgggttttctaccctctcataaggcaaattcttctgtgttcataggccatttaccatattcataagccggggtgctgtgttctttcttgtgtttctttcttgtttgttgtgattaagcttgtgttatcttttatgcaatagtaatgtatttattaaaattgagactgtttttcaagcaccaaattatgaaccatctaaacacagtccttttttaaacattttaaagtgtgttcacaatgaaaccaagaatgaattggagaagatgttgaaatgtaatgaggagcacccagcttatcttgcaagtgatgaaataaccacagtccggaagaaccttgaatcccgaggagtagaagtagatccaagcttggtaataaatactgctgagaagcaggaatctgcttccttaatatttgtttcttgcagtaaatgttactacatgtgttagttagatatttaagtgcttaatttgacttttgtcacgtgtacatttgctgacagtaaaagcttagtcattttgattgcgtgaagagaaggaattttattctcagtattgcttttttaagagtaatgctttaatttgtaaatggagaaatttactttggcaagttcaatggtcaacagtcagttcatgcaaaatgggatgaaaccgacctagacctttgccccacgtcacgctgtttcagattgcaaaatagaatttctgtttaaaaatggcatatatatgtgtttttgtgtgtggtttacagtcaaatgtaactcaattagatgtgagtggattcagaaaaaataaaaatgttgtttttattaaaaaa

SEQ ID NO: 69977 - DNA, 2018 bp, Homo Sapiens
tggggtgcctcaaacgggtagagcgatgagggaaagagcaatgatgacatatgggataaacttaaagaggctgttaaggaagaaagtattaaacgacacaagtggaatgactttgcggaggacagcttgagggttattcaacacaatgctttggaagaccgatccatatctgataaacagcaatgggatgcagctatttattttatggaagaggctctgcaggctcgtctcaaggatactgaaaatgcaattgaaaacatggtgggtccagactggaaaaagaggtggttatactggaagaatcggacccaagaacagtgtgttcacaatgaaaccaagaatgaattggagaagatgttgaaatgtaatgaggagcacccagcttatcttgcaagtgatgaaataaccacagtccggaagaaccttgaatcccgaggagtagaagtagatccaagcttgattaaggatacttggcatcaagtttatagaagacattttttaaaaacagctctaaaccattgtaacctttgtcgaagaggtttttattactaccaaaggcattttgtagattctgagttggaatgcaatgatgtggtcttgttttggcgtatacagcgcatgcttgctatcaccgcaaatactttaaggcaacaacttacaaatactgaagttaggcgattagagaaaaatgttaaagaggtattggaagattttgctgaagatggtgagaagaagattaaattgcttactggtaaacgcgttcaactggcggaagacctcaagaaagttagagaaattcaagaaaaacttgatgctttcattgaagctcttcatcaggagaaataaattaaaatcgtactcataatcagctctgcatacatctgaagaacaaaaacatcaacgtcttttgtccagcctctttttcttctgctgttccacctttctaaacatacaataaagtcatgggataaaaataatcgatgtatgttacgggcgctttaaccatcagctgcctctcgaatggaagaacagtggtaatggattaacatcctattttgttgtactaaagtgacaaatcggaataatataattggtatggccattaggttcagtccttgaagatgagaaacttgttctctgtttgttgtcttatttgtggtggcactcgtttaatggattaactgaggttgctcaatgttcagtttcttttccagaaatacaatgctaggtgttttgaaataaaacttatatagcaattgtttaaagttatcaattgtatataaaatcacagtagcctgctaaatcattgtatgtgtctgtagtattctattcccagaaactatttgaccatgataattcagtttatattcaccacatgaaagaaaaatgggtaacagaagaacccctaaaacaggttaatttggattgtaacgttcagtgaaagaaatttcaacccttcatagccagcgaagaaatttgccttggaagccaagtcagtaccagcttacctatttgattcagttgctgttttctcactctctatatccatttgaaattgatttattttagatgttgtatacttacgttaggctttctgttaatagtggtttttctcctgttgacagagccaccggattatgacacaggatgaggaagattaaggataatcaattgactaatttcatttagaatattatcaaacatttcaactaggtatcagaaaaaggctttctttcataagactattttaaatagaaattatttcaacaattaaagtaatgttgaccatccccctctcagctgaataaagaaaaatttagttcaatttattgcaatttaattacaatactaccttcacaacattttcatgtgttttaaataaatattttttaattggctaaaggacattcaagcaaagaaatgctttctttacttaaaatgtctatctcatttgctgccttttcactaagcctttactttgttaataaaagtgtccattgtgtgatgtttttgatttt

SEQ ID NO: 69978 - DNA, 1677 bp, Homo Sapiens
  misc_feature (442)..(741): n is a, c, g, or t
tcacttcctgcctctgctgccaccatcactgtgtgaagctttcaagagcttggtacttcccagggctaccggcagtcctctgtagtccagagaggtgagattagatcttcttggttccctgtgaggtttcaggcactaaaactctatgtggggaagggaggggttactcctcctccaatgggactcaaggacttgacctccaggagtaggcccctggtcagaagtgccatctcaccagtggtcttcattcttcctcattcattctttatcatcctgtgttctgtttagttgcaacaatctcttgtgactaatgtcactcaaagcatcttgtaaatcctagggcttcctggaagttagttgccaaagtcatgcaagcatcacctgtcattcttgtgttggagttatagaattctacatcttataaaacctaactggcatttannnnnnnnnnnnnnnnnnnnnnnnnnnnnnnnnnnnnnnnnnnnnnnnnnnnnnnnnnnnnnnnnnnnnnnnnnnnnnnnnnnnnnnnnnnnnnnnnnnnnnnnnnnnnnnnnnnnnnnnnnnnnnnnnnnnnnnnnnnnnnnnnnnnnnnnnnnnnnnnnnnnnnnnnnnnnnnnnnnnnnnnnnnnnnnnnnnnnnnnnnnnnnnnnnnnnnnnnnnnnnnnnnnnnnnnnnnnnnnnnnnnnnnnnnnnnnnnnnnnnnnnnnnnnnnnnnnnnnnnnnnnnnnnnnnnnnnnnnnnataaaaaatactgtaataaaagtacttataaacatactaatcctctttcaggaccctaaagttgcaggttagtaggtcttcaaggacaaatctgtaagtttcttatttctgtagtgcaagtaaaatttcactttttgaaactatagagagatccctttctgattagcctacagaacttaaagtgagggaaccatttcctctcacagacaaagaggcctgggatattaggactttggggtttgagagcatcatggggcagacagatggtggatggtctggacaagaagcgagtaagccactgcggttggtcatactgaagggaattgatggcaagaggatcccctgagcaagtcagaagttactctcatcagtcgttcatggtcacaacctgaggtactctgctgagtgggcaaggctgaagaagaggcctgtggaatgcagcattacctgctggacagagcagggcaggcagttctatgccttggagctcctgactgcagggactctgtccccacactcagaaagactcagctcactcaatgagagaatgtgatttactttatagaacgtataatcaactttgttgaataatttgttctattaaggctgtctaaagtatgtgatgtcttcatcatagtatgaagtgttgaaaattaataacgagcctagtttaggaaaaagctgcttaaaactgtggctctaagagagtaatcataaaataccttagataaaattgcactatggaattttcattgagtatgtttaaattattggcttgtctactaatacacatctgcttcaaaatgaacatatttcataaaattggcatcaattttaatgacgctcctggtatggaacctcagatataccctattggagacaatcctttgatcataaattctccccaaactataaatcattttatgtctttatcat

SEQ ID NO: 69979 - DNA, 697 bp, Homo Sapiens
  misc_feature (96)..(96): n is a, c, g, or t
  misc_feature (113)..(113): n is a, c, g, or t
  misc_feature (145)..(439): n is a, c, g, or t
caagaattcggcacgagggtaaacagtgtgattgtgaaaaaaatattatttatagattttctacaaataaatatgtgtctaccaagtaaaatattntgactgaaatgattctntgaaatgcatattgatttattatgtattgacnnnnnnnnnnnnnnnnnnnnnnnnnnnnnnnnnnnnnnnnnnnnnnnnnnnnnnnnnnnnnnnnnnnnnnnnnnnnnnnnnnnnnnnnnnnnnnnnnnnnnnnnnnnnnnnnnnnnnnnnnnnnnnnnnnnnnnnnnnnnnnnnnnnnnnnnnnnnnnnnnnnnnnnnnnnnnnnnnnnnnnnnnnnnnnnnnnnnnnnnnnnnnnnnnnnnnnnnnnnnnnnnnnnnnnnnnnnnnnnnnnnnnnnnnnnnnnnnnnnnnnnnnnnnnnnnnnnnnnnnnnnnnnnnnnnnnnntttgagaaaagcatttatactatttacagattgttgacaaatatttatccactaagtaaaatgttagactgaaatgattctttgacaagcttgccaatttactgattttgtcaaagaaaaatatgttatttttgaagtttgttcatcctttgagtgtgtgagtatagtatcagaggcttaattttgtatttatggagctattctaacttgttatttaaaaggaaaaaggtattaaacttgaagcaaacttctcatgaa

SEQ ID NO: 69980 - DNA, 1042 bp, Homo Sapiens
aggctaagcgccgcgcgcaaagccgtgcggagattggaggccgcgcgggtccctggtctgggccatgtctggctgtgatgctcgggagggagactgttgttcccggagatgcggcgcgcagcgatgaaatctacattgctccttcaggagtgcaaaaggaacgaattcagcctgaagacatgtttgtttgtgatataaatgaaaaggacataagtggaccttcgccatcgaagaagctaaaaaaaagccagtgtactcctcttttcatgaatgcttacacaatgagaggagcaggtgcagtgattcatacccactctaaagctgctgtgatggccacccttctctttccaggacgggagtttaaaattacacatcaagagatgataaaaggaataaagaaatgtacttccggagggtattatagatatgatgatatgttagtggtacccattattgagaatacacctgaggagaaagacctcaaagatagaatggctcatgcaatgaatgaatacccagactcctgtgcagtactggtcagacgtcatggagtatatgtgtggggggaaacatgggagaaggccaaaaccatgtgtgagtgttatgactatttatttgatattgccgtatcaatgaagaaagtaggacttgatccttcacagctcccagttggagaaaatggaattgtctaagccaaaagaaagtctaattatatacagagataaagctaaacgtaattattatttaaatgaaagctatttttttaaatgaattgaaatttttcatgatgctactaatttgccactaaatactgcaaatggtcaccctgaatctcttctgacattggatgttatttgcttatattcttataattttaaatgagggcacagtgaaatgaaaattttatactctatgtttctgtttatttttaaatccttaacagcaaaatatttgcctttaatttcttttttatatatactctcagagaattcctcttaatttttaaagatgctggtgataataaaattcattagaaaatttc

SEQ ID NO: 69981 - DNA, 874 bp, Homo Sapiens
cagtcgacggtaccggacatatgcccgggaattcggccattacggccgggggcctgattgcatttgcggcctcgctgccgcatcccaggctaagcgctgcgcgcaaagccgtgcggagattggaggccgcgcgggtccctggtctgggccatgtctggctgtgatgctcgggagggagactgttgttcccggagatgcggcgcgcaggacaaggagcatccaagatacctgatcccagaactttgcaaacagttttaccatttaggctgggtcactgggactggaggaggaattagcttgaagcatggcgatgaaatctacattgctccttcaggagtgcaaaaggaacgaattcagcctgaagacatgtttgtttatgatataaatgaaaaggacataagtggaccttcgccatcgaagaagctaaaaaaaagccagtgtactcctcttttcatgaatgcttacacaatgagaggagcaggtgcagtgattcatacccactctaaagctgctgtgatggccacaccttctctttccaggacgggagtttaaaattacaccatcaagagatgataaaaggaataaagaaatgtacttccggagggtattatagatatgatgatatgttagtggtacccattattgagaataccctgaggagaaagacctcaaagatagaatggctcatgcaatgaatgaataaccagactcctgtgccatactggtcagacgtcatggagtatatgtggtgggggggaaaactggggagaaggccaaaacccttgtgttggagggttatgactattttatttgatattggccgtatccatggaaaaaagtaggaactttgatccttttccagcttcccggttgg

SEQ ID NO: 69982 - DNA, 675 bp, Homo Sapiens
  misc_feature (650)..(650): n is a, c, g, or t
ttaatagtatcattcatttgtacagagaaatcatttggatggatctatttacagtcttttctgattatcatttccactggccaaatatatttcacagaatagtcaacactgacttgaattgatcaccattataatcgggcttttactcctcctcccccctttcaaagatgatgatcccattttaacagaaacattttgtaataaaagattcaccagtctttttccatcttatgactaaatccaccaaaatttatctaatatggtcaaatttttaacacatttcattgtttcttttcaaactcattatttgcaggtattgcaaaccaaggcaaataagtccacgtcccctcgagccttctacaacttactacacgccctcaagttgagcttctcctatctcctttcacacttgtgaaatgtctggcacaaccagacattttacttgaagacaaaactactctcttttcctctctttttcttttaactcactaccaatcaccttccctcttgcatttcagacaacactaaaactttcaacaaaatctttgaagtggttttctttcagtagtctagaatacatcaagccatttcatgggtctttaccctgaaatgctacactttaaaaatggcaattttcttaattggctcanaaccctcgtgcccgattcttggcct

SEQ ID NO: 69983 - DNA, 1013 bp, Homo Sapiens
  misc_feature (221)..(337): n is a, c, g, or t
  misc_feature (929)..(955): n is a, c, g, or t
ttctcctggtatccatgatcttgatacgtatacccttgagtgagtgtacgctccgcacggacgacggcgcagggtcgtggcgagagccgaaggcgccatacgcaaccgctttccccggcgtgccgatcatatgcagctgcacgcagtttcccgactgaagcggccatgagccaacgcattaatgtgagtagctcactcataggcaccccagctttacactnnnnnnnnnnnnnnnnnnnnnnnnnnnnnnnnnnnnnnnnnnnnnnnnnnnnnnnnnnnnnnnnnnnnnnnnnnnnnnnnnnnnnnnnnnnnnnnnnnnnnnnnnnnnnnnnnnnnnaggaattcggcacgagggcttttactcctcctccccccttttccaagatgatgatcccattttaacagaaacattttgtaataaaagattcaccagtctttttccatcttatgactaaatccaccaaaatttatctaatatggtcaaatttttaacacatttcattgtttcttttcaaactcattatttgcaggtattgcaaaccaaggcaaataagtccacgtcccctcgagccttctacaacttactacacgccctcaagttgagcttctcctatctcctttcacacttgtgaaatgtctggcacaaccagacattttacttgaagacaaaactactctcttttcctctctttttcttttaactcactaccaatcaccttccctcttgcatttcagacaacactaaaactttcaacaaaatctttgaagtggttttctttcagtagtctagaatacatcaagccatttcatgggtctttaccctgaaatgctacactttaaaaatggcaattttcttaattggctcaaaaacagtatggcttggtttcacttggtaaaattaatgtgatttaaaaaaatatatatatatnnnnnnnnnnnnnnnnnnnnnnnnnnntttttaatcaggaagaaaaatactttaaagacatgccaatttgaaaaggcatcaaagt

SEQ ID NO: 69984 - DNA, 732 bp, Homo Sapiens
aagttttcggagtcgagttttaccctctaatgcagtgtggatggagaatcaaaactgaagagtttggaaattgccaccctcaggagcggaacattttcaatcggatctttggtggtttccttatgaggaaggcatatgaacttgcgtgggctactgcttgtagctttggtggttctcgaccgtttgtggtagcagtagatgacatcatgtttcagaaacctgttgaggttggctcattgctctttctttcttcacaggtatgctttactcagaataattatattcaagtcagagtacacagtgaagtggcctccctgcaggagaagcagcatacaaccaccaatgtctttcatttcacgttcatgtcggaaaaagaagtgccattggttttcccaaaaacatatggagagtccatgttgtacttagatgggcagcggcatttcaactccatgagtggcccagcgaccttgagaaaggactaccttgtggagccctaagaacaccacatttgttgaaaactagcactctacccacagtgacgtggtatctgatgaagacctgatcgagtgtattgattttagtattgcttcgtgtcctccacacaggaggaggatgtattcagcctttaggatgatcagaaaagcagaaagagagagtggccggatggggctgaggggagaaagaattattaaacaataaatactttcaagacaattttaattgtgaacctac

SEQ ID NO: 69985 - DNA, 552 bp, Homo Sapiens
gtctatgcatcttgttaccttgaatacaagggtggtcttgataatatttgacagcactaaccaacttaccaagccatctaagtgcttctgagacttttcagtttgcacaatttctttctccttttcaacagttacccagcgcttctgccctactctcttgtaagctgacacagttgttgttggtacaatcttgttctatcaccagcatcaaatttgcttaatactgcttgttgacatcccctcagctgtcattcacagcaaaccaccatgtgccatgatcacaatgtattattagcttcgccacactaatttggaaacattcttttagatattaaaacaccttacttctagtattagtttgggactgcagaggggcaaagataccatttacagtatataggagtccaatattcccaaccaaccttgatttcatgaatggcttgtaattatttctagcaggcactcatgcaatagaataagattgaaacatgccagagtaccatctttctttgttttaacatctctgattgaattcctatattcagactacac

SEQ ID NO: 69986 - DNA, 657 bp, Homo Sapiens
  misc_feature (106)..(144): n is a, c, g, or t
aatgaaaattcacttggcaccctagatgaatccaaatcatcagattcgcatagtgattctgatggggaacaggaagcagaagaaggagggtctctacagagacagnnnnnnnnnnnnnnnnnnnnnnnnnnnnnnnnnnnnnnngtgatggaggaagtgacccagaaacacagaaagaaaaaagtattcagaaacagaattcattaggttcaaatgaagaaaaatcgaaaactcttaagaaatcaaacccatatggagaatggcaagaaattaaacaagaggttgagtctcatgaggaggtagatttggaacttccaagcactgaaaatgagtatgtatcaacttcagaagctgatggtggcggagaacccaaagtggtatttaaagaaaaaacagtcacttctcttggagttatggcagatggagtggccccagtcttcaaaaagagaagaactgaaaatggaaaatctagaaatttaaggcaacgaggtgatgatcaatagttgcaggagagctttttgtacatgcttttaggacagaatggagacttatacacccaaagtttatctgtgtttgtttgtaagtattatgatgctaaaaatttagatttattctaaatgtatttgatgtgaattaaaataaatattttttcatgtg

SEQ ID NO: 69987 - DNA, 1132 bp, Homo Sapiens
  misc_feature (373)..(411): n is a, c, g, or t
  misc_feature (923)..(927): n is a, c, g, or t
  misc_feature (929)..(935): n is a, c, g, or t
  misc_feature (937)..(938): n is a, c, g, or t
  misc_feature (940)..(940): n is a, c, g, or t
  misc_feature (945)..(945): n is a, c, g, or t
gtccttcaaagggcagatgggtagaaggcataacctcctgagggttaccattactattatgatcttatctcaggagcatctcacgtgggagaaactctgaaggatttcaaggagacttaaaaaagacagcagtgaagaccgtttgggtagaaggtttaagtgaagatggttttacctattactataatacagaaacaggagaatccagatgggagaaacctgatgatttcattccacacactagtgatctgccttctagtaaggtcaatgaaaattcacttggcaccctagatgaatccaaatcatcagattcgcatagtgattctgatggggaacaggaagcagaagaaggaggggtctctacagagacagnnnnnnnnnnnnnnnnnnnnnnnnnnnnnnnnnnnnnnngtgatggaggaagtgacccagaaacacagaaagaaaaaagtattcagaaacagaattcattaggttcaaatgaagaaaaatcgaaaactcttaagaaatcaaacccatatggagaatggcaagaaattaaacaagaggttgagtctcatgaggaggtagatttggaacttccaagcactgaaaatgagtatgtatcaacttcagaagctgatggtggcggagaacccaaagtggtatttaaagaaaaaacagtcacttctcttggagttatggcagatggagtggccccagtcttcaaaaagagaagaactgaaaatggaaaatctagaaatttaaggcaacgaggtgatgatcaatagttgcaggagagctttttgtacatgcttttaggacagaatggagacttatacacccaaagtttatctgtgtttgtttgtaagtattatgatgctaaaaatttagatttattctaaatgtatttgatgtgaattaaaataaatattttttcaaannnnnannnnnnnannanaaaanaaaccttgtcgggcccgcctccgcccctcgagaagcctttctaaaaccatttcgttttggcgcgccgggcccccgtaaggtaagtggaacatgggtcataagcctggttttcctaaaggaagatccctgggccatgaacaaagtgccttgggaattcctccccccaaaaaaaggaaacgccccgcca

SEQ ID NO: 69988 - DNA, 1629 bp, Homo Sapiens
gggatatcgtcgacccacgcgtccgctatgtccaagccttgcctctggaatcgagtcccgcgtcctgcctcaccaggagtcgcagctacagattctcgtgacactggaagcagtaactttgccgtggcaggaaccccgactcctacatagacacgtactttgacacagagaggtctagcacataccgctccaagggtctggatcgtcacagtgaagtacacacaaggaagctggacgggcttcgttggggaagacctcgtcagcatccccagaggcttccaatacttcttttcttgtcaaacatgccactatttttgaatcagagaatttcttctgcctgggattaaatggaatggaatacttggcctagctgatgccacacttgccaagggaaggcaagcaaaggaacaagtcactcggctggcaagtggccaagagcctgtctcccatcgtgttgcttggttgaccgcctctcgaagaagccatcaagttctctggagaccttcttcgactccctggtgacacaagcaaaatccccaaggtttatctccatgcagatgtgtggagccggcttgcccgttgctggatctgggaccaacggaggtagtcttgtcttgggtggaattgaaccaagtttgtataaaggagacatctggtatacccctattaaggaagagtggtactaccagatagaaattctgaaattggaaattggaggccaaagccttaatctggactgcagagagtataacgcagacaaggccatcgtggacagtggcaccacgctgctgcgcctgccccagaaggtgtttgatgcggtggtggaagctgtggcccgcgcatctctgattccagaattctctgatggtttctggactgggtcccagctggcgtgctggacgaattcggaaacaccttggtcttacttccctaaaatctccatctacctgagagacgagaactccagcaggtcattccgtatcacaatcctgcctcagctttacattcagcccatgatgggggccggcctgaattatgaatgttaccgattcggcatttccccatccacaaatgcgctggtgatcggtgccacggtgatggagggcttctacgtcatcttcgacagagcccagaagagggtgggcttcgcagcgagcccctgtgcagaaattgcaggtgctgcagtgtctgaaatttccgggcctttctcaacagaggatgtagccagcaactgtgtccccgctcagtctttgagcgagcccattttgtggattgtgtcctatgcgctcatgagcgtctgtggagccatcctccttgtcttaatcgtcctgctgctgctgccgttccggtgtcagcgtcgcccccgtgaccctgaggtcgtcaatgatgagtcctctctggtcagacatcgctggaaatgaatagccaggcctgacctcaagcaaccatgaactcagctattaagaaaatcacatttccagggcagcagccgggatcgatggtggcgctttctcctgtgcccacccgtcttcaatctctgttctgctcccagatgccttctagattcactgtcttttgattcttgattttcaagctttcaaatcctccctacttccaagaaaaataatt

SEQ ID NO: 69989 - DNA, 1473 bp, Homo Sapiens
cggtccggaattcccgggatctgcccgcagccccgcgcgccggccgagtcgctgagccgcggctgccggacgggacgggaccggctaggctgggcgcgccccccgggccccgccgtgggcatgggcgcactggcccgggcgctgctgctgcctctgctggcccagtggctcctgcgcgccgccccggagctggcccccgcgcccttcacgctgcccctccgggtggccgcggccacgaaccgcgtagttgcgcccaccccgggacccgggacccctgccgagcgccacgccgacggcttggcgctcgccctggagcctgccctggcgtcccccgcgggcgccgccaacttcttggccatggtagacaacctgcagggggactctggccgcggctactacctggagatgctgatcgggacccccccgcagaagctacagattctcgttgacactggaagcagtaactttgccgtggcaggaaccccgcactcctacatagacacgtactttgacacagagaggtctagcacataccgctccaagggctttgacgtcacagtgaagtacacacaaggaagctggacgggcttcgttggggaagacctcgtcaccatccccaaaggcttcaatacttcttttcttgtcaacattgccactatttttgaatcagagaatttctttttgcctgggattaaatggaatggaatacttggcctagcttatgccacacttgccaagccatcaagttctctggagaccttcttcgactccctggtgacacaagcaaacatccccaacgttttctccatgcagatgtgtggagccggcttgcccgttgctggatctgggaccaacggaggtagtcttgtcttgggtggaattgaaccaagtttgtataaaggagacatctggtatacccctattaaggaagagtggtactaccagatagaaattctgaaattggaaattggaggccaaagccttaatctggactgcagagagtataacgcagacaaggccatcgtggacagtggcaccacgctgctgcgcctgccccagaaggtgtttgatgcggtggtggaagctgtggcccgcgcatctctgattccagaattctctgatggtttctggactgggtcccagctggcgtgctggacgaattcggaaacaccttggtcttacttccctaaaatctccatctacctgagagacgagaactccagcaggtcattccgtatcacaatcctgcctcagctttacattcagcccatgatgggggccggcctgaattatgaatgttacccgattcggcatttcccccatccacaaaatgcgctggtgatcggtgccaacggtgaatgggagggcttctacgtcatcttcgacagagcccaaaaagaagggtggggcttcgcaacgaaccccctgtgcagaaaatgccaagggcctgcaagtgttccgaaaattttccga

SEQ ID NO: 69990 - DNA, 476 bp, Homo Sapiens
ccatgcagatgtgtggagccggcttgcccgttgctggatctgggaccaacggaggtagtcttgtcttgggtggaattgaaccaagtttgtataaaggagacatctggtatacccctattaaggaagagtggtactaccagatagaaattctgaaattggaaattggaggccaaagccttaatctggactgcagagagtataacgcagacaaggccatcgtggacagtggcaccacgctgctgcgcctgccccagaaggtgtttgatgcggtggtggaagctgtggcccgcgcatctctggtgagtcctcgggacactcacgggtccccgagttgctgagttacagtcacctgctgaggagcagcactgcgtgttctgagcatctctgaactattgcgccatgtatttccaattgtcatattgtgtatttgtatattttatatgtaatagtataggtgtaatatgtaaatatatgtt

SEQ ID NO: 69991 - DNA, 611 bp, Homo Sapiens
tgagtgaggtacgagtattaccaaatgatattttctgaagatgctttttggaaagctctgaatctatacctaatgctcttaattattggcttgtttcatttttttcctccagtttttaacaagatcacataactggcttatttttaacagctttgtcaaactacaatttacatgccgtaaaatgtacacactgtaattttataattcattgacttttagtaaatttctagcgttatgcatcgccacaatccagttttagaatatttccatgaccctaagaagtttcctcatgtctattaatattcccaatcctaggcaccactgagttgttttctgtctttataagtttttctttctacatcttatataaatggaatcataatacatgtagtattttgtgtctggcgtcttgcacttagcatggtgttcttgaggttcatctgttgtagtatgtattgatacttaatttttttattgccgaatactattccattgcatggaaaagacctattttatttctaggttcaccagttgagggacatttggattgttcccacttcttggctgttaggaataatgttgctctgaacatgtaaataaagcctcgtgcc

SEQ ID NO: 69992 - DNA, 728 bp, Homo Sapiens
  misc_feature (85)..(85): n is a, c, g, or t
acaggaaatagcttcattttggttatgagataccagagtcagaaatgacattagattgtatagaaaagacttctaattgtgtgcntacttcccacatgattataataaactatatattaacaaccttgggatcgtactcaggttgtcaattacacggatgcatctttcacttttttctttcccaagagtgagagaaagagtgaggttgtgcttaaggcagtgtggaattctacagaagctcttcttggaaaaggagttcaggcacttgtgttgtagactgcagtctgattctgttcttacttcctctcagcataagggagctttgaaaagaaaactcagacttgtatccgacttgaccagaagcaaaataacttgatcattgaagccactatttctgtgtatttgatcaagtcctcctctggaatccaatgcagccatattcatatttcggtctctcttaatggaccttgctggaaagaacattctgtgctaagaaaatggaaaataaacgtgagaaaactttaagaatgagccttcacacctcctgcagcaggtgatagctctgtacttcagagcttgtctccaggttgagaattacctgttttccactctgaggggattagaaagatactgttttaatgggttataaaacttgtgtgaagaagattggccttctccacctctcctgtgaaataaattgtttgaaaactctttgaagagaaaaaaaa

SEQ ID NO: 69993 - DNA, 654 bp, Homo Sapiens
agacagcactctgctccttgccgttgctctgagtgacaaccttccattggccagaggatgagaaatctggacattttctcacactaaggacagttgtcttgaagaaacacagagaaggcatcattgagaattactccaggataacattggccaagtgtgtctttctcattgctgcttcatgcaagaggcctgactcagcagtgggactaatctgttaagggtgttgaatactgaataaggacttgagagagaaaagaaaagcaagttctcatgaaaactgtcagaatctagatggagtcactaatgttaagaaacccgacaaatagaattgggaaaggccagaaagagcgggttctcatgatgtgtgcctgataacaaaaactacaaaaaccaccaccttacacaaagaccatcataatcttacacaaaaatgacttctacaagaacatctgctcagtaactgtccaatctcagactggcatcacccttgttattgctctttatataattatttcaaaacaattatgtaattgtattttttccccatttaaaaacctttgtcttcctttaactccctgaatacacaaatagtttaccatggcatgtacattctcattacaatgctctatcacccaaatatatatcttttctttt

SEQ ID NO: 69994 - DNA, 812 bp, Homo Sapiens
  misc_feature (79)..(113): n is a, c, g, or t
ccatgtatacgatcactatagggcgctaggcgtattgcgaacgacgagcgcagcgagtctatgagcgaggaagcggcgnnnnnnnnnnnnnnnnnnnnnnnnnnnnnnnnnnncagtcgacggtaccggacatatgcccgggaattcggccattacggccgggacacaaccaagggagaaaactattctgtcaaagagacggtgccaaaaggcaaaaacaaaggagctgatggcaaagaaggtagctgtgattggagctggggtcagtggcctaatttctctgaagtgctgtgtggatgagggacttgagcccacttgctttgagagaactgaagatattggaggagtgtggaggttcaaagagaatgtggaagatggccgagcaagtatctatcaatctgtcgttaccaacaccagcaaagaaatgtcctgtttcagtgactttccaatgcctgaagattttccaaacttcctgcataattctaaacttctggaatatttcaggattcttgctaaaacaattggatctgctaaaatatattcagttccagacaactgtccttagtgtgagaaaatgtccagatttctcatcctctggccaatggaaggttgtcactcagagcaacggcaaggagcagagtgctgtctttgacgcagttatggtccgcagtggccaccacattctacctcatatcccactgaagtcatttccaggtatggagaggtccaaaggccaatatttccataggccgcaatacaagcatccagatggatctgagggaaaacgcatcatggtgactggaattgggaaa

SEQ ID NO: 69995 - DNA, 624 bp, Homo Sapiens
  misc_feature (422)..(511): n is a, c, g, or t
acagtgccagtgggcacggcgtgaggattaccaaaagttagaacagatcactggtttacctcggcctgagatcattcagtggtttggtgacacacgctatgccttgaagcatgggcaactaaagtggtttcgggacaacgcagtacctggtgcccctagtttccaagacccagtaattcctacaccaccaccatcaacccgctccttgaacgaaagggctgagacaccacctctgccgatccctccacccccaccggatatacaacccttggagaggtactgggcagcccaccaacagctacgggaaactgatatccctcaattgagtcaggcatcaaggcttagcacccagcaggtgctggattggtttgactctcgattacctcagccagctgaggtggtagtttgtctagatgaagaannnnnnnnnnnnnnnnnnnnnnnnnnnnnnnnnnnnnnnnnnnnnnnnnnnnnnnnnnnnnnnnnnnnnnnnnnnnnnnnnnnnnnnnnnatacaagactgagtggggagctgggggaggggaggtctgttactgaaagatgaaccaacttagtaactgtttaaacaaagaaaccacatttttaaaattaccttgtggcagag

SEQ ID NO: 69996 - DNA, 577 bp, Homo Sapiens
  misc_feature (319)..(332): n is a, c, g, or t
gcgttttattttattttaatagtagtaaaatacttggaataatttttcatattcttgtcattaatattattttgtatttttatgtggaaatatataattttatgacactaattgctaaagtttattttatgttgaattatttttggagctgaaatctttgtaatattaaagcaactagtttctaattcccagtttctgtatagaatcgcacaagtggtttatggagtgtttggattgtaattataaatggttctttgatatgcaaattaatattttcagttgattttattttatattcctaatggggtgttaaagccgnnnnnnnnnnnnnnctaaataaaaagagaacccatgcttttatggacactaggtaaacaccttcagcttaaatttttcgttaaatattttagtttattttattgttatcttccaggtgtctaaatctccagtctgtctgttgtactggtaatttaactctgtaatggaatagtttgctgccaactatttatattaagtaatttttaaatatttgtaatattgttgactgactaataaactattaagttattggaaaaaa

SEQ ID NO: 69997 - DNA, 625 bp, Homo Sapiens
tctcacaatttatgccaaatcaggtactgtattttcatgtattaacacataaccttttgtttgaatactatagttttcagtggacagttgctattccaagaaaattaagcttttgagtactttagcaattcccagcgtattacatacacccagtgataaggttctttgcatgttttgtgttatgtattactctgactctttagagattatataaatcctccaaaagttagacgaaacaagatagtacattatgagtcttaattttatcattgtggaaaaatgtgtactaactcctgattttgttaattttataacataggttgaattttagagtggggtttttataagtaatggaggataaaatgggtgggagaaaatggcacacagcacctgaagaaagatggggcagtgacctctagaactcatgcattgccattggaaagcctgtgttgggcatcgatgtcagatcctgaagaatcacctggaaaaaatcccatcctagaggcaaggaggctacaccaaaccatacactacagtactttgtcacatggttgtccattatcatgtattagagtctaaatgattacttgaataaagaaaaaaaaccacttaactcttaaacaaa

SEQ ID NO: 69998 - DNA, 567 bp, Homo Sapiens
gtgtgcagcatgcagtgtctggagggcagcagcagggggcattcggtctcccatccctcttgttctgggcaccaagcgtaagctgccgtcacctcttcaccagccctaaatatgggtgcccctctcccacagaacctgtctccagagaagattttccacgtcattgtggccccttgttatgacaagaagctggaggctcttcaggaaagccttccccctgctttgcatggctcccggggcgctgactgcgtgttaacatcaggtgaaattgctcaaataatggagcaaggtgacctctcagtgagagatgctgccgtcgacactctgtaagtggcttctctggggagagtcctccggggggcaggacctctcgtcagccctgccagccacctgccaggcccagggctgccctgctttatgacgaggccatgtgaagcactgcgatgcagtcccccaggcccctgccacaaccctcagccaccctatagctgttgaatgggataccattcaccaaggctgccagggagttgaaggtttggcgggcttccatggtgtgattgccaccct

SEQ ID NO: 69999 - DNA, 1318 bp, Homo Sapiens
gctaggtacgaggctgggtggtgaatcggcacgaggcgtcgggggaggacaacaaagggccgcgggcggcgggcagtggtgtcccagtctcccggtgcttccctgaggctgaggcgcccggcctcccgcccgccgcgctccagatgaagtgtgagcactgcacgcgcaaggaatgtagtaagaaaacaaaaactgatgaccaagagaatgtgtcagccgatgcaccgagtccagcccaggaaaatggagagaagggagaattccacaagttggctgatgccaagatatttttgagcgactgcctggcatgtgacagctgtatgactgcagaggaaggagtccaactttcccagcaaaatgccaaggacttcttccgcgttctgaaccttaacaagaaatgtgatacctcaaagcacaaagtgctggtagtgtctgtgtgtcctcaatctttgccttattttgctgctaaattcaacctcagtgtaactgatgcatccagaagactctgtggtttcctcaaaagtcttggggtgcactatgtatttgatacgacgatagctgcggattttagtatcctggagagtcaaaaagaattcgtgcgtcgctatcgccagcacagtgaggaggaacgcaccctgcccatgctgacctctgcctgtcctggctgggtccgatacgccgagcgggtgctgggtcgccccatcactgcccacctctgcaccgccaagtccccccagcaggtcatgggctctttggtgaaggattatttcgccagacagcagaacctgtctccagagaagattttccacgtcattgtggccccttgttatgacaagaagctggaggctcttcaggaaagccttccccctgctttgcatggctcccggggcgctgactgcgtgttaacatcaggtgaaattgctcaaataatggagcaaggtgacctctcagtgagagatgctgccgtcgacactctgtttggagacttgaaggaggacaaagtgacgcgccatgatggagccagctcagacgggcacctggcacacatcttcagacatgcggccaaggagctgttcaacgaggatgtggaggaggtcacttaccgagccctgagaaacaaagacttccaagaggtcacccttgagaagaacggagaggtggtgttacgctttgctgcagcctatggctttcgaaacatccagaacatgatcctgaagcttaagaagggcaagttcccattccactttgtggaggtctcgcctgtgctggaggatgcttaaatggcagaggcaagccagactcagaccgacatgcggaa

SEQ ID NO: 70000 - DNA, 794 bp, Homo Sapiens
acggcagtactactacggtcctaaggtagcgaggcctgggtggcgaattcggcacgaggggaaagccttccccctgctttgcatggctcccggggcgctgactgcgtgttaacatcaggtgaaattgctcaaataatggagcaaggtgacctctcagtgagagatgctgccgtcgacactctgtttggagacttgaaggaggacaaagtgacgcgtcatgatggagccagctcagacgggcacctggcacacatcttcagacatgcggccaaggagctgttcaacgaggatgtggaggaggtcacttaccgagccctgagaaacaaagacttccaagaggtcacccttgagaagaacggagaggtggtgttacgctttgctgcagcctatggctttcgaaacatccagaacatgatcctgaagcttaagaagggcaagttcccattccactttgtggaggtcctcgcctgtgctggaggatgcttaaatggcagaggccaagcccagactccagacggacatgcggataaggccctgctgcggcagatggaaggcatttacgctgacatccctgtgcggcgtccggagtccagtgcacacgtgcaggagctgtaccaggagtggctggaggggatcaactcccccaaggcccgagaggtgctgcataccacgtaccagagccaggagcgtggcacacacagcctggacatcaagtggtgaagtcaggcccaggccttccagctgctcttggggccagagccaagagcctctccagtacagggaggggctgcctg

SEQ ID NO: 70001 - DNA, 910 bp, Homo Sapiens
gtagcgaggcctgggtggcgaattcgcacgaagaagattttccacgtcattgtggccccttgttatgacaagaagctggaggctcttcaagaaagccttccccctgctttgcatggctcccggggcgctgactgcgtgttaacatcaggtgaaattgctcaaataatggagcaaggtgacctctcagtgagagatgctgccgtcgacactctgtttggagacttgaaggaggacaaagtgacgcgtcatgatggagccagctcagacgggcacctggcacacatcttcagacatgcggccaaggagctgttcaacgaggatgtggaggaggtcacttaccgagccctgagaaacaaagacttccaagaggtcacccttgagaagaacggagaggtggtgttacgctttgctgcagcctatggctttcgaaacatccagaacatgatcctgaagcttaagaagggcaagttcccattccactttgtggaggtcctcgcctgtgctggaggatgcttaaatggcagaggccaagcccagactccagacggacatgcggataaggccctgctgcggcagatggaaggcatttacgctgacatccctgtgcggcgtccggagtccagtgcacacgtgcaggagctgtaccaggagtggctggaggggatcaactcccccaaggcccgagaggtgctgcataccacgtaccagagccaggagcgtggcacacacagcctggacatcaagtggtgaagtcaggccagggccttccagctgctcttggggccagagccaagagcctctcagtagagggaggggctgccctgagtggagtattaaagacacttaagaaaaccgctcaatggattactttggtttctccgagttccctgctaccccacagagagagcgt

SEQ ID NO: 70002 - DNA, 851 bp, Homo Sapiens
  misc_feature (41)..(41): n is a, c, g, or t
  misc_feature (47)..(56): n is a, c, g, or t
  misc_feature (168)..(168): n is a, c, g, or t
  misc_feature (263)..(263): n is a, c, g, or t
aatttaaaaaacccccggaatactagagtatacatactttntgcgtnnnnnnnnnntcccattgcagaatcactgagatttctcaattccagtttaccatgagggcaagtttcttttctgtgatagctgtgttttgaaaaaagttgcctgtttagcccatcatctccncaccatcacctcccatggggagatgcttcatcatcattttggatccatgtcttcttgcgtacgtttttctgctttccctacccacttgagaagcnggctgatgctccttaaactgtgatgaaaatacattgtgaagacggttacctgaaaggggcctacaagggaacatctttgccacacaaagacagtacagcttcgctgtgttgaggtttggttctggtaaaatggggacacgtttattttgggggaactcccaactctagccaagtcacacagtaagaaacagggtccagggctaaacgggtgcactctcttgctgctggtatcccccttggtgaacagtcccacaagcagcctgcagattcttctccctacatctcctgtaaggacgaaggagtggtgtaacctgagctccggccctgtggagaccctcatgaggcctgaggctaagaatgaaacagatctttgcttcttccccagattacttacatacgtgcatgccatgcacacactacttcaaacctttctgtagtcttgagtaaaagcatttagcctggaatatgtccaaactctaggaagccaaggggagatggagaaaaataaacaaactaagcacatgatatgtgctatagctcacttcagtatattaacgatggtttaaaaaaataatcaccatggtcaat

SEQ ID NO: 70003 - DNA, 1965 bp, Homo Sapiens
  misc_feature (100)..(134): n is a, c, g, or t
  misc_feature (185)..(267): n is a, c, g, or t
  misc_feature (1424)..(1434): n is a, c, g, or t
  misc_feature (1876)..(1896): n is a, c, g, or t
aaaaagaactgtactagactcaatcattaggcgccgcctcccggtgttttacttagccctgaaagacgagcgcagcgagtcttgagcgaggaagcggcgnnnnnnnnnnnnnnnnnnnnnnnnnnnnnnnnnnncagtcgacggtaccggacatatgcccgggaattcggccattacggccgggnnnnnnnnnnnnnnnnnnnnnnnnnnnnnnnnnnnnnnnnnnnnnnnnnnnnnnnnnnnnnnnnnnnnnnnnnnnnnnnnnnngaaggtcatttcccaagactagcatagggagtatccatttaaaatacattcatcttcctcccatttccgtgctattaatcacttgttagagcaacatgacatgcccagcatcccacttcccgaaaatgtctactccttctactctgagctcttgttgcctagacctcagaaaacaccaattcaccacagtagaaccgggagcagggatagctcagcttctctgaatagcacactttgctcaggtcttaacttgagggcctctccggtactaacatcctgcgatagcttgtcccatgagcacagaagagcctcagtagagtcaagtcctgctgcagctgccccaccccaagtttctatcatttcctctttaaacaaaaaatatgttatcctacacattagtgtcaatccaatggttgtctcttatctgtctaaatagcaaaatcatgaaaatcagctgttttatttgcataggacaactaacctgtctgtgtaactttgtttttattttaactcttactagaaaatctaatcttaaaacatttgaattctaaacatgtaaaatgtgacagcctgcaattttgtagacagtgaagtaatggctgctatttataaatggaacatctatcaaaataagtaactgtttataaaattcagtttttgtagggttttccaaggaaaaatcaccttggttgaatgtttctcactcattaaactttgcagaagtgattcatattcagtactgtttttaatcactttttaaaatataaggaccgaatgcaaggaaaccaaagtttattaataatttttatataactaaaataaaatagatgtggagggatctgtgatcatataaaaagggagggttactgaaagaattttagccaatatattgattcagggaaaaggagctgttttataaatgatcattcactgttcctatggttctatgtatctttcaaaccgatacctttactatttaaagagcgtaaatagtgaaagtaagatggtcatacttactgactttatctatttaagtttgatggagataaactatatcttggctagtggctactgtgtctgtgaatgtaaccagtacttctttaagctctattcagtagggttccagccactgcttttttgttgtttctagccactgnnnnnnnnnnncttgtttccttataaaacaggtaataaccaatcattttgtgtttgtatttccattcctttttatttctgcctttgtgtagactgatgattaagtaggcaaactacttctactttcaaagagccccaagggcttaatgaccccatttgtaactgagaaatgattcttgttttagtaatcattctataaatgatactgctggattgattgccgtgggttgatagctggaggaattgttttggacaatactaacatgtgaatttatgtcttagttttatttgcagtcttgctaagtaaaatgagtctttgtatctacttttttattaaagtgaaatttagcaatagttaatattaggtgacataaataaaacatcccagactagtgagttaagtacaagatctctctaaaaataaacagatgaaaatctatccccattatcgatnnnnnnnnnnnnnnnnnnnnngcctacagccgcggccgcaagcttattcccttgtagtgagggttaattttgagcatggcactggccgtc

SEQ ID NO: 70004 - DNA, 748 bp, Homo Sapiens
  misc_feature (180)..(194): n is a, c, g, or t
tttttcacatttcttacttttatttcaacatttaaaatattcacagatggagtattatattcagacatctccatggaagatgtacgaaaacaaagcatacaagcattccacaattacagaattacatatttgtgattatgtgaatgttcaccctacagtttatctggaaaaacacttttnnnnnnnnnnnnnnncttttgagtgtttcactggattaactgccataaaaaatgaactgcaaagaatttcaggagagatacctaaatttaagtacttttactttttaaaaatttcaaacttttatagtattctgctaacatatctcctgtgaggaacacttaatactgaattttcccctcaatagccaagtcagaatatacttatttcatttttcacccaagtctttgtttctaaacgcattatgtagaatagatttgatcgtcacagcatcttgagtagctaatgaggtaggagtattcttaagttcttaggcattaatgaagcaaagcaaaagacaatcaaattacaaagattttcttttgtagtggttgttctttaagtaaaatgctaagagcactggaaattggtcaaatgctactcacattttaaaaacgaagaggaaaaacccattagaaagccctgatacacatagagtctgttaaagggaaaaacctgagtactggaattaaattcattttggcattgtaaggtaaggtatctacgcctaaaaatgccaagttttctgccc

SEQ ID NO: 70005 - DNA, 2575 bp, Homo Sapiens
  misc_feature (2342)..(2346): n is a, c, g, or t
  misc_feature (2348)..(2348): n is a, c, g, or t
  misc_feature (2351)..(2351): n is a, c, g, or t
  misc_feature (2355)..(2356): n is a, c, g, or t
  misc_feature (2360)..(2360): n is a, c, g, or t
  misc_feature (2368)..(2368): n is a, c, g, or t
  misc_feature (2535)..(2535): n is a, c, g, or t
tcaatttgaacgcatgaggaatgggattgatatcctggttggaacaccaggtcgtatcaaagaccacatacagaatggcaaactagatctcaccaaacttaagcatgttgtcctggatgaagtggaccagatgttggatatgggatttgctgatcaagtggaagagattttaagtgtggcatacaagaaagattctgaagacaatccccaaacattgcttttttctgcaacttgccctcattgggtatttaatgttgccaagaaatacatgaaatctacatatgaacaggtggacctgattggtaaaaagactcagaaaacggcaataactgtggagcatctggctattaagtgccactggactcagagggcagcagttattggggatgtcatccgagtatatagtggtcatcaaggacgcactatcatcttttgtgaaaccaagaaagaagcccaggagctgtcccagaattcagctataaagcaggatgctcagtccttgcatggagacattccacagaagcaaagggaaatcaccctgaaaggttttagaaatggtagttttggagttttggtggcaaccaatgttgctgcacgtgggttagacatccctgaggttgatttggttatacaaagctctccaccaaaggatgtagagtcctacattcatcgatccgggcggacaggcagagctggaaggacgggggtgtgcatctgcttttatcagcacaaggaagaatatcagttagtacaagtggagcaaaaagcgggaattaagttcaaacgaataggtgttccttctgcaacagaaataataaaagcttccagcaaagatgccatcaggcttttggattccgtgcctcccactgccattagtcacttcaaacaatcagctgagaagctgatagaggagaagggagctgtggaagctctggcagcagcactggcccatatttcaggtgccacgtccgtagaccagcgctccttgatcaactcaaatgtgggttttgtgaccatgatcttgcagtgctcaattgaaatgccaaatattagttatgcttggaaaagaacttaaagagcagctgggcgaggagattgattccaaagtgaagggaatggtttttctcaaaggaaagctgggtgtttgcttttgatgtacctaccgcatcagtaacagaaatacaggagaaatggcatgattcacgacgctggcagctctctgtggccacagagcaaccagaactggaaggaccacgggaaggatatggaggcttcaggggacagcgggaaggcagtcgaggcttcaggggacagcgggacggaaacagaagattcagaggacagcgggaaggcagtagaggcccgagaggacagcgatcaggaggtggcaacaaaagtaacagatcccaaaacaaaggccagaagcggagtttcagtaaagcatttggtcaataattagaaatagaagatttatatagcaaaaagagaatgatgtttggcaatatagaactgaacattatttttcatgcaaagttaaaagcacattgtgcctccttttgaccacttgccaagtccctgtctctttcagacacagacaagcttcatttaaattatttcatctgatcattatcatttataactttattgttacttcttcatcagtttttccttttgaaaggtgtatgaattcattacatttttattctaatgtattatctgtagattagaagataaaatcaagcatgtatctgcctatactttgtgagttcacctgtctttatactcaaaagtgtcccttaatagtgtccttccctgaaataaatacctaagggagtgtaacagtctctggaggaccactttgagcctttggaagttaaggtttcctcagccacctgccgaacagtttctcatgtggtcctattatttgtctactgagacttaatactgagcaatgttttgaaacaagatttcaaactaatctgggttgtaatacagtttataccagtgtatgctctagacttggaagatgtagtatgtttgatgtggattacctatacttatgttcgttttgatacatttttagcttctcattataaggtgattcatgctttagtgaattcttcatagatagtatatataaaagtacattttaatagaaagccagggttttaaggaatttcacatgtataaggtggctccatagctttatttgtaagtaggctggataaatggtgcttaaatggtaatgtactccacttcttcctattggaagattaacattatttaccaagaaggacttaagggagtaaggggcgcagattagcattgctcaagagtatggnnnnnanaanagannaaanaaaaaaanccctggcggcccgccctcgccccccgaaaaactttccaagaacccttcggttggcggccgggggcccatgaaggaaaggggaaacgtgggcctatacttgttttcccaaagaaaaatccctgggccaatggaaataaggggcttgggaatgttccccccaaataaanaaaaacgccccgggggggagaaacccgaagggttttcttg

SEQ ID NO: 70006 - DNA, 1900 bp, Homo Sapiens
  misc_feature (1356)..(1356): n is a, c, g, or t
gtgaaaattctggatctgttatctgtgaggaggccactccgttgacagttgtgtaaaactctgctgctttccccagctccaacctctctggtcttcaacaacactatcatcagggaaaacgtgggggaagatgaaccagccgtgcaactcgatggagccgagggtgatggacgatgacatgctcaagctggccgtcggggaccaggcccccaggaggaggccgggcagctggccaagcaggagggcatcctcttcaaggatgtcctgtccctgcagctggactttcggaacatcctccgcatagacaacctctggcagtttgagaacttgaggaagctgcagctggacaataacatcattgagaagatcgagggcctggagaacctcgcacacctggtctggctggatctgtctttcaacaacattgagaccatcgaggggctggacacactggtgaacctggaggacctgagcttgttcaacaaccggatctccaagatcgactccctggacgccctcgtcaagctgcaggtgttgtcgctgggcaacaaccggattgacaacatgatgaacatcatctaccttcggcggttcaagtgcctgcggacgctcagcctctctaggaaccctatctctgaaggcagaggattacaagatgttcatctgtgcctaccttcctgacctcatgtacctggactactggcgcattgatgaccacacaaaaaagcttgcggaggctaagcaccagtacagcatcgacgagctgaagcaccaggaagaacctgatgcaggcccaactgggaggaaaagcaggcgcagcggggaggagctagaaaagcacaacactggcgtttgtgggaacacctgaatgggctcctccctgtttgaacagcatgtacgctgaggactcagagggcaacaatctgtcctacctgcctggtgtcggtgagctccttgagacctacaaggacaagtttgtcatcatctgcgtgaatatttttgagtatggcctgaaacagcaggagaagcggaaaacagagcttgacaccttcagtgaatgtgtccgtgaggccatccaggaaaaccaggagcagggcaaacgcaagattgccaaattcgaggagaagcacttgtcgagtttaagtgccattcgagaggagttggaaccgcccaacattgagaagatgatcctagaatgcagtgctgacatcagtgagttgttcgatgcgctcatgacgctggagatgcagctggtggagcagctggaggagactataaacatgtctgaacaggaacattgttgacatggtaggactgtttatcgaaaatgtccaaagcctgatggctcagtgccgngacctggagaatcaccaccacgagaagctcctggagatctctatcagcaccctggagaagattgtcgagggcgacctggacgaggacctgcctaacgacctgcgcgcgctttttgtcgataaagatacgattgttaatgctgtcggggcatcgcacgacatccacctcctgaagattgacaatcgagaagatgagctggtgaccagaatcaactcttggtgtacacgtttaatagacaggattcacaaggatgagatcatgaggaaccgcaagcgcgtgaaggagatcaatcagtacatcgaccacatgcagagcgaactggacaacctggaatgtggcgacatcctagactagatgaatgtcagccacaggagcttcttcaaaacatagcaccagccccagccaggagaaggaagtgcacacgcctcacccgcacctctagagagttgctgggcatctctcaaccgcgatccccaacaccattcttcccccacccctggaaaaacttccaaaagtagagaaaataaaggactcatttcacttt

SEQ ID NO: 70007 - DNA, 969 bp, Homo Sapiens
  misc_feature (67)..(67): n is a, c, g, or t
  misc_feature (105)..(105): n is a, c, g, or t
  misc_feature (249)..(249): n is a, c, g, or t
agtgatgtggtggacaaatggggatgcacccttttcaccggattagcatccactggcaatgttgctnagtacagcagccttgtctgcctcctggctacagtcctnaggagacagtgtagagcacagtgtgccaatgcacaggtgagagcagtaacccagagccagagcctccatgcagagggagagagagtgtgatgcagggccgaggtccgtccgagtgtggggcaggggcagggagtcgaggaggcncaggttcggagcttgtgagtggacggtgctgccagccagaatttccgagctcgccttgggcccttaaagtctgtctcccgccgtctgagagcatcaggcacgcgccgggcctgctcctcccgggcctttgcttaactcggggctgcacgatggctcagtgccgggacctggagaatcaccaccacgagaagctcctggagatctctatcagcaccctggagaagattgtcgagggcgacctggacgaggacctgcctaacgacctgcgcgcgctttttgtcgataaagatacgattgttaatgctgtcggggcatcgcacgacatccacctcctgaagattgacaatcgagaagatgagctggtgaccagaatcaactcttggtgtacacgtttaatagacaggattcacaaggatgagatcatgaggaaccgcaagcgcgtgaaggagatcaatcagtacatcgaccacatgcagagcgaactggacaacctggaatgtggcgacatcctagactagatgaatgtcagccacaggagcttcttcaaaacatagcaccagccccagccaggagaaggaagtgcacacgcctcacccgcacctctagagagttgctgggcatctctcaaccgcgatccccaacaccattcttcccccacccctggaaaaacttccaaaagtagagaaaataaaggactcatttcacatttcccctactcat

SEQ ID NO: 70008 - DNA, 612 bp, Homo Sapiens
gccttatgctgtttcacagttaacttttttgtaagtagaagtacactctaaaataatgacaaaacatatagcacagtaatgcataaaccagtaacctagccatttattaagtactatataccttacatcattttatgtgctagatttttatatgactggcagcacaggtttgtttataccagcatcaccataaacaacatgattatcgtgttgtgctaccttatgatggctatgatgtcactaggtgataggaatttttagctccattataatcgtatggcaccaccaacatatatgcagtccattattgactgaaaagctgttatgtggtacatggctatatttcgaaacagggcctttaaagaggtaactaaggttaagtgaggtcataagggtggggccctaaagccaataggattgatgtccttataagaaggggaagacacaccagggatacaagtgcacagaggaaaggccatataaagacagtgagaaggtgccatctgcaagtcaaggagagaagtctttgaagaaaccaaatctgctgataccttgatcttggattttcagcctccaacactgtgagaaaataaatttctgttgtttaacctg

SEQ ID NO: 70009 - DNA, 1094 bp, Homo Sapiens
  misc_feature (263)..(263): n is a, c, g, or t
  misc_feature (296)..(296): n is a, c, g, or t
tgcaagttgttggactaaaaacgataactacaaaaaatttggctctttcttcacgatgtttgcagttaattgtgcactacattcctgtgatccgggctcattttgaagctcgactaccacctaagcaatatagcatgcttaggcattttgatcatatcactaaggactaccatgatcacatagctgaaatatcagctaagcttgtagcgataatggatagcttatttgacaagctgtaatctaagtatgaagtgaaggctccntgttccttctgcctgtttcaggaatatttgtanagcaaatgacaaaaatgcacgaagctatatttgatctccttccagaagaaacaaacacagatgttatttttaagaattaatgcaagttataaactccacgtgaaaaagcagttatctcacttaaatgtgataaatgatggaggacctcaaaatggggttggtcacagcagatgtagctttttacactggaaatcttcaagccttaaaaggccttaaagatttggacctaaatatggccgaaatttgggagcagaagaggtgatgtcatcctggaaaactgggtagttcatctgaccatgggatgtgtttgttatgaagaaaatctggatgcctgtgattcgagaattgaacctgaaacccaaagtgaactggggtgggggaagggaaaaaggaaagtatcaagtgttgggaaactggattcagtgggatctacaaggaatgtcatttttgtgcatcctacagtgaggagtaactgatcaggtgtctataacatttttcattctctctggaaacagactcaggtttctttggaccaaatccaaaagaacacatagctgtaacacagctgtagttgactagaatgctctgtatactttatattaaaaaatgctttgcatttcttccagtgcaatgaaattcatatggtgtcccaccttatttaatgatggtacaatttaaaatcttagtcaacttctgtagaaagttttctctatgaaagtaaagctgtttgaaaaattattatttttttacagatctttctataaaaaataaacatcttttgattgcttggaaaaaaaa

SEQ ID NO: 70010 - DNA, 664 bp, Homo Sapiens
  misc_feature (231)..(257): n is a, c, g, or t
gcacgagggttaccattctgatgttggagcggccgcggctgtagggtggttgccaatttcctagaacggaatgtgtggggtatagaaaaaggaatgaataagcattgtttttcaaatagggtccttgtaagttattgatgagagggaaaagattgactggggagggcttaaaatgatttgggaaaacaattgcttttgaggctcagtgacaacggcaaagattacaacttnnnnnnnnnnnnnnnnnnnnnnnnnnnggaagttgcacggttattttgcaacacaagggggcggcaaggtccccatttttatcctgtaatactgtatccctaacaaagatttggtctctgctatcttacattattaatgtttctcagatggctgaggggctcgcttcatctgttccgtctgacacttatctcaagtgtgtctgtcattcctaatgttctcaggatgtgctctgataaaaccctccccataacctcagttaataaaaatttacagaagacttctcaaatacctgagttgtttttaatacctgtacaaaggagtaaataggaccctgagtctattaaaatgtatttcaaagtagcatatgattgactgacagtcatgtaaactgtatctttctttttctgatttaataaaaaatacatttacttct

SEQ ID NO: 70011 - DNA, 1126 bp, Homo Sapiens
  misc_feature (214)..(214): n is a, c, g, or t
  misc_feature (770)..(808): n is a, c, g, or t
gtgagtatccttgaatactgtgatggggtgtgatttgccaaattgcataatctttacaagccccacgtgatgaatttcaacaaatgtaataagtatgttttcagtatgactcagttaagaaattgtgtaagatctactgctgtttttcttgtgatccaaatgtgtatctgccatataaataacaagtatagtaccatctcccccgccataaaancgagaggaaaaagagaaacccgtggcactatgtaaataaagtaagcatactttgttgttagtaaatagatgaggcatgcctgggaaatgctcccttggcataaatagcaatcaatcataattagtaaacaggtgtaccaataaaaagaatttacatgataggttaacaaggaccaggaaagtgagtttcctgaaggagttctttgttcctgatcaaagaaattgatacctgttagcattcactgccaccatattttaaggagaaagaactctattggtgtcgtctgagcagccatttaaaaattggaatctaaaggatggttgctgatgtactgtgtggtctggtagaagtggggaaatatgagagatggaggaaaaacttgattatgtcttccatggcatatttactcttactttacttcgtgccaaatcaaatgaaacaagccgtcttacaagtcgttattgcctttaaaaatctgttccgtttttttcccaggtacttaaaatacaagtgccagtaagtggttcttatgtgttttggggggaaaattttattnnnnnnnnnnnnnnnnnnnnnnnnnnnnnnnnnnnnnnncaagatgaaccaaggttttttaaaagaattataggaaacacttcattctttataaaactttctataatgccttatttgaatgttaatcttatgtgctttctaaaaaatgttgtgaaataccaaacttatggattatcactaggttatcaagcatatattagtctttatcagaataaaatgaaatttcataactgtggctattactttgtccttggtccttcacagggcctgctccaccccaccttccttcctgctgcctgatgtctcaatggcttctgaatgactgtgttctaataaatgatcttaaaacagaaaagc

SEQ ID NO: 70012 - DNA, 1606 bp, Homo Sapiens
  misc_feature (1497)..(1531): n is a, c, g, or t
agatccagttcaggatggcgctcaggagcccattgcattccctctccgctgcattatgttgtccattaatgctaacaggtatccaatgtcttggatcaggcacaaggtacgccttcaggaaattcactttccctgttcccttgttaaccctatcagggtaagattcgttttattggtacaccctggttactaatgtataattgattgctaattaatgccaaggagccatttccccaggcatgcctcatctattgtaccttacatctaagtatgccttactgttagtaacatagtgccacgggtttctctgtgtgtcttctcttttttattggcgggggagatggtactataacttgttatttatcagggcagatcacacatttggatcaaaaagaaaaaccagcaagtagatcctaaaacacatttcttaacctgagtcataactgaaaacatagactttaattacattttgttgaaaattcattcaactttggtgcttgtaaaagcacttatgtcaatttttgacacaaatcataaccctcagtacacaggtattttcaaaggaaacaagtcatcttaaagtaatatttttctatatgctaattgatacatctttatagcaaattgaaaattctgagtaaactgaaagtatgcttaacgacaaaataaatacagcatatatggttaacatatacatttcttagtgtaaaggcagcagtgaatttgtgtctcacaataaatctgtaaatccagttgctttctttctggaattttatatagtgtctcaccatgttccacaatgctggaaatgtcttttttggcatcaatctatgcacaaatttctgattacgtattttctccaaatgacatgtaactttttttaacttttccagaaaaatatggaaactttatcaaccacttattaactgaacaaaaagttagattactaccaaatgctcttttaattttgctctaacagatgttttaaaggttcagacatcgctgattttttgaggataactgcatacaacacactagatgatttcaaacgatgcatcttagtatccgaatcatttggcacatccttagtatccaaaataaaatcagtagaaataaaagtaatataattttcaaagaattcatacatactagaagtcttaggaaaagcagcttctaaatgcaaggactaggaggtttgcccatcttactattaatagttacacacatttctcctcatggagtaactgaagctttctggcttctttgtggaactttagtttgtaggaaagcatatacatagggccaaatcttgttggtttctgttccggagaatgtttccagcaccccttttttctggtaatattccaggactggctttgtttggtcttcataagcctttagtctcttgataaccgtctctggtttatcatcctcacgctgaatgagcccggccgtaatggccgaattcccgggcatatgtccggtaccgtcgactgnnnnnnnnnnnnnnnnnnnnnnnnnnnnnnnnnnncggccgcttcctcgctcacaactcgctgcgctcgttcgttcgggctacaaagcggaggcccaatgagctatacag

SEQ ID NO: 70013 - DNA, 394 bp, Homo Sapiens
  misc_feature (309)..(347): n is a, c, g, or t
gttttaagatcatttattagaacagtcattcagaagccattgagacatcaggcagcagaaaggaaggtgggatggagcaggccctgtgaaggaccaagaacaaagtaatagccacagttatgaaatttcattttattctgataaagactaatatatgcttgataacctagtgataatccataagtttggtatttcacaacattttttagaaagcacataagattaacattcaaataaggcattatagaaagttttataaagaatgaagtgtttcctataattcttttaaaaaaccttggttcatcttgnnnnnnnnnnnnnnnnnnnnnnnnnnnnnnnnnnnnnnnaataaaattttccccccaaaacacataagaaccacttactggcactt

SEQ ID NO: 70014 - DNA, 1180 bp, Homo Sapiens
  misc_feature (90)..(90): n is a, c, g, or t
  misc_feature (141)..(141): n is a, c, g, or t
  misc_feature (167)..(167): n is a, c, g, or t
  misc_feature (190)..(190): n is a, c, g, or t
  misc_feature (196)..(380): n is a, c, g, or t
  misc_feature (392)..(392): n is a, c, g, or t
ttacgtcctgcctttgtgctttgtcacatgtttcctgcgtatccctgatctgtgataccgtatacgcccttgaggagtgataccgctccngcagcgaacgacgagcgcagcggtcatgagcgagagcgggagagcgccatnacgcaaccccctctccccgcgcgtgnccgattcatatgcagctgcacgnacagtnnnnnnnnnnnnnnnnnnnnnnnnnnnnnnnnnnnnnnnnnnnnnnnnnnnnnnnnnnnnnnnnnnnnnnnnnnnnnnnnnnnnnnnnnnnnnnnnnnnnnnnnnnnnnnnnnnnnnnnnnnnnnnnnnnnnnnnnnnnnnnnnnnnnnnnnnnnnnnnnnnnnnnnnnnnnnnnnnnnnnnnnntggccctcgagnccaagaattcggcacgagggtaacaagagtatgtggcaaaacatataccacccatagtgcttcacaaaatgcacttctatttagccagcgtttattgtagtaaactattcttaataaaactcactcactgtttataaatgttctggtatgcattctttatagtgaagtgttaatacatcacatcttatttattttagcaaatcagtatattttctgtatttaattataaaaaattaacttagtttttaaaatttatttgcaaatatactttttccatttggcactatggtttgttgcctacctagctgcatctataatgtcagcttatcctaaggctgtccacgtacttaatttacttaagtgttcattttaagtaacgtgctcactgtgtataggaatttgtattttggaggtgcttgatctatctacaaagaaaaattaattaggaattactttattataaaatgctcctagaagtcttaattgtgtttattttttaaaaaaacaaatgttagacttgtgtgcatggaagtaattaaggtacatcattattgtagtttgaaagttgtacatgataagacattttgtttttactgtatgtttttactgaatgatctattccccatcccaaggcaagcatgaataaaattaggttaaacgtagcatgtggcatcgcagtctcttagaatttgtttcatctattttattttattgaatactgtctgtatctttggttatcctgtttgaagaaaaaggacaaataaaacatggccagcaaatacaaaaaa

SEQ ID NO: 70015 - DNA, 1081 bp, Homo Sapiens
  misc_feature (210)..(573): n is a, c, g, or t
  misc_feature (576)..(597): n is a, c, g, or t
  misc_feature (653)..(882): n is a, c, g, or t
  misc_feature (909)..(909): n is a, c, g, or t
  misc_feature (1026)..(1026): n is a, c, g, or t
gatgattgatcaaacatttaagaaataaatctttgacccagaaatatttccttaaaattttttttctaagaaagaaatcataccaattctctacaatagcttccaaaaaaatagaagctaagggaacacatcctaactgactctaggagaccagcattactctaatactaaaatcagataaagacatgacaagaaagggaaaactacagnnnnnnnnnnnnnnnnnnnnnnnnnnnnnnnnnnnnnnnnnnnnnnnnnnnnnnnnnnnnnnnnnnnnnnnnnnnnnnnnnnnnnnnnnnnnnnnnnnnnnnnnnnnnnnnnnnnnnnnnnnnnnnnnnnnnnnnnnnnnnnnnnnnnnnnnnnnnnnnnnnnnnnnnnnnnnnnnnnnnnnnnnnnnnnnnnnnnnnnnnnnnnnnnnnnnnnnnnnnnnnnnnnnnnnnnnnnnnnnnnnnnnnnnnnnnnnnnnnnnnnnnnnnnnnnnnnnnnnnnnnnnnnnnnnnnnnnnnnnnnnnnnnnnnnnnnnnnnnnnnnnnnnnnnnnnnnnnnnnnnnnnnnnnnnnnnnnnnnnnnnnnttnnnnnnnnnnnnnnnnnnnnnngcctacagccgcggccgctccaacatcagaatggtaaccctcgtgccgaattcttnnnnnnnnnnnnnnnnnnnnnnnnnnnnnnnnnnnnnnnnnnnnnnnnnnnnnnnnnnnnnnnnnnnnnnnnnnnnnnnnnnnnnnnnnnnnnnnnnnnnnnnnnnnnnnnnnnnnnnnnnnnnnnnnnnnnnnnnnnnnnnnnnnnnnnnnnnnnnnnnnnnnnnnnnnnnnnnnnnnnnnnnnnnnnnnnnnnnnnnnnnnnnnnnnnnnnnnnnnnnnnnnnnnnnngcacgcgcggggagaggcggttgcgtnatggcgctctccgcttctcgctcctgaccgctgcgctcgtcgtcggctgcggagcgtacagtcatcaaggggtatacgtatcaagatcagggaacgcaggaaacattggcaaagcancaagggcagacgtaaaagcgcgtgcggggttccatagtccgccctgagagacaaa

SEQ ID NO: 70016 - DNA, 2090 bp, Homo Sapiens
  misc_feature (1509)..(1523): n is a, c, g, or t
gtagcgaggcctgggtggcgaattcggcacgagggactagaagactaagggggcgtctccccggcttcctgcggcgtcggtggcgagctgaggtggaggcaggctgcggcagacggcgacagtggcggcggcgccatggcagggcttgcaggatccctgctgccttggtgatcccgggctgacagccagagagcacagcggctcagctcctggagagtgagggttgaagaaagcggagggcagccgcctgcgcccgctggctcccattaggtcggttcctgcagcggtgcccggcagccttggtgaaggccctgcccggcagagatcatgtattgcctccagtggctgctgcccgtcctcctcatccccaagcccctcaaccccgccctgtggttcagccactccatgttcatgggcttctacctgctcagcttcctcctggaacggaagccttgcacaatttgtgccttggttttcctggcagccctgttccttatctgctatagctgctggggaaactgtttcctgtaccactgctccgattccccgcttccagaatcggcgcatgatcccggcgttgtgggcacctaacggcctgccctgttagctttccaaggaagcagaagacgggaggggaggcattgacataggtcataaagcattggagtttcaaatcccgcagcctcgcgggtgtcacattcctgacggcgcctttttggcctgtgatgttttatccttacaatgtgaataatggcactgaccggtgcttttattgtaaagtcctatagtcgtgggtggtcttgtggttgtgtgtgttctgtccccatctaggtcctggctggccgcatgaccacccctctcgcctcattactgtgaggagtctgggtccatcctggtcagctgccccaatgtgacctggggcagataaaatgccagtctcattgtcacctctgtgacccctccttgtcagggtctccttccttcccagaatgttactgactcctcagtccctcttctggtttccctttatttctcttctacccttttccttttttggggagtacctgtccaagacagggctcatttttgcacttatctcgaatttgaagagattgctgacgcccgagagcctcgctttttcatccttctttccttgttcagcaggctagacagaaacatgtcttgactgttagttgtccacaaatcttcagtattttctccacttcatttttaagaaaggaagcaacagatagatgttgctctttcacctgggtgtctgggctcaagctttcccgcccagcctcacttcctttgcccttcctcctgcctttctcaactgtcccaaggagggggcctcattgtgtctcccgtgcatgctctgcagcattgaagtatggtgtgttcacgtagttctagcagtccccagctgagtgagtgggagagtacctgtgtgtttcgtaacggccttgatccccttgatagatgtttggatattttttggtgtgcccnnnnnnnnnnnnnnnacaaatacatgtgtatattccttttaaagaagctttatcgaacgtggtctgattttgaggtttagcaatagctagctatatatggtaggtgccgctacagtttttatttagcatggggattgcagagtgaccagcacactggactccgaggtggttcagacaagacagaggggagcagtggccatcatcctcccgccaggagcttcttcgttcctgcgcatatagactgtacgttatgaagaatacccaggaagactttgtgactgtcacttgctgctttttctgcgcttcagtaacaagtgttggcaaacgagactttctcctggcccctgcctgctggagatcagcatgcctgtcctttcagtctgatccatccatctctctcttgcctgaggggaaagagagatgggccaggcagagaacagaactggaggcagtccatctagggaatgggactgtgaggccatacttgtgaaacgtctggactgctattctagagcttttatttggtgtgttcgttgcacagctgtttgaaatgtttaataaagctttataaactttaaaaaa

SEQ ID NO: 70017 - DNA, 434 bp, Homo Sapiens
gcctactactactactatacgcctgcgagaagacgacagaaggcgagcagtggccatcatcctcccgccaggagcttcttcgttcctgcgcatatagactgtacgttatgaagaatacccaggaagactttgtgactgtcacttgctgctttttctgcgcttcagtaacaagtgttggcaaacgagactttctcctggcccctgcctgctggagatcagcatgcctgtcctttcagtctgatccatccatctctctcttgcctgaggggaaagagagatgggccaggcagagaacagaactggaggcagtccatctagggaatgggactgtgaggccatacttgtgaaacgtctggactgctattctagagcttttatttggtgtgttcgttgcacagctgtttgaaatgtttaataaagctttataaacttta

SEQ ID NO: 70018 - DNA, 2258 bp, Homo Sapiens
  misc_feature (2188)..(2205): n is a, c, g, or t
ctcatcatgtttctattggacagcgctgccctggagcctcggcaagtcatttggcttcttcgcgtctttcatgtgtcttctccagactgtaagcttcctgtggacaaggcctgctccgttcaaggctcaatctccagctcctgacacaccatgcgctaggtgctcagtcactaatggtctcgcgaaggagtgatcagtgagtgaagcaggggctgctgcatgggaaaggtgagcgggctggaaatgggtagtccccgcggcgtctcccagtcgggctcctcccgaggaggaacggaaggagagaccccaggtgtagtcgaggggccgggagggaggaggggagggtcgctccaccctggagcgggaatgctgcagggcagctccgggtcgccaggcggcggtttccaggcaacgaccgaacacagacgcgggctagacgctggcgctgagcaacctgaggcctgcagactccgactgggcccctgggcgggcgggacggaccgcggccaaggcgggggcgctggacggtggcggcatggaggacgacgaggaggagaccaccgcgtccacgctgcggggcaagcccaggccgccgcccgtctcggcgcagtccgccttcagctacatcccgccgcggcgcctgaaccccaaagagcacagctactactaccgcccggcgcggacaggaattatttccctctatgattgtatttttaagaggcgcctagattatgatcagaagttgcaccgagatgacagagaacatgcaaaaagcctgggacttcatgttaacgaagaggaacaggagaggccggttggagtgctgacgtcttctgtctatgggaagcgcatcaatcagcccattgagcccctaaaccgggactttggccgtgccaaccatgtgcaggctgacttctacaggaagaacgacatccccagcctcaaggaacccggctttgggcacattgctccatcctgaagcatccccgtggcccacagggcatgtccgataccctgtggcctggcaagtttgcacagcgagaaggtggcatctggagcctcctttccccttctcatgacgcctaggagcttggctatgcctgtgttgcatctctacagtgggacacatgaacacgttagcagcccccctcaggttgctgggttaggagcctgaccaacaacacctttagtacatgtgaagagtctctgatgtgatgattttcagctggaattatttttgatcaaatgaatctggagaccgattcattgtgagcacctgaataaaatgaaaactttgtttccccttggtaactgttggggttggtttctgttccactggctctctacatttgccaggattctttggggaggcagtcacaggagtgaggtgcagttgcttttcccacgagttaggggaactcctgctgcctgaacacaaacaaccctgacatgttcccttctccaagaggagatgtgatgacaattgtcttttggcacaattgaactctagaaactccatttttgtttttccagaggtctgaatcccaaataacagaattttgtgcagtagggaccaggagccctagtaaggatgggtggccctggtggccagcaatgctcactattactgctcagagagagggggccagtcatgggaagaggctagatttcggtgttcaacaaacttgggtaaaattctggttgctgcattttctagatttgtgttctagggcaagtcatatcatctacatgagcagacatttcctcatatttaaagtggaatttccaaacctagaagagttcatgcgggaggcaatgagctgctggagcacaggcataacacaggtacccagtgtgtgccccacccagtgccccgtcatcacagcaatgacttgactttaaacagtcttctttttggaagcagtcgcttgtaacctaagttggaaatacttactttggagataatttgaaacttacccaagtattaaagtatcatcagctacatttttaatgaatggatcccttggaagaaatcatctctcatctaccatgattaaatttcccacagtttagcagtgaatgggcaggtggcctaattaatttcaatactgatcgctccatcactggttttattgttttgaatatggaaaaaggattctctaaaaataaatgacactgaattccggcnnnnnnnnnnnnnnnnnncctgagcaggcggccgcaagcttattccctttagttgagggttaattttagct

SEQ ID NO: 70019 - DNA, 698 bp, Homo Sapiens
gcagatcacgaccagtttgccctgcttcgcctcacctggagcgagctgtttgtgttgaatgcggcgcagtgctccatgcccctccacgtcgccccgctcctggccgccgccggcctgcatgcttcgcccatgtccgccgaccgggtggtcgcctttatggaccacatacggatcttccaagagcaagtggagaagctcaaggcgctgcacgttgactcagccgagtacagctgcctcaaggccatagtcctgttcacctcagatgcctgtggtctctctgatgtagcccatgtggaaagcttgcaggaaaagtctcagtgtgctttggaagaatacgttaggagccagtaccccaaccagccgacgagattcggaaagcttttgcttcgcctcccttccctccgcaccgtctcctcctcagtcatagagcaattgtttttcgtccgtttggtaggtaaaacccccatcgaaaccctcatccgggatatgttactgtccggcagcagttttaactggccgtatatggcaattcaataaataaataaaataagaagggggagtgaaacagagaaagaaaaggcaaaagactggtttgtttgcttaatttccttctgttaagaaaggatataaaaggatgttacaagtttgctaaaagaagagaggggaagaatttaatggactgtgaatttcaaaaaaaa

SEQ ID NO: 70020 - DNA, 1073 bp, Homo Sapiens
  misc_feature (80)..(80): n is a, c, g, or t
  misc_feature (473)..(484): n is a, c, g, or t
  misc_feature (512)..(523): n is a, c, g, or t
aaacattagcaaattggagaatagttttaatatagtaaatgtaggaagccctttagccatattgaaaacaaatatctttntcaacgttatcttagctctactagttgatcattttgttatatgtatcatgatacttaacctctaccttggtttaatcattttaagatagacctaagtatattacctttattgtaagattcttggaagtattatgtaagttattacatgtaaaagctcttagaatggtgccttgaacgtagcataccacaaatattagctaccattttcactagtgttattttagagaatttgcatgagaggagagtacttatgagtataatgaatattgagaaatcttttatcaacacatccaagatgacttggttggggggcactgtatgccataatgaatgtgagaaagctgtcatttaaatctcatccattattgctataagaggaaattcatactgttnnnnnnnnnnnncccagtggatataatcagtgtattattnnnnnnnnnnnncccagtggatgtaatcagtgtattattgagcacagctgttagagaagtgcgacaaggtgtgaagtgatttttaacgaagtctaagatccaaagtctaataaatctaggaattttttaaaaacttgaatgtattgcttttgaagtaaacaaaataactgatattacagactattttgcaatgaaaaatgatgagagtttgtgatacagactgcttttttcctaccctatatctattttctcttttttagtaacaaatttctgggctgaaaatctcagccttccttgcaggtcaacaagatagaagtgatatttatatgagtaggagatttacgaaatccatttttcctgtctttttttccgtgcctacaatgtggacatctaagctggagctccgttactctcatggggactttgagaatggtatctgggtgttatggatcatggagcagaaatacagaaggagtctgcaaccctgatgactttgtggaacagccatactagctctggtctgcttgcctcctgtttctctttaaataaaattaaacatctt

SEQ ID NO: 70021 - DNA, 759 bp, Homo Sapiens
  misc_feature (362)..(371): n is a, c, g, or t
tctctaatatatatttcccccttctctctgtgatctcttatttatactatattattgtcccatgtactttctaaactgagcttggaacatttagtattcctgcaattggacttcccacttaacaattatacagactttgcttttagaaatagattaggttccaaacagaaagttcaagtgtaacaacaacaataaaaatagattatgaaacaggctataattggctcttttggatttgataggggcaagatgaaaggcaactttcttgcttttgaaatcatgttgggtaagaggtaaggaatccagctacaattttattagtgcttgaaacgggcttccttgaattctccaggccctatcannnnnnnnnncttactaatcagaagagagctggggtagaagccccatgtttgtattccatgaaacacgtcgggttggagtaaaggcaaaaacagctagacacaccaggtgtgtctgtttgacatttataagctggcactcatcaacactcctgtttctcctttctctgggacgtgtggattaaggggtgtgagttgtgggaagaattgccctcgtacctcctggatttattatttttctcaaataccaaccagtaagatcccaaataacttgagaaaaattgtttcctgatctgtccacttctggtgtcaaagattttactcatcttcttagtacattctatgtattttatatgtataattttatacaattaaaaatagatttttgtctagtgaaaat

SEQ ID NO: 70022 - DNA, 1062 bp, Homo Sapiens
tagtcgagccgtgggtgaatcggcacgaggcgacgtcgaatgggatccctactgggcgctacgtcgtcacctctgtgtcctggtggagccataaggtggacaacgcgtactggctgtggactttccaggacgcctcctgcagaagaacaacaaggaccgcttctgccagctgctgtggcggccccggcctcccacactcctgagccaggaacagatcaagcaaattaaaaaggatctgaagaaatactctaagatctttgaacagaaggatcgtttgagtcagtccaaagcctcaaaggaattggtggagagaaggcgcaccatgatggaagatttccggaagtaccggaaaatggcccaggagctctatatggagcagaaaaacgagcgcctggagttgcgaggaggggtggacactgacgagctggacagcaacgtggacgactgggaagaggagaccattgagttcttcgtcactgaagaaatcattcccctcgggaatcaggagtgacctggagcactgtggggacggactccgcctgctgttcccgcgctgagctacaggactcccgagtgtgagccgcggttcctctgttgcagcgcagccgtgtgtgctgtggagccgaggccgtcctgcaggaagccgcgtgactcccgcctcctccctgtgctctctggctctggactgtgactgcgcctggattctgccattgcgacacatttttgtgcctttcagcccctggtgtctgcagtgggggatttaaggcacccgcttccacttctttcttgtttggagttttctgttggaaccgccggcgttggctccgaagacttagcgacgccactggcggcaccttctcctgcgcccagtgatgtttccacggtgcctgtacacagccgagcagcatttccgttgaaggacttgcatccccattgcgggcagtgctggacgtgtcccggagacccaccgggagggcgccgccatgccttgtacccccaccgtgcaggttgtggccggttttctccgcaggttgaacatggaaataaaagcaaacttgtatg

SEQ ID NO: 70023 - DNA, 3010 bp, Homo Sapiens
  misc_feature (130)..(181): n is a, c, g, or t
gagcgaggcctgggtggcgaattcggcacgagggagagtcggaagcgcggcggccgcggagccctgcgagtaggcagcgttgggcccatgcaggacgcggagaacgtggcggtgccctaggcggccgagnnnnnnnnnnnnnnnnnnnnnnnnnnnnnnnnnnnnnnnnnnnnnnnnnnnnaggggctgctgcggcccgcggggcccggcgctccggaggccgcggggaccgaggcctccagtgaggaggtggggatcgcggaggccgggccggagcccgaggtgaggaccgagccggcggccgaggcagaggcggcctccggcccgtccgagtcgccctcgccgccggccgccgaggagctgcccgggtcgcatgctgagccccctgtcccggcacagggcgaggccccaggagagcaggctcgggacgagcgctccgacagccgggcccaggcggtgtccgaggacgcgggaggaaacgagggcagagcggccgaggccgaaccccgggcgctggagaacggcgacgcggacgagccctccttcagcgaccccgaggacttcgtggacgacgtgagcgaggaagaattactgggagatgtactcaaagatcggccccaggaagcagatggaatcgattcggtgattgtagtggacaatgtccctcaggtgggacccgaccgacttgagaaactcaaaaatgtcatccacaagatcttttccaagtttgggaaaatcacaaatgatttttatcctgaagaggatgggaagacaaaagggtatattttcctggagtacgcgtcccctgcccacgctgtggatgctgtgaagaacgccgacggctacaagcttgacaagcagcacacattccgggtcaacctctttacggattttgacaagtatatgacgatcagtgacgagtgggatattccagagaaacagcctttcaaagacctggggaacttacgttactggcttgaagaggcagaatgcagagatcagtacagtgtgatttttgagagtggagaccgcacttccatattctggaatgacgtaaaagaccctgtctcaattgaagaaagagcgagatggacagagacgtatgtgcgttggtctcctaagggcacctacctggctacctttcatcaaagaggcattgctctatgggggggagagaaattcaagcaaattcagagattcagccaccaaggggttcagcttattgacttctcaccttgtgaaaggtacctggtgacctttagccccctgatggacacgcaggatgaccctcaggccataatcatctgggacatccttacggggcacaagaagaggggttttcactgtgagagctcagcccattggcctatttttaagtggagccatgatggcaaattctttgccagaatgaccctggatacgcttagcatctatgaaactccttctatgggtcttttggacaagaagagtttgaagatctctgggataaaagacttttcttggtctcctggtggtaacataatcgccttctgggtgcctgaagacaaagatattccagccagggtaaccctgatgcagctccctaccaggcaagagatccgagtgaggaacctgttcaatgtggtggactgcaagctccattggcagaagaacggagactacttgtgtgtgaaagtagataggactccgaaaggcacccagggtgttgtcacaaattttgaaattttccgaatgagggagaaacaggtacctgtggatgtggtcgagatgaaagaaaccatcatagcctttgcctgggaaccaaatggaagtaagtttgctgtgctgcacggagaggctccgcggatatctgtgtctttctaccacgtcaaaaacaacgggaagattgaactcatcaagatgttcgacaagcagcaggcgaacaccatcttctggagcccccaaggacagttcgtggtgttggcgggcctgaggagtatgaacggtgccttagcgtttgtggacacttcggactgcacggtcatgaacatcgcagagcactacatggcttccgacgtcgaatgggatcctactgggcgctacgtcgtcacctctgtgtcctggtggagccataaggtggacaacgcgtactggctgtggactttccagggacgcctcctgcagaagaacaacaaggaccgcttctgccagctgctgtggcggccccggcctcccacactcctgagccaggaacagatcaagcaaattaaaaaggatctgaagaaatactctaagatctttgaacagaaggatcgtttgagtcagtccaaagcctcaaaggaattggtggagagaaggcgcaccatgatggaagatttccggaagtaccggaaaatggcccaggagctctatatggagcagaaaaacgagcgcctggagttgcgaggaggggtggacactgacgagctggacagcaacgtggacgactgggaagaggagaccattgagttcttcgtcactgaagaaatcattcccctcgggaatcaggagtgacctggagcactgtgcgcagccgtgtgtgctgtggagccgaggccgtcctgcaggaagccgcgtgactcccgcctcctccctgtgctctctggctctggactgtgactgcgcctggattctgccattgcgacacatttttgtgcctttcagcccctggtgtctgcagtgggggatttaaggcacccgcttccacttctttcttgtttggagttttctgttggaaccgccggcgttggctccgaagacttagcgacgccactggcggcaccttctcctgcgcccagtgatgtttccacggtgcctgtacacagccgagcagcatttccgttgaaggacttgcatccccattgcgggcagtgctggacgtgtcccggagacccaccgggagggcgccgccatgccttgtacccccaccgtgcaggttgtggccggttttctccgcaggttgaacatggaaataaaagcaaacttgtatgaa

SEQ ID NO: 70024 - DNA, 978 bp, Homo Sapiens
gagcgaggcctggggtggcgattccggcacgagggcggcggccgcggagccctgcgagtaggcagcgttgggcccatgcaggacgcggagaacgtggcggtgcccgaggcggccgaggagcgcgccgagcccggccagcagcagccggccgccgagccgccgccagccgaggggctgctgcggcccgcggggcccggcgctccggaggccgcggggaccgaggcctccagtgaggaggtggggatcgcggaggccgggccggagcccgaggtgaggaccgagccggcggccgaggcagaggcggcctccggcccgtccgagtcgccctcgccgccggccgccgaggagctgcccgggtcgcatgctgagccccctgtcccggcacagggcgaggccccaggagagcaggctcgggacgagcgctccgacagccgggcccaggcggtgtccgaggacgcgggaggaaacgagggcagagcggccgaggccgaaccccgggcgctggagaacggcgacgcggacgagccctccttcagcgaccccgaggacttcgtggacgacgtgagcgaggaaaaattactgggagatgtactcaaagatcggccccaggaagcagatggaaaccaattccgcgatcgtagtggacaatgtccctcacgggggaccccaccgacttgagaaactcaaaaatgtcatcccacaagatctttttccaagtttggggaaaatcacaaatgattttctatccctgaagaggatggggaagaccaaaagggtatatcttccctgggagtaacgcgtcccctgcccaaggttgggggattgctgtgaaagaaacgccggaacggcctaccaagctttgacacagccaggcaccaccatttcccggggcccaaccctcctcttaccgggattttttggaccaaggcaatatggaccgcaacccggtgggacccaaggtggggaaatatatcccac

SEQ ID NO: 70025 - DNA, 747 bp, Homo Sapiens
  misc_feature (90)..(90): n is a, c, g, or t
tcatcgtaagctgggtcataatttggaacaccacagaggtgaatgctctcatcacacagtatcagagacagatacattgataactccatntgtgggtttaatagaccacaacttccaggcccagccgaatcctgctgaagttaaggatgtattcctggtgcctctggcctatttcctgcatccacaggtccatgaccagcattacgtcacacgtcttggtcaccgttttattaatcatatctttgagtacacaaaccctgaagacggtgtcacttaccagatcaagggaatgacggcaaaccttgcagtgttggtggcctttatcattttggaaaaaaaacccacctttgaggttcaatttaatcttaatgatgtattagcatcctctgaagagttattcctgaaggttcataaaaaagctacaagcaggttatgatttactagagcaagagacaaagaactattcacgaggattctgtgtgtgcttattcgtagaacaacaacagtgccagctgttggaatttgacaggtgtgaatattttttctgcagtatgtagttagaatccttgcctcttttccagttgccttctattgtctgaaaaagtaaaagccattcaaaaatgaaaactatgttcatagtgttgcatgttttcacccacaatatgttaataatatttttcttacacatataataaagaatatctggcacatactaggcccttaataaagattttttgaatatataaa

SEQ ID NO: 70026 - DNA, 1139 bp, Homo Sapiens
  misc_feature (694)..(706): n is a, c, g, or t
agaaaagatgtgtggatcaagcaggaggacttatagcttttgctcagtacattgccgaagattactttatggccaaagcgatagctgaccgaggttggaggtttgcaatgtccactcaagttgcaatgcaaaactctggctcatattcaatttctcagtttcaatccagaatgatcaggtggaccaaactacgaattaacatgcttcctgctacaataatttgtgagccaatttcagaatgctttgttgccagtttaattattggatgggcagcccaccatgtgttcagatgggatattatggtatttttcatgtgtcattgcctggcatggtttatatttgactacattcaactcaggggtgtccagggtggcacactgtgtttttcaaaacttgattatgcagtcgcctggttcatccgcgaatccatgacaatatacatttttttgtctgcattatgggacccaactataagctggagaactggtcgctacagattacgctgtgggggtacagcagaggaaatcctagatgtataactacagctttgtgactgtatataaaggaaaaaagagaagtattataaattatgtttatataaatgcttttaaaaatctaccttctgtagttttatcacatgtatgttttggtatctgttctttaatttatttttgcatggcacttgcatctgtgnnnnnnnnnnnnnacacatctgtagtcttggccaaatgatacactttattttgtggaagtagagaatcaagagaattggttctaggaacctgggttcgttcatcattgttgtttatttttttaaaataaataaataaatatatatatagatgctctgcaacaaactctgtgacagtatccttcagtagagaaagtttcttacttgtgagtacactcttttagaacatttacgggtggcagcagctttgctttagagtttagaagataatagaaggaatgactattcatgtccaaagtgaatggttttgtgcagtgaacaacacatggcgaggtactaactgagaaactttttcatgctttatgcctacctcttgtagttgttgcagagcaaatataaattgtaataagatagctaggccttgcagaaacaaacagaaaaacttaaa

SEQ ID NO: 70027 - DNA, 734 bp, Homo Sapiens
acaggatcgtatcatatactcgagacttaccgcatattacagtggatcgattagtgtcaaaggctttaaacatgtggggcaaagagatccccctgcatttcaggaaagttgtatggggaactgctgacatcatgattggctttgcgcgaggagctcatggggactcctacccatttgatgggccaggaaacacgctggctcatgcctttgcgcctgggacaggtctcggaggagatgctcacttcgatgaggatgaacgctggacggatggtagcagtctagggattaacttcctgtatgctgcaactcatgaacttggccattctttgggtatgggacattcctctgatcctaatgcagtgatgtatccaacctatggaaatggagatccccaaaattttaaactttcccaggatgatattaaaggcattcagaaactatatggaaagagaagtaattcaagaaagaaatagaaacttcaggcagaacatccattcattcattcattggattgtatatcattgttgcacaatcagaattgataagcactgttcctccactccatttagcaattatgtcacccttttttattgcagttggtttttgaatgtctttcactccttttaaggataaactcctttatggtgtgactgtgtcttattcatctatacttgcagtgggtagatgtcaataaatgttacatacacaaataaataaaatgtttattccatggt

SEQ ID NO: 70028 - DNA, 917 bp, Homo Sapiens
acctaaatcacttgagtgtattgagtgatggctatataacatgctgtttggttagatttacagtgtgtttttatgttgcagtttagtttgaaacaacacttaagcacactatttctgttagtgtatatagttttcaaactaacaagcctgcgatccttgttagtgtagtgactgcctctttaggagtatggggccctagggtgtccatatatttttaccccatgggtcattctagtctaaggactactagtagaaccctcaaaaggtaattgctattatagggacttacttattggagactggtaatataataaaatattgaaggagtggccatggtcttagcaggttttagaatgaccttttaactccagtaactacttccttggtattggtatccttgatagagggaatataacatctggcagtaatctcattcaggttatactacctgactaaatttaatcatactttcatgtatttgtttcctcagttggacctaagttactgtatttgtttttcttatttttttattattgtacagtttctttacctttcaagtataaatgtgtatataaaatgtaaatacaaagaattcactaaaaaccactcataacaattactgtgtaaataaaactggtaagcagagtaattacttgaaatgagtcttcattactttggggatatctgttttatttaactgcatctcaaggaaacaaaggaaataatctttgtttttgtttgccaaatttgtcttccaaggaatgcactaagccttcagtctttttagactgacagtactggcagctaaaatattgtactgtatcttctcttgagcccagtatgtaggaaatatgtgataattcacatggtcagtatatggcagtttttgttgttgttgttacagtatattttcaatt

SEQ ID NO: 70029 - DNA, 1283 bp, Homo Sapiens
  misc_feature (736)..(805): n is a, c, g, or t
  misc_feature (981)..(989): n is a, c, g, or t
  misc_feature (1107)..(1170): n is a, c, g, or t
ctcgggaaccgagcactcatcagggaggacagtcaagacctctgtgcccctgtcccagccttcttggcacacacagcagccggtctgctccctggaggccagcggggagcccagcacagtggacatgagcatgccagtgagggagcacaccctgctggaggggctgagcgcaccggcccccatgtcctttgcgccaggggaggctgtcctgaggagtccaggagggtgtcctgaggagtccaaggtgagagctgccagcaccggcagggtgacccccctgtcttccctcttcagcctgcctaccttcagcttactcaactggatttcctcctggtcgctggtcagcaggctggggagtgtcttacagttctcccggacggagcagcttgcagatggacaagcgggacgtggacttcctgtccagccccactcaggccgatcaggacttcaagggccagaccacagactacttataggagcatcttcaaggcggtcacagtgaaaaccttgaaatggccttttttaatatatataaataaatgttaatattatttatgtttattatttgcacagaagagttctagggagatgtatttctaaatgtttcccaggctaatacaggaaacaagaggtaccaaaaaagaaagtttattttttaaaattctaagtagagtatattgaaaagaaaaagaagagccttaacatatataaaagtttaaagaagagtaacacttgnnnnnnnnnnnnnnnnnnnnnnnnnnnnnnnnnnnnnnnnnnnnnnnnnnnnnnnnnnnnnnnnnnnnnngggggggccgcttaaaaatatcccccggggggcccaagtttacccgaccccattttttttgaaaaaaggggcccctaaagggggccgttttaaaacctaggcccgggccgcctttttacaacgccgggccgggaaaaacggttacttgggaatttttggaaaggaaccttactttnnnnnnnnnacatattgggccaacctccctccaaaattttaaggccctagggaaaatataaatttttaaagggaaaaaggggtaaaacaaccgccataggctgccggcttaaaagttttccttcctnnnnnnnnnnnnnnnnnnnnnnnnnnnnnnnnnnnnnnnnnnnnnnnnnnnnnnnnnnnnnnnnaaaattcacggtccccagggcttattttcgggcccccccagccctccaaagttgggtttagggacccataaccagccctaaccaatttttggaaagggggtctacctggcttt

SEQ ID NO: 70030 - DNA, 592 bp, Homo Sapiens
  misc_feature (64)..(79): n is a, c, g, or t
  misc_feature (98)..(358): n is a, c, g, or t
tagggtttcaccatgttggtcaggctgatctcaaaccctgacctcaagtaatccacccacctcnnnnnnnnnnnnnnnngagacagagtttcgctctnnnnnnnnnnnnnnnnnnnnnnnnnnnnnnnnnnnnnnnnnnnnnnnnnnnnnnnnnnnnnnnnnnnnnnnnnnnnnnnnnnnnnnnnnnnnnnnnnnnnnnnnnnnnnnnnnnnnnnnnnnnnnnnnnnnnnnnnnnnnnnnnnnnnnnnnnnnnnnnnnnnnnnnnnnnnnnnnnnnnnnnnnnnnnnnnnnnnnnnnnnnnnnnnnnnnnnnnnnnnnnnnnnnnnnnnnnnnnnnnnnnnnnnnnnnnnnnnnnnnncagccatcatgtgcttatttttaaagcgaggtggatgacaccattcccccagagctgtgttcctcgttggcaacaaaacaaaaccaaaaaaccctaggacttgactcattagaagtgttaatcgatttttaccacgctggaaatgaaggtataaagtcagtctgtgctgtcgtgaaattccaaggagatttggaagtaagatcattattttactggtccctttagaataggacc

SEQ ID NO: 70031 - DNA, 1061 bp, Homo Sapiens
  misc_feature (90)..(90): n is a, c, g, or t
  misc_feature (95)..(95): n is a, c, g, or t
  misc_feature (114)..(114): n is a, c, g, or t
  misc_feature (119)..(119): n is a, c, g, or t
  misc_feature (147)..(147): n is a, c, g, or t
  misc_feature (150)..(150): n is a, c, g, or t
  misc_feature (154)..(154): n is a, c, g, or t
  misc_feature (222)..(222): n is a, c, g, or t
  misc_feature (579)..(579): n is a, c, g, or t
tttctttcttgagcatggatgagtttgtctgcacaccgacccccaccagtggatacagtgactggccatccagtggacttcttcaggtcntgccntgatcccccacctgcagcntgccntgatctgcttttagacacacccagtccntcntgcntggctgggataagcctctcacagttctgtgacagatctgtccccagtcactccagtgtctccagctcnccagagaagctggttgcctcaagctcttctctgcctcataaacggatccagagaagctggttgccttaagctcttccctgcctcgtgttcctgagaaacggattaatagccctttatccccctgcaccctcctgcaggggatggcactttgagccctctggagccctccccttgctgagccttactctcttcagactttctgaatgtacaatgccgttggttgggatttggggactggaagggaccaaggacactgaccccaagctgtcctgcctagcgtccagcgtcttctaggagggtggggtctgcctgtcctggtgtggttggtttggccctgtttgctgtgactaccccccncccctcccgaaccgagggacggctgcctttgtctctgcctcagatgccacctgccccgcccatgctccccatcagcagcatccagactttcaggaagggcagggccagccagtccagaaccgcatccctcagcagggactgataagccatctctcggagggccccctaatacccagtggagtctggttcacaccctggggggtgtgtcactgtgatgggacacgtaggagtccacccttaaaaccagcaccctgtccctcgaggctgccgagtgggtgtgtggactcgggggccttcccacaaaactagcctccggctctgggcccgagacagccgcaggccccagccactgaatgatactggcagcggctggggttttatgaactcctttctggtattttttcccctctatgtacaaatgtatatgttacgtctcaatttttgtgcttaagtaaaaataaaaacattttcagacaaaaaaa

SEQ ID NO: 70032 - DNA, 2267 bp, Homo Sapiens
  misc_feature (1292)..(1292): n is a, c, g, or t
  misc_feature (1967)..(1981): n is a, c, g, or t
  misc_feature (2201)..(2215): n is a, c, g, or t
ggggctgcctcgctcccggaagtggagggtctacacgaagcgccgctgggtctgggtgcccggaggcagcagcgttcgcggagttcgcccgctggcccccgatcaccatgtcggctttcgacaccaaccccttcgcggacccagtggatgtaaaccccttccaggatccctctgtgacccagctgaccaacgccccgcagggcggcctggcggaattcaaccccttctcagagacaaatgcagcgacaacagttcctgtcacccaactccctgggtcctcacagccagcggttctccagccatcagtggaaccaacccagccgaccccccaggccgtggtgtctgcagcccaggcaggcctgctccggcagcaggaagaactggacaggaaagctgccgagctggaacgcaaggagcgggagctgcagaacactgtagccaacttgcatgtgagacagaacaactggccccctctgccctcgtggtgccctgtgaagccctgcttctatcaggatttctccacagagatccctgccgactaccagcggatatgcaagatgctctactatctgtggatgttgcattcagtgactctgtttctgaacctgcttgcctgcctggcctggttctcgggcaacagctccaagggagtggactttggcctctccatcctgtggtttctgatcttcactccctgtgccttcctttgttggtaccgacccatctataaggcctttaggtccgacaactctttcagcttctttgtgttcttctttgtatttttttgtcaaatagggatctacatcatccagttggttggcatccctggcctgggggacagcggttggattgcagccctgtctacactggataatcattccctggccatatcagtcatcatgatggtggtggctggcttcttcaccctctgtgccgtgctctcagtcttcctcctgcagcgggtgcactccctctaccgacggacaggggccagcttccagcaggcccaggaggagttttcccagggcatcttcagcagcagaaccttccacagagctgcttcatctgctgcccaaggagccttccaggggaattagtcctcctctcttctctccccctcagcctttctctcgcctgccttctgagctgcactttccgtgggtgccttatgtggtggtggttgtgcccagcacagacctggcagggttcttgccgtggctcttcctcctccctcagcgaccagctctccctggaacgggagggacagggaattttttccccctctatgtacnaaaaaaaacaaagctctctttccttctctggtgatggtttggtaggattcttttgtctctggaagcagtgggactgaagttctcttcgtcctgtgcacacacagacacccccacacagttgggatcacaggctgacctgggcccatcccagctggagctttctgccagggtcctgggccttgactcccccaccctgcaggcctggcctgaatctggcttcttagacacagcccagtccttcctgcctgggctgggaataagcctctcacaggttctggtggacagatctgttccccaggtcactccagtggtctccaggcttccagagaaggctggttgcctcaagctcttctctgcctcataaacggatccagagaaggctggttgccttaagctcttccctgcctcgtgttcctgagaaacggattaatagccctttatccccctgcaccctcctgcaggggatggcactttgagccctctggagccctccccttgctgagccttactctcttcagactttctgaatgtacaatgccgttggttgggatttggggactggaagggaccaaggacactgaccccaagctgtcctgcctagcgtccagcgtcttctaggagggtggggtctgcctgtcctggtgtggttggtttggccctgtttgctgtgactannnnnnnnnnnnnnngaaccgaggggacggctgcctttgtctctgcctcagatggcacctgccccggcccatgcctccccatcagcaagcattcacaactttccaggaaaaggccagggccaagccagttccagaaaccggcatcccctcagccagggaactgaataagcccattctcctccggaagggcccccctaattacccccagtgggaggtctgggtctccccacccctnnnnnnnnnnnnnnntcaccctggggaattggggaaacaccccaggagagtccccacccctttaaaa

SEQ ID NO: 70033 - DNA, 712 bp, Homo Sapiens
cccctccaggctctggaggatgatgcctcccccagggctctccaagctgggcatttgggcctggtgatgccaacctggataacctgtggcccagcattgactgtccacccagccttgctgttaggcaccatgactccaagatgaagatgtggtccctgcccttgagtgacagcccagggacttaatgtggccatcgggcatcaagcacaaggccatgcaggtgatgatacgtcggaatagaggcaccagccctggtaactgcatcttctccccttgccaccccatggccccggctgaaagcttcggccctcctctgctgtcactcaatgatggggagccctaccccagaagtgtatcccacgagggcatcagggacgcagtgagtgttgctcaagggagtcaggaagagacggcaacgtaaaggatgtggctccatgtccatggtgccccctggtcaacataaggagcgtgggatccgatggaaaggtggagctcagggaaaatgggggtccttgcctctcgtgtaccccctcaaggctgaccccttagatggcccaggaatggcaggtgctacaaaaatggtacccacgtgggcatggaaatggggcagattaggggaccactggactcagaggggagggaagggctcatcagcacccgctcagggagcctgtccctttatgttcccaaataaagggtcctagaagactag

SEQ ID NO: 70034 - DNA, 2036 bp, Homo Sapiens
  misc_feature (1312)..(1402): n is a, c, g, or t
  misc_feature (2020)..(2020): n is a, c, g, or t
tttttaaactaggagaaccaaatctggaagccaaaatgtaggcttagtttgtgtgttgtctcttgagtttgtcgctcatgtgtgcaacagggtatggactatctgtctggtggccccgtttctggtggtctgttggcaggctggccagtccaggctgccgtggggccgccgcctctttcaagcagtcgtgcctgtgtccatgcgctcagggccatgctgaggcctgggccgctgccacgttggagaagcccgtgtgagaagtgaatgctgggactcagccttcagacagagaggactgtagggagggcggcaggggcctggagatcctcctgcagaccacgcccgtcctgcctgtggcgccgtctccaggggctgcttcctcctggaaattgacgaggggtgtcttgggcagagctggctctgagcgcctccatccaaggccaggttctccgttagctcctgtggccccaccctgggccctgggctggaatcaggaatattttccaaagagtgatagtcttttgcttttggcaaaactctacttaatccaatgggtttttccctgtacagtagattttccaaatgtaataaactttaatataaagtagtcctgtgaatgccactgccttcgcttcttgcctctgtgctgtgtgtgacgtgaccggacttttctgcaaacaccaacatgttgggaaacttggctcgaatctctgtgccttcgtctttcccatggggagggattctggttccagggtccctctgtgtatttgcttttttgttttggctgaaattctcctggaggtcggtaggttcagccaaggttttataaggctgatgtcaatttctgtgttgccaagctccaagccccatcttctaaatggcaaaggaaggtggatggccccagcacagcttgacctgaggctgtggtcacagcggaggtgtggagccgaggcctaccccgcagacaccttggacatcctcctcccacccggctgcagaggccagaggcccccagcccagggctcctgcacttacttgcttatttgacaacgtttcagcgactccgttggccactccgagaggtgggccagtctgtggatcagagatgcaccaccaagccaagggaacctgtgtccggtattcgatactgcgactttctgcctggagtgtatgactgcacatgactcgggggtggggaaaggggtcggctgaccatgctcatctgctggtccgtgggacggtgcccaagccagaggctgggttcatttgtgtaacgacaataaacggtacttgtcatttcgggcaacggcannnnnnnnnnnnnnnnnnnnnnnnnnnnnnnnnnnnnnnnnnnnnnnnnnnnnnnnnnnnnnnnnnnnnnnnnnnnnnnnnnnnnnnnnnnccaaccacacctccccccacaaacccaccatagccctccacctgtctcctccgcggcgcccatcggcgcttcgttgaatgcttcggactacaaaaccccgctaaacatcgctaccaaggcccccaaccccgccaacttcccaaaccctcacctccacagacctgctccctccccgacacgcaacctttggctgtgagaatatatacgacatatttgaaacaccccctcccgccgcggagaatgactccacaaccgaatacccacacaccagtgatgcaacccgcccaataccctcggggaatcggcgcgccgaccaccacatcctcacagctcacgcctgtgacacaccactcgcgcaccgaggtctcctcctccaccgcctgctccgctcgctccggaacagtctggtgatccacctcactcaacacgttctccaccacagaacgtccacataatcctcagacgtagccaaaatatatttgatacccccttctccaccactcggcgtccgcgccacacacacggtggaagttctctctctccacaccaactctcctgcgctccactactgagatatcacatgcactcgtcgcgacgatcacgcgcgcaactctcaanacgcaacctgatgatt

SEQ ID NO: 70035 - DNA, 778 bp, Homo Sapiens
aattataaaagaaattcttatccaaatagtaatgttctaattgatcatataagaaagcaaagcatagacattagaattataagtcagcagtggtctgttcaagaacaatcaacatttgtagaaaatagtaggacaaaattaggaaataattatcaccaagaggatctagttcatgactttctattatctcaattagattgctcaatcatcagccttcctatactaaactctgattcaggaccaagaaaggcatagtctgactctggaaatgcgctgttggaagccaaataacatcaatactcttgttctataattgaatatcaaataagacaaattaccattaatttaatgactgtggagttaattgtataccagcatttcagcaaatcatcatcaatagtattacattagcaatttatgcaattaaaagggctttgtaaaactttgaatagattttattgtcgttagtagctgttggaacttcattattatataatgtttttgcaaactttaacttttttctaaattgttaaataaaagaataactatccttaatctaaataattttgctagcaaatcctataaggtattaaacattttaaggtatattattacattgctattttactgtttctcattaacccaaacagtttaaaggcagaattcaacttagaaacaagttgcattttgaaagtttatttgtaatccatttgtttggaattcagaaatgtatttcacataaaaataatcttggaagtaataaattccaaaattttct

SEQ ID NO: 70036 - DNA, 1271 bp, Homo Sapiens
gctggtaccggtccggaattcccgggatatcgtcgacccacgcgtccgagcacctcttcaccaaggagcagctgtttgagcggatgtgcatggccctgggaggacgggcctcggaagcactgtccttcaacgaggtcacttctggggcacaggacgacctgaggaaggtcacccgcatcgcctactccatggtgaagcagtttgggatggcacctggcatcgggcccatctccttccctgaggcgcaggagggcctcatgggcatcgggcggcaccccttcagccaaggcctgcagcagatgatggaccatgaagcaagactgctggtggccaaggcctacagacacaccgagaaggtgctgcaggacaacctggacaagttgcaggcgctggcaaacgcccttctggaaaaggaagtgataaactatgaggacattgaggctctcattggcccgccgccccatgggccgaagaaaatgatcgcaccgcagaggtggatcgacgcccagagggagaaacaggacttgggcgaggaggagaccgaagagacccagcagcctccacttggaggcgaagagccgacttggcccaagtagttgggaggtgttggctgcacgtgcgggtggtccgggaagtgagggctcactcagccaccctgagttgcttttcagctgaggtttgcacttcctctcgcggccctcagtagtccctgcacagtgacttctgagatctgttgattgatgacccttttcatgattttaagtttctctgcagaaactactgacggagtcctgtgtttgtgagtcgtttcccctatggggaaggttatcagtgcttcccgagtgagcatggaacacttcgagttcccagggttatagacagtcgttcccagtgtggctgaggccacccagaggcagcagagcattcagactccaaacagacccctgttcatgccgacgcttgcacgaccgccccagttcctgtggctccctcggaatgctaaggggatcggacatgaaaggaccctgtgagccgattgtcctatctccagcggccctgtcatccagctcactcatcaatggggccagtcaggcccaggcactgggctccggaggactcaccactgccccctgctgccatgtggactggtgcaagttgaggacttcttgctggtctagtcacgcatgcagtgttggggatgccttggtttttactgctctgagaattgttgagatactttactaataaactgtgtagttggaaaatctaaa

SEQ ID NO: 70037 - DNA, 913 bp, Homo Sapiens
  misc_feature (72)..(89): n is a, c, g, or t
ggtaacgacggccagtgccatgctgaaattaaccctcactaaagggaaaaagcttgcggccgcctgctaggnnnnnnnnnnnnnnnnnngctggtagattatacaagggacaactttagtgatgaggcatgtggatgatttggtgggagtaggtatatacttagtggaatggtttattttatggaagagaattcattggaggtgagattgaagtatattgtgaagtgggatttgaacagcacatatgctctggtttgctcaaataactgcagtttatgcttacatctaaattttgtttctgttacctaaacgggagcttctagaattacgaaggccatacctgccacatttataaaataatggttttatccctgcccccaaatcatcaggttcctcgggtttaagagaagtggtctaatagacaggaatagaagttgtggtggaggtgatttgggatagactaggtttccttatgcaagtggatatgagctcctcatagaaaccagacctactgtattagacagtaacctctaacctcacctccaagcccaagtatatggccctgctgggttacctggtgactacatttcccagattcactctaaattcaaggtagtgacccaaataaattgggaaaggagggggtcaaggaggaaaagctgttgaaaatctttctcctatttaagagaaatatatgccctagagctgctccagcacccttggtttctgatttttttaatattgaatatggattagaagaatgaaatcagatgacacctgactgcaaaaatgtttataagcaaatagccttcttacattttggtataaagctgtgaacttcgtaactttgtaaagcaagatataaagcaaatacaagaggaaaataaagtacttttactaattgacggttaaa

SEQ ID NO: 70038 - DNA, 1046 bp, Homo Sapiens
  misc_feature (76)..(95): n is a, c, g, or t
  misc_feature (824)..(846): n is a, c, g, or t
  misc_feature (917)..(930): n is a, c, g, or t
  misc_feature (954)..(963): n is a, c, g, or t
ggttctaacgacggccagtgccatgctgaaattaaccctcactaaagggaaaaagcttgcggccgcctgctcaggnnnnnnnnnnnnnnnnnnnncagagtttcaaaatattctcatctgttaaattaagagtgtctcccatagaaaagcagtggaggccccacagggcaagtacaaaacagaattaaaactcccaagggtcttgtctttacaaaagaaaaggcaggaggcagcccctggacagctggtcatgctggccgctccggttggaccacgttgcataatcctcagtcgcatcatcacaacgtctctgagcgttttgatggggggagaaggggcagtgtagtgtgtatgggaggagaggcccagagggctctctttgcccccttacccccttttttatatcccagaggaaagtcgggggaacctggctacaccttgaaatgaggctatgtgtttcaaacctggggacggggtaagagaggatctgtgctttgagcaacctgagccagaggcagaggggtgttggaggggtaaggggaggatgcatgatgcttattgctttgtacctttcactgggaaggagggcagcagccaacagtagctcacaggtttgtaaactgagcctgttggctttaagaagggaggcaatgaaatcgaattaaatataaaagagtcatttgtgcaaaaataacttaaacaaataaaagacctggggaagggggtgttccccttagcgcctggtggggaaagggccatataccatccccccaggccttttcagtgacatggcttcgggggggcggtggggtgtgcgtgggcgnnnnnnnnnnnnnnnnnnnnnnngcgtctgttgggttgttcctttctcgctcgcatcttgcttctgttttttatttgcctctcactgccctcannnnnnnnnnnnnngtggcttgttggctggtatcatcnnnnnnnnnncttctacccccttttgcttgtcccactccctatgttctgatttttgccctgcttcttctggtgtgttgcatctcttctcttcc

SEQ ID NO: 70039 - DNA, 505 bp, Homo Sapiens
agcaatagctcccgccaggacattaccttggaacccagccctacagcccgagcagctgtccctctgcctccccgggcccgccctggccgtcctgccaaaaacaagaggaggaaactggccccatagcagccatacctggagctggatctgaccctgattggggagagctgagtgctgagccttgggagcccctgccagccacctgcacctgtggacagtggccaacaggctcagtttacaaacctgtgagctactgttggctgctgccctccttcccagtgaaagagacgttgtgatgatgcgactgaggattatgcaacgtggtccaaccggagcggccagcatgaccagctgtccaggggctgcctcctgccttttcttttgtaaagacaagacccttgggagttttaattctgttttgtacttgccctgtggggcctccactgcttttctatgggagacactcttaatttaacagatgagaatataaagaaaatctggcaaa

SEQ ID NO: 70040 - DNA, 728 bp, Homo Sapiens
  misc_feature (473)..(660): n is a, c, g, or t
  misc_feature (670)..(683): n is a, c, g, or t
tcatgtttctgtattctcctatttcttgtcaaaaactaattatttttttagtgtaataaatcctaagagggaactgatttaagaaacaaggccgccaaacaaaggcagcagttccgactccagcagctgggaaaggaaggaaagtgaccccactttcactcctgcacagcccactggttaccaaaaccaccgtgcaagtcgggatgacagcagggacttctggccaggtgggaaaggtgcctggaagcgggatgcgcctgtgcgtctcttggccatgatgttcttgtgggcatgttattcttggtgctgcctggggtgttgctgagcggacaggctctccagctggagtccatggagaggccagaggctggcggccctgcctgggccttcggagcctcctgcctgcaccctccacctcttctaaaccatgatgtggcacattttggtgttaataaaacacaacacacaaagtnnnnnnnnnnnnnnnnnnnnnnnnnnnnnnnnnnnnnnnnnnnnnnnnnnnnnnnnnnnnnnnnnnnnnnnnnnnnnnnnnnnnnnnnnnnnnnnnnnnnnnnnnnnnnnnnnnnnnnnnnnnnnnnnnnnnnnnnnnnnnnnnnnnnnnnnnnnnnnnnnnnnnnnnnnnnnnnnnnnnnnnnnnnnatttgggggnnnnnnnnnnnnnngaaaaattttttaaaacattttttggggggcggggcccccaaggg

SEQ ID NO: 70041 - DNA, 1073 bp, Homo Sapiens
gggaacgtcaccgagcggcgccgaggccccgggttgagcgggaggcgcgatcggtccggtcggtggctccccgcggcggggccgggcccgatctcgggcgggaaccgagcgcagagccggtagcgggaaggatgaccacgctcacacgacaagacctcaactttggccaagtggtggccgatgtgctctgcgagttcctggaggtggctgtgcatctcatcctctacgtgcgcgaggtctaccccgtgggcatcttccagaaacgcaagaagtacaacgtgccggtccagatgtcctgccacccggagctgaatcagtatatccaggacacgctgcactgcgtcaagccactcctggagaagaatgatgtggagaaagtggtggtggtgattttggataaagagcaccgcccagtggagaaattcgtctttgagatcacccagcctccactgctgtccatcagctcagactcgctgttgtctcatgtggagcagctgctccgggccttcatcctgaagatcagcgtgtgcgatgccgtcctggaccacaaccccccaggctgtaccttcacagtcctggtgcacacgagagaagccgccactcgcaacatggagaagatccaggtcatcaaggatttcccctggatcctggcggatgagcaggatgtccacatgcatgacccccggctgataccactaaaaaccatgacgtcggacattttaaagatgcagctttacgtggaagagcgcgctcataaaggcagctgagggggcacctgccaccccactgatgcccaaactgtcagactttgggggatccccgcctagggcagtgctgcatggctgccctgattccaagtgctcttatcgcctctgtgtgtggatcgcccgccccagcccggggccgctcaggtctgcttggaggatgcctcccccaggagggcagtgagggatgccgcaacctcgacttctcagcctcctggggttccgccggccaacactgtctgtctcaaatactgtgctgtgagttgtttcaataaaggggccccaagggctgggctgagctgagccatc

SEQ ID NO: 70042 - DNA, 695 bp, Homo Sapiens
caagggaaagcaggctatatttattcaagaactagaaaaaggttacaatataaatctatcaaacaaaattcatttttgttatattcaagtaactcatatatattcaaatttagaccaaatcaagacaacaatccaatacacagattattatatagctcaaggagcaaaaaacaacagtcttgtcaatacagactctacataaatacacaaatctcaagttttaatataacatgaacaaatcacaagtacatgtgttagtgttctttctccaaatttctagtagtaaatcttgtatatttagtaaaagcatatagaatgtataaaaccttcaaccacatgtaatgtagactaggaagtgtaaatcaagtagaatgtgaggtttttatatgtaaagatgtacatttcagaaagaacccaacatgaagtaaattaacaaacatattgcaaaggtggtcactcacaaaaatgcttatcatttgcaattgtatacagagaacaaactgcccagaaattaatactggaatcttactgaggggtattatagtaaccaaccttaaaggacacataacttatttggggggttaacatagcagagatcagtgtaaattacataacacatgaatgaaaaaatctacaatatacaatagcaagaggtgagaaaactgaatactgtgaaaaagatttattagtctgta

SEQ ID NO: 70043 - DNA, 817 bp, Homo Sapiens
  misc_feature (63)..(63): n is a, c, g, or t
  misc_feature (81)..(81): n is a, c, g, or t
  misc_feature (88)..(88): n is a, c, g, or t
gcagactgcagagattgcgagagcagacagccctcagaaatggctgcactccagcagtccagntgaagatgagatataaangagtganccagcactgaagcccacgcctggctgaaagatgacgaagcgacacactgtaggcagtgtgagaaggagtctccatttcccggagaaagcaccactgccggaactgtggccacatcttctgcaacacctgctccagcaacgagctagccctgccctcctaccccaagccggtgcgagtgtgcgacagctgccacaccctgctcctgcagcgctgctcctccacggcctcctgaacgtccgtcctcaggagcacagcctcacggacagtgccaaaccctgtgggtctccaggggcttgggaaatgtgttctttcccaagagaatcaaaggaaagaatcaaatttcttgcccggtcactggcactccagaagacagcgtgccggaaccggcagctctcacctttctgtgacttgttcggaattaactcctctggatggaaacttccatcttacttggttacatcacggctctggttcagatacaacttcatgattttgctactatcatttttcacttttcaaagaatttaacctattttacagcagttcagttctgctagtgagtagttttcctctcctaccttccttctaaaaacctgattcatgcacagcgtttgacacacatggagtctgccagtgtgccttctctgcttcagacaagagatctgccatttcatgcccttgtgactacctatcattggccctgcaataaaatcatttattttcactctg

SEQ ID NO: 70044 - DNA, 1415 bp, Homo Sapiens
  misc_feature (1372)..(1372): n is a, c, g, or t
attggctcacgtaaatgaagaacagcagcagttaagagcacaaaatgaaacaattcgaaaaggaagcgataagagtctagacataaccgaacaggataccaaagttgagctggagactttacaagcaaactcggcaaggtctggatgaaatgtacagtgatgtgtggaagcagctaaaagaggagaagaaagtccggttggaactggaaaaagaactggagttacaaattggaatgaaaaccgaaatggaaattgcaatgaagttactggaaaaggacacccacgagaagcaggacacactagttgccctccgccagcagctggaagaagtcaaagcgattaatttacagatgtttcacaaagctcagaatgcagagagcagtttgcagcagaagaatgaagccatcacatcctttgaaggaaaaaccaaccaagttatgtccagcatgaaacaaatggaagaaaggttgcagcactcggagcgggcgaggcagggggctgaggagcggagccacaagctgcagcaggagctgggcgggaggatcggcgccctgcagctgcagctctcccagctgcacgagcaatgctcaagcctggagaaagaattgaaatcagaaaaagagcaaagacaggctcttcagcgcgaattacagcacgagaaagacacttcctctctactcagaatggagctgcaacaagtggaaggactgaaaaaggagttgcgggagcttcaggacgagaaggcagagctgcagaagatctgcgaggagcaggaacaagccctccaggaaatgggcctgcacctcagccagtccaagctgaagatggaagatataaaagaagtgaaccaggcactgaagggccacgcctggctgaaagatgacgaagcgacacactgtaggcagtgtgagaaggagttctccatttcccggagaaagcaccactgccggaactgtggccacatcttctgcaacacctgctccagcaacgagctggccctgccctcctaccccaagccggtgcgagtgtgcgacagctgccacaccctgctcctgcagcgctgctcctccacggcctcctgaacgtccgtcctcaggagcacagcctcacggacagtgccaaaccctgtgggtctccaggggcttgggaaatgtgttctttcccaagagaatcaaaggaaagaatcaaatttcttgcccggtcactggcactccagaagacagcgtgccggaaccggcagctctcacctttcctgtgacttggttcggaattaactcctctgggatggaaacttccatcttacttgggttacatcacggctctggttcagatacacttcatgattttgctactatcatttttcacttttcanagaatttacctattttacagcagttcagttctgctagtgagta

SEQ ID NO: 70045 - DNA, 915 bp, Homo Sapiens
  misc_feature (772)..(806): n is a, c, g, or t
  misc_feature (810)..(854): n is a, c, g, or t
tttttttaggttatatcaatttacttcacataagagcataattcaggccttttccatttaataacaaaaacaatctgtacagaaaacccaaaggcaaccacatagcatatgtaaaatgtgcaaatacactttaaaatgcaagttattctatagcatttgcaagatagaatttcactgtaattagggaatctagttcatcctaacttaatagtcttttgcatgtatagacaatgcaattctacaaggcacaactcagcgttgatgctaaagtatgaaacacatcctcagattatttatttgaaaatattaaaatagcatcatgtttattattttttaatgagtcatgagctcatttctaaagcttcataaagcattacactgataacatatgtgtggtcaggacaaactgttccctgaacttaaaaggtgaaggacaagaccccatattattatcctgtattaaaaaaggaaatatacatatatgtacacagacaccccatatcacagacaagaaacttcccataattcaaagggagaccatttccttattagcaaaggtgcgcattacagtatttcatgacagttaaaaattacacacctaccacctgttttggtcaatcttgctaaaaaagacactgaaatagacaattttcttctttaaggtaaagacaatgtctaatttagaaaatcttcctcttgagattgcacagtgaaaggtatccccggccgtaatggccgaattcccgggcatatgtccggtaccgtcgactgnnnnnnnnnnnnnnnnnnnnnnnnnnnnnnnnnnncggnnnnnnnnnnnnnnnnnnnnnnnnnnnnnnnnnnnnnnnnnnnnntacgcgctagcgccctatagtgagtcgtatacgacttgtgttggtgggggggtggtgatta

SEQ ID NO: 70046 - DNA, 575 bp, Homo Sapiens
  misc_feature (240)..(303): n is a, c, g, or t
ttgaggatgaaattgaaagaaaagaaaatattaagccctctctgggaagtaaaaagaatttattagaatctatacctacacattctgatcaggaaaaagaagttaacattaaaaaaccagaagacaatgaaaatctggacgacaaagatgatgacacaactagggtagatgaatccctcaacataaaggtagaagctgaggaagaaaaagcaaaatctggagatgaaacgaataaagaannnnnnnnnnnnnnnnnnnnnnnnnnnnnnnnnnnnnnnnnnnnnnnnnnnnnnnnnnnnnnnnatgatgatgacaacaatgaggaagaggagtttgagtgctatccaccaggcatgaaagtccaagtgcggtatggacgagggaaaaatcaaaaaatgtatgaagctagtattaaagattctgatgtcgaaggtggagaggtcctttacttggtgcattactgcggatggaatgtgagatacgatgaatggattaaagcagataaaatagtaagacctgctgataaaaatgtgccaaagataaaacatcggaagaaaataaagaataaattagac

SEQ ID NO: 70047 - DNA, 712 bp, Homo Sapiens
  misc_feature (42)..(60): n is a, c, g, or t
ccctcaactaaagggaataagcttgcggccgcctgctcaggnnnnnnnnnnnnnnnnnnnaactattaaatctgtttagtaaagacaatttcgctcatacaaaacaacagtttacaacaatcgagtgctggacacaccatctgagacaagggaggcgctgcaggcacccagcgccttcccccatacacaaagacgaccctgggcgcccctccaccacctgcccctgagggagaggaaaggtgaagtattcctgccacctctccctccaagggaagggggagtggggggccatggcacagacagcctaccccagctgctcctcatctgtgctgggggaggcccctcccctcaccggccccgaagctgagttgtttggggtgatggcaaatggctgatgggcaagggggcaaagtcaggacatctttggtgcaaagactccccctgacccaccaggccacacaatggaaatctgagggaagacttcaaaagtggccctgcctttgcccacaaggggtagctggctgatgccccagaacccaggacaaacacaggaaatgcaaaagctctgccaacagaagctgcccaggctcacctacatgagctgggcggtggcccatggagaaatggctaaaaatttaaggaaaataaacaaaaatgggttaataatggcaagaaggggaagtagagaggtcattcagtagatgagtgcctc

SEQ ID NO: 70048 - DNA, 303 bp, Homo Sapiens
ggatgttttctattacctcattcagcaactttatgtttcacaatgactcaatgatgctttatttatattgtttgtactgtaattaaaaccattgacagacatttcactttgcttgttatttcatatgatcttgttttgattaaatatgccagtttgtattttcctgccttgggatttttttgtgtccgctgtacagtattctaagggaaaaagaaaaagaaagatgtgtaaagtaacagagagaggtggctatggtgtagagacctctttctaataaagaaatgaaaatatgtctacaaaaaa

SEQ ID NO: 70049 - DNA, 974 bp, Homo Sapiens
  misc_feature (86)..(86): n is a, c, g, or t
  misc_feature (108)..(108): n is a, c, g, or t
  misc_feature (123)..(123): n is a, c, g, or t
  misc_feature (249)..(249): n is a, c, g, or t
  misc_feature (378)..(378): n is a, c, g, or t
  misc_feature (564)..(564): n is a, c, g, or t
cagatgccgaggcgtttccatgaatggttccctgggacccatactgccctcagtgattgagcttcaggcatcagacctgacttggngttttaatgagtggtgtttttntttgtttataatccnttgcacctcgtccatgctcgagactcaatcttctgtattagcgttagtgacacgcgccctttggtggtaaccggactgtgttgagtgttgcgcgtatgtgcgcacatatgtgtatgtttggagtangttgtttgcttctccgtggatgaaatagaactcctcattgtgtgaccaggaatgttaatccatctttccaaattgtgtgctttacctgttacaagtaaaaccttaaagttgcaggaaacattttttatntcgtaaagaggtaccaactgtcgctgatgtgatatgtcagaactgaagagtaaatctacttgtttaaatgacttgacagtggtagtgctccatttaataacagtaataagtaataaagtgtttttatttgttaaccagtttaagtggatcctgtggtaacttaaactgttgttctcatcccttatnatggggcatttttctttaacaaagaatggtttcagtgaaacaatctagcagagaattaatgtcagaacctttttaaataatagtctgattgatacagtttgtacttatttcatcaagcttttctaagcttaaatattgcatagcttcgagctgtatggactatattatgaaagaatatgtaaagagaacatacagtaatgcacagtccttaatttgtgtataatggaaagttatttacaatataacactgtaaataagaaagcaaagtttatgggaaaattcaatattatctttgtttttgtttaaatatatttttaagataaaggcacaaaaataaaagaagcgtattactgggtatagtatgtgactcctcttctcagactaataaattatcttttgaatccttggtt

SEQ ID NO: 70050 - DNA, 758 bp, Homo Sapiens
gacttatcaaaaatttatttcatataataaattatataatttattttcatctttaaacagtctacaccgaaaacatttttggaaacatcttttccttttggtaaaacaggttagcaggctgacatcagcttcatattctcatggctaaaatcccccacggttatacagttaagcatagcctttctttgtatttctcaagttgacaccacttgataaaaaacaaaacaatataaacatttctagattttgcctaaggccttagctttaactgcagagtagtgagtaggaaattacaaacatatattcattagccttaaacttaccatcttacatgcgcacataccaaaagggcaaaaggaaagtaaaaagtaaggcacaaaaggatgcagtgagtgttaggtctgtttactaagattggccataagagacattaaccaacataatatgacagacaaggaaaaaactgactaatagaaccttttcttaaaaagctgttaatagcatattcaattattatcaaattattcaggttgtgagacttctaaaatgaccaaatttctgtgtatgcaaaactggacttttttcagttacaaaataaggttggcctcaaaaatgcaaaacataacaaaatcatttaagggtctggcagaggttagtacatctcagaaagtgggaaaaggaaacccaactcttatatgcaccaaatgtgtatgtattccaaaaactttctccgagtatgagtcagactcaccagagct

SEQ ID NO: 70051 - DNA, 1020 bp, Homo Sapiens
gcaaaaacaaggtcaaaacacattttaaaaactgctgtaaagagaaaatgcagagaaatgtgcaactgtataattagaattataagagataattcattcataatcaggtggcattttctagagagattttcctgcctgtgtaccggactccatctttgtgtcagagtaacaagccaactgaaagtcgagatgaaagaaaacaaggacagagtgcgtaggagttcccgtcacacacgtttaaggcttttttccccttccaggttcagggttctttcttgggtatatgacaatgagattgtcaatgctttttagggcacactgcctcctcctaacagaaatatcaccttaccctttgtgattaatggtacaatcataatagatatgatgaatccaaatgtggtgagggggaggtctttatatctttttcatatcttttttgttttcttgttgcttatgatctgatgtgtgtcttgtcatatacagaaaaaaaatattttgggtggtattttcaaaaatttgtttagattttgcatgattctaatgaaaatatttgttttatatttaatgtcagtaattgtagtttctattaaagaatatcaatttaacaataattcatcaatatatacttagaaaatagcttaaaaagcagtgacctgaataaatatattcattcattataatggtgtattctttcttttttaatgcaaattgattactttaataccaatcacattgcctttgctctggaaattctgttttattaaaactaagatgagaccaagatagtttgctaaaattgccaaattattttgaatttcagtggaattgattagaagtacagattgttggtattataatttttcatgttaggattgtgtgtttttaacaaatatttaggtaactttctcatcagacagttttaggaaacagtggtttaaagaatatacatgcaaacaattagggtgaagttataaccaaatgaaattgtcattaaccaataaaaagcgctttaacccaaaa

SEQ ID NO: 70052 - DNA, 738 bp, Homo Sapiens
  misc_feature (18)..(18): n is a, c, g, or t
  misc_feature (43)..(43): n is a, c, g, or t
  misc_feature (104)..(162): n is a, c, g, or t
taatcagctcagggtatngccaatctgaaataaaagtggatgngagagtgttccttcagatcaagggtactaaagtccctttcgctgcagtgagtgagaggtannnnnnnnnnnnnnnnnnnnnnnnnnnnnnnnnnnnnnnnnnnnnnnnnnnnnnnnnnncatgttatgtttctccatgtgggcaaagatttgaaatgtaagcttttatttattattttagaatgtgacataatgagcagccacactcgggggaggggaaggttggtaggtaagctgtaacagattgctccagttgccttaaactatgcacatagctaagtgaccaaacttcttgttttgatttgaaaaaagtgcattgttttcttgtccctccctttgatgaaacgttaccctttgacgggccttttgatgtgaacagatgttttctaggacaaactataaggactaattttaaacttcaaacattccacttttgtaatttgttttaaattgttttatgtatagtaagcacaactgtaatctagttttaagagaaaccggtgctttcttttagttcatttgtatttcccttgttactgtaaaagactgtttattaattgtttacagtttgttgcaacagccattttcttgggagaaagcttgagtgtaaagccatttgtaaaaggctttgccatactcattttaatatgtgcctgttgctgttaacttttgatgaataaaaacctatcttttcat

SEQ ID NO: 70053 - DNA, 883 bp, Homo Sapiens
gaaaagataggtttttattcatcaaaaggtaacagcaacaggcacatattaaaatgagtatggcaaagccttttacaaatggctttacactcaagctttctcccaagaaaatggctgttgcaacaaactgtaaacaattaataaacagtcttttacagtaacaagggaaatacaaatgaactaaaagaaagcaccggtttctcttaaaactagattacagttgtgcttactatacataaaacaatttaaaacaaattacaaaagtggaatgtttgaagtttaaaattagtccttatagtttgtcctagaaaacatctgttcacatcaaaaggcccgtcaaagggtaacgtttcatcaaagggagggacaagaaaacaatgcacttttttcaaatcaaaacaagaagtttggtcacttagctatgtgcatagtttaaggcaactggagcaatctgttacagcttacctaccaaccttcccctcccccgagtgtggctgctcattatgtcacattctaaaataataaataaaagcttacatttcaaatctttgcccacatggagaaacataacatgcacagtcacacatgcacaaacatgcacgcaaacacacatccgtacattcacacacaacatacctctcactcactgcagcgaaagggactttagtacccttgatctgaaggacacactctcccatcccacttttatttcagattggcaaataccctgagctgattatggtgttttaaacattccacctttttctcgcatgtgcaggtcaagtgtacagtagtgaaaacaacatgcaatgtcttcactgcagaatcataatacagctaggacattggtgttcttcccctcccaccccaaattaaaaactaa

SEQ ID NO: 70054 - DNA, 982 bp, Homo Sapiens
  misc_feature (177)..(177): n is a, c, g, or t
  misc_feature (197)..(197): n is a, c, g, or t
  misc_feature (227)..(227): n is a, c, g, or t
  misc_feature (277)..(277): n is a, c, g, or t
  misc_feature (295)..(295): n is a, c, g, or t
gcgagcgcacgcacgcttccgcgtgcgtcatatcatgcagcagtccgatgagcgcatggccagcatattgatgccatctgcacccagcttcatttgctccgctgttgtgttgatgtggcgatacattcaccaggaacactagactgatacgattatacgactcactataggaattgnccctcgagccagaaatcgcnacgaggggaactcagccagtggactgtgcnagagaaatcctccactcagaggcagagactgagttaagtcatagtgcccnttaggcatctgcattgtntgcaggggttaagtttcccttccagtgagggctggagggatgaattagctggtaccctgaagccccgcttagctctgacactctgccaacatcctctgattctaggtgtggtgttgactgtcctttcaaggaaaaacttgcaatagagggaaaagccattaaagcagctccctgcttcatcattaagtcctgtcatccctaccagccaatcccagtcaaagaagttatgctttattcacttctgtggaattacaagtgagagacacttttaggacctgatggacaaagcaggagattcactgtcagctttcctggtcctctccttacttctgtgggccttgcaccgtcttagtttacacatctgccaaaggggtagaattacacttctttttacaggtaaatgtcaaggcacaatcagttttcaggaagtgcttcaagaccccaggtgaaatgaaaatgctaagtaccctctgaatggccatgcctgttaccaggtgctgcttcttcagatgatggggagcacttttcagggtgaaattcaggcgagttttgcccaggcctgctgtcttgagtacaaatgtgaatgatcgactgactgcttgttgccaaactggaaatgttctgtagggatttactggcatggtatcattcctagaagaaaaaaagagagaaacttgactgcacatt

SEQ ID NO: 70055 - DNA, 1199 bp, Homo Sapiens
  misc_feature (38)..(38): n is a, c, g, or t
  misc_feature (56)..(56): n is a, c, g, or t
  misc_feature (108)..(108): n is a, c, g, or t
  misc_feature (110)..(110): n is a, c, g, or t
  misc_feature (113)..(113): n is a, c, g, or t
  misc_feature (129)..(199): n is a, c, g, or t
  misc_feature (279)..(279): n is a, c, g, or t
  misc_feature (301)..(301): n is a, c, g, or t
tcataatccagtgcaagacagttccccgactggaagcnggcgtgagccaacccaantatgtgagtggctcactcatagccaccccagctttacatttatgctcccgcntngtntttgtgtgaaatgtgnnnnnnnnnnnnnnnnnnnnnnnnnnnnnnnnnnnnnnnnnnnnnnnnnnnnnnnnnnnnnnnnnnnnnnntgcccctcgaggccaagaattcggcacgatggaaaaagacgattctgactacatagaacaggaagtgggcctcctctttngacaccaatctctgaagattangagattcagaatatacccccctggacaacacggttatcctcaaatctcattccacaatatgctattgcagtccttcaatccaacctttggcctggagcatatgccttctccaatggcaaaaagtgtgaaaatttctacataggctggggtcataagtatagtccagacaattatacacccccagttccaccaccagtttatcaagaataccccagtggaccagaaattacagaaatggatgatcctagtgtggaggaggagcaggctttcagggctgcacaagaagcagttctactcgcagctgagaatgaagaatctgaggaagatgaagatgaggaagatgattatgactaataaacataaaattagcctggttttatgtgacactgatacacacacaccccttatatgggactaattttacacttttctgtgttatgtgtgtatatacatacacatgtaagaaattattcaactgcaaaatctcaatcttgaaaatcaagcttgaaatttcataggtagaaatattagcatttttattgaaagatactcacaggattttccagaggctaaataacatgcaattgcataattgttctgagggttatggataatggaatatgtgtttgtacattcctgtttttaaaagggctcaggtttcacatggtccaggtgaggtaaaacaattaaaataaataaataaatggtctcaggtttaatttgtaatacgacaaacactggaagatataacccacaggaaattcttggaaacatcaatactttttaaagagtgtcaaggggtatgaagacaaaaaatattgatagtcactagagtaatgtattcttaacctttgtaagaactgatctcagcatgtattcttaaacctttgtaattccc

SEQ ID NO: 70056 - DNA, 741 bp, Homo Sapiens
tcaaagaggaccatttcagtaactcaagtgaatgaaagagtttgaatctgctgtggtccttccctgttgaccatttggtaacttataatctgacaaaaactcttgagctgcaacaggccttgccagagggctcaggatgggaaaggaagaaggggataggaaaagaagaggtaattttacatttcccctttaaagtaaattttagccaactcatcattctgaaatgtccctataaagaatgagtcgaactagaccagaagccagcctactccttcttacatagcttctccaacaggggtagcaatgacctgtccacttcaaacacagataaggcctgccatcctcattggttaaaggcacacgtgagactttcagtgggctctgctgagaaggaaggcagcccaggagtcaggtatgcaggcattgcattgtcagtgtctgctctcagagtttacacattcaattgcttccaagggtgaatctcctgctctgtgaatgctatcagaccccaaaggccaaccttgggctgggtctatgtacgttcttccgaagcactgatgatcaaaattgaagacacattcagaggtttgattggttgagattaactggtgtggtggttggtgtatgtatgttttatttttatgtctttgtatgtagttctacataatgcaaattgtgctttctgatggacaagacctcataactgtgattaatatcaataaaaaggggatgttgtggatg

SEQ ID NO: 70057 - DNA, 902 bp, Homo Sapiens
tttttttaaaggcaaagattgacattattgaaggaaaggggatgaggacaactgtgaactcacagtgagccctgtggaaagaagagacagacagagtgtgggtttgttcggaggcctctgctgtcaatggattccaggagcaaggccatttgtcgcgctttccaaatttcttaggcatttattttgataagtttatagccatcatgtttctaagagacttggagacaccagcaaactgctagaactcaaactcttcaattactcaaagaaggagccatttcagttaactcaagtgaatgaaagagttttggaatctgctgtgggtccttccctgttgaccatttggtaacttgtaatctgacaaaaactcttgagctgcaacaggccttgccagagggctcaggatgggaaaggaagaaggggataggaaaagaagaggtaattttacatttcccctttaaagtaaattttagccaactcatcattctgaaatgtccctataaagaatgagtcgaactagaccagaagccagcctactccttcttacatagcttctccaacaggggtagcaatgacctgtccacttcaaacacagataaggcctgctctcagagtttacacattcaattgcttccaagggtgaatctcctgctctgtgaatgctatcagaccccaaaggccaaccttgggctgggtctatgtacgttcttccgaagcactgatgatcaaaattgaagacacattcagaggtttgattggttgagattaactggtgtggtggttggtgtatgtatgttttatttttatgtctttgtatgtagttctacataatgcaaattgtgctttctgatggacaagacctcataactgtgattaatatcaataaaaaggggatgttgtgg

SEQ ID NO: 70058 - DNA, 847 bp, Homo Sapiens
  misc_feature (755)..(780): n is a, c, g, or t
tgaacaacttggggcatgtctgcagaaaacttaaaaagtatgctgagcccttggattaccaccgtcaggcactggtgttgattcctcagaacgcatccacctactctgctattggatatatccacagtctgatgggcaactttgaaaatgctgtggactacttccacacagcccttggtcttaggcgagatgatacattttctgttacaatgcttggtcattgcatcgaaatgtacattggtgattctgaagcttatattggagcagacattaaagacaaattaaaatgttatgactttgatgtgcatacaatgaagacactaaaaaacattatttcacctccgtgggatttcagggaatttgaagtagaaaaacagactgcagaagaaacggggcttacgccattggaaacctcaaggaaaactccagattccagaccttccttggaagaaacctttgaaattgaaatgaatgaaagtgacatgatgttagagacatctatgtcagaccacagcacgtgactccagtcagtggtcctggtcccactgtcccagtgtaggttagtattccttcacatcctctccatggcttaagaatgtcccacttcctaacgtgactccaaactgcatctctacatttaggaacagagacccgccttaagagactggatcgcacacctttgcaacagatgtgttctgattctctgaacctacaaaatagttatacatagtggaataaagaaggtaaaccctccnnnnnnnnnnnnnnnnnnnnnnnnnnggccgcgtatgcggccgcaagcttattccctttagtgaggttaatttagttgcatgcgtcttccaca

SEQ ID NO: 70059 - DNA, 962 bp, Homo Sapiens
cagtcgacggtaccggacatatgcccgggaattcggccattacggccggggaccaataactcaaaactagctgaaaggttcttcagccaagctctgagcattgcaccggaagacccttttgttatgcatgaggtcggcgtggttgcatttcagaatggagaatggaaaacagccgaaaaatggtttcttgatgcttctggaacaaaattaaagcaattgggaacgaggtaacagttgacaaatgggaacctttgttgaacaacttggggcatgtctgcagaaaacttaaaaagtatgctgaggccttggattaccaccgtcaggcactggtgttgattcctcagaacgcatccacctactctgctattggatatatccacagtctgatgggcaactttgaaaatgctgtggactacttccacacagcccttggtcttaggcgagatgatacattttctgttacaatgcttggtcattgcatcgaaatgtacattggtgattctgaagcttatatcggagcagacattaaagacaaattaaaatgttatgactttgatgtgcatacaatgaagacactaaaaaacattatttcacctccgtgggatttcagggaatttgaagtagaaaaacagactgcagaagaaacggggcttacgccattggaaacctcaaggaaaactccagattccagaccttccttggaagaaacctttgaaattgaaatgaatgaaagtgacatgatgttagagacatctatgtcagaccacagcacgtgactccagtcagtggtcctggtcccactgtcccagtgtaggaacagagacccgccttaagagactggatcgcacacctttgcaacagatgtgttctgattctctgaacctacaaaatagttatacatagtggaataaagaaggtaaaccatcaaaaaagagaggcgataagaagagaagaagcgtggt

SEQ ID NO: 70060 - DNA, 1223 bp, Homo Sapiens
  misc_feature (363)..(411): n is a, c, g, or t
ctttgcgtgcggcgatatattatacgttgttgtaaaatctggtaccaaccttccgaactctccataggggagagccttgcaatgatataatccgtggccagagagaaatctgctctcctaaaattccctgataaaacccgcgaataatagtggccccagggcatttatttaaccccagaaaaaacccccattttgtgtcaagtggtgtgcctcgggtttattgggccccccacaaaaagccttctaggcaggaaaatacagactcttgtgggataggggatgtttaaagtatattcccgtaggggtccctaaattttttgcggaatttaaatttctggacacactaaaatttttgcatataannnnnnnnnnnnnnnnnnnnnnnnnnnnnnnnnnnnnnnnnnnnnnnnnccccaacccagattaaataattaaagctggaattggaggctgaatttttatctggagcagccaagtacaggaaagctggtggatctcatggaaataagaatatgacaaagtattcaaaaattaagtaaactttgagacacaaaggtatatttgggaaaatgctctactttcatttacttaagttttctgcagacatgccccaagttgttcaacaaaggttcccatttgtcaactgttacctaaaacatagcaacatcaagcccacgagttatatatgtcactgttcagcctgatttgtttgcactgaattatttcacgccttgcaagctgggctctctcccagtgtgtgccgccagcacaccacaaggccagggtaactgctgttttatctatctccctttctttcctactaggagacttcctgaggactctgttatcattaggacaagtttatccaagagcctatccctgctggagttcaaatgagtatctgcaactcagagctttccctcaaacaccagacctctctatccatctgcctgctaaatacttctgcgtgtaaatgttacaagcactttaagtttagtgcaccacacaccacacccatctctccctggccatcccagcccctgacctcactgcttctgagtgcccctccagtcagtgaatggcacccccaccccctctgacccttccatgaggcacaccagggctggttccttctaattgctaggcataactccaacctatttagtcctcaccttcctcattaacagagtcaaatctgggccccaatcataaaagtctgaccg

SEQ ID NO: 70061 - DNA, 1867 bp, Homo Sapiens
  misc_feature (1221)..(1446): n is a, c, g, or t
  misc_feature (1454)..(1468): n is a, c, g, or t
  misc_feature (1540)..(1540): n is a, c, g, or t
  misc_feature (1589)..(1599): n is a, c, g, or t
  misc_feature (1741)..(1749): n is a, c, g, or t
ccccatctctgttggtccagggaaagcaaggaattttcttttgaggacttataggttgattgcccacaggtcaaactgttggcattgaactcctctcatttcttgccattggattgtttcctaaacgttggataggagaattcgaaattgttgctatttttatgagctgtgcccttgatcaaatctgtgctgagggtctgagtcattttgccaatgtcgtcttcagtttcaacactctgatcagcatgcaggcgaggggcatgtttaatttacttcactaactgctatattctatagctttagacttcatatttcttatccacctttgtctaggctcacgatctttgggcaagggagctttgtcaccgtggttgggctagaacaaatattgagaagtttaccaacacagatgttgagaagtttattgaaaggcactgacattagcagaataagtgatggacattagttgaaccccttcagtgtctatgtgttttattgtattgtctttaactcgttcttgaagcacagatttcagcgagcctttcagctattcagtgccagcggttttccccactcaggaaagatggtgtgagccatacacacagcaggattagacggggagagtttcagctgcagcttctagtttaagaccaaagcccttcctcccgctgctgcatctgtctgagaggggaagctcttgttttccaagctggaaccgtttatgaggaaaactgagcagggtggcaaaatggaaaaggaacaattttctagtttttcctacgcgtgatattgacgcgtgctttttctttgatttgaggtacagcatgtaaataacaaatttccatattcaaaatgatcatattagagtgactgagtgaccttttgattttgaagcagactaaaatctgaccagaccacaatgaaaagtataaaattagaaacttaaattccaagctaaatttcagctttgacccacctaactccagtgaataggtggcagctcagaaacaaggacagcactgctgctgccagagcaagctcacatccagctggcacttcgtgagagctccttcctgccgggcacgtgtgagttcagcgtgggcaagagacttttatgcacattctgtcattcaaaagggaaatgatgccaaccccagatgcagcatgtcctgaatgaatgatctgtaaaatacaataataaaagcttatagtttgagtagnnnnnnnnnnnnnnnnnnnnnnnnnnnnnnnnnnnnnnnnnnnnnnnnnnnnnnnnnnnnnnnnnnnnnnnnnnnnnnnnnnnnnnnnnnnnnnnnnnnnnnnnnnnnnnnnnnnnnnnnnnnnnnnnnnnnnnnnnnnnnnnnnnnnnnnnnnnnnnnnnnnnnnnnnnnnnnnnnnnnnnnnnnnnnnnnnnnnnnnnnnnnnnnnnnnnnnnnnnnnnnnnnngggggcannnnnnnnnnnnnnnaccaaaaaccaaacgaaaacaaccaacgcgggacgggcccccccagggagaacccaaaaccgaaccccaagnccaaaaaagaagacggccggccaaaacgacgggccggcgtggccgcccnnnnnnnnnnncatcccggggagagggaccccattccagccaaaacccgagaggaagcttaaagggcttcccttggattatcacccccccgcgcggaccccgcgcatattctttccttttttattccccccccggcgcaaggattttaagccnnnnnnnnnaaacaattttaaaaacaaaactttccccgcaaagaaccccaccccttccgcggaaaaggggggcaaaagacacttttccttgagaaaggaaaccaccacaccgacaccgcccccggct

SEQ ID NO: 70062 - DNA, 2917 bp, Homo Sapiens
  misc_feature (1953)..(1995): n is a, c, g, or t
cattgtcaaaagcaggtggtaaacgacggcatgtactatacggtcctaaggtagcgaggcctgggttggctgaattctggcacgaggcctagtgagtgctacgggggtggccggagccttgcccgggccgctgccccgtccctggattcggggctggacgcagcaagcggggcgctgtgtccccaagctccccgtcctcggccaggcgggcaccacggcaggggctgagctaccctcatggaagggagaggaccgtaccggatctacgaccctgggggcagcgtgccctcaggagaggcatccgcagcttttgagcgcctagtgaaggagaattcccggctgaaggaaaaaatgcaagggataaagatgttaggggagcttttggaagagtcccagatggaagcgaccaggctccggcagaaggcagaggagctagtgaaggacaacgagctgctcccaccaccttctccctccttgggctccttcgaccccctggctgagctcacaggaaaggactcaaatgtcacagcatctcccacagcccctgcatgccccagtgacaagccagcaccagtccagaagcctccatccagtggcacctcctctgaatttgaagtggtcactcctgaggagcagaattcaccagagagcagcagccatgccaatgcgatggcgctgggccccctgccccgtgaggacggcaacctgatgctgcacctgcagcgcctggagaccacgctgagtgtgtgtgccgaggagccggaccacggccagctcttcacccacctgggccgcatggccctggagttcaaccgactggcatccaaggtgcacaagaatgagcagcgcacctccattctgcagaccctgtgtgagcagcttcggaaggagaacgaggctctgaaggccaagttggataagggcctggaacagcgggatcaggctgccgagaggctgcgggaggaaaatttggagctcaagaagttgttgatgagcaatggcaacaaagagggtgcgtctgggcggccaggctcaccgaagatggaagggacaggcaagaaggcagtggctggacagcagcaggctagtgtgacggcaggtaaggtcccagaggtggtggccttgggcgcagccgagaagaaggtgaagatgctggagcagcagcgcagtgagctgctggaagtgaacaagcagtgggaccagcatttccggtccatgaagcagcagtatgagcagaagatcactgagctgcgtcagaagctggctgatttgcagaagcaggtgactgacctggaggccgagcgggagcagaagcagcgtgactttgaccgcaagctcctcctggccaagtccaagattgaaatggaggagaccgacaaggagcagctgacagcagaggccaaggagctgcgccaaaaggtcaagtacctgcaggatcagctgagcccactcacccgacagcgtgagtaccaggaaaaggagatccagcggctcaacaaggccctggaggaagcactgagcatccaaaccccgccatcatctccaccaacagcatttgggagcccagaaggagcaggggccctcctaaggaaacaggagctggtcacgcagaatgagttgctgaaacagcaggtgaagatcttcgaggaggacttccagagggagcgcagtgatcgtgagcgcatgaatgaggagaaggaagagctgaagaagcaagtggagaagctgcaggcccaggtcaccctgtcaaatgcccagctaaaagcattcaaagatgaggagaaggcaagagaagccctcagacagcagaagaggaaagcaaaggcctcaggagagcgttaccatgtggagccccacccagaacatctctgcggggcctacccctacgcctacccgcccatgccagccatggtgccacaccatggcttcgaggactggtcccagatccgctannnnnnnnnnnnnnnnnnnnnnnnnnnnnnnnnnnnnnnnnnnaactcgcgcctcttccatctgccggaatacacctggcgtctaccctgtggaggggttcgaaatccaaatcagagctcccaagtgatggaccctcccacagccaggcctacagaaccagagtctccaaaaaatgaccgtgaggggcctcagtgagaccagattgtgtcatttggctccaccttcatcttgcagagccagctgatctcagattgccaagaaactagaagccacttgcacggtgtggccagagcctcagctggatgagaggctgagatgggtggccagcttgtataccagtccctgaactgagctgtttacaggactggggaggctccacccagaaggctttcatttgtactctgctgggagtgactgggaaaaactccttccctgctgctgagtggagagaggcctcatccggctttgacccaccatccgttgcagaagcctccaggagcagcaatcctaagagtgggaggcagccaagacccccttccttcaaaacctcccggaagtggtttcaggccctctagttgccatgaccaatttgtgtgtgtgtttaatttttgcttcaagctctgtagcaggacctgccccacgcacacccctacccctctgtgaggagctgtgggaagtgtgggtttgtctccagaacagaagagaatgatggatattctggctctggggccctctccaccaccactcacagtagccttgctgaagccatcacagatgggagaaggccatgccagccacgtccgccgaggggcgccagcctgaagctgccaggccctgaggttcagaccctggaccccatagctggaggcctgtggtgccagaagcccagattagggtggctgtccatccctggatagctatttgcacgaatcatggacataaatccaagttgaagaagatcaac

SEQ ID NO: 70063 - DNA, 689 bp, Homo Sapiens
  misc_feature (107)..(107): n is a, c, g, or t
  misc_feature (114)..(115): n is a, c, g, or t
  misc_feature (117)..(117): n is a, c, g, or t
  misc_feature (223)..(223): n is a, c, g, or t
  misc_feature (229)..(230): n is a, c, g, or t
  misc_feature (235)..(236): n is a, c, g, or t
ctgggggttgcactttccactggggagttgggcaaagatgtcggccagtttcctgggtgcccttcagtccctccaaaaagtatcgagctaaaaaggtgacagtcttncttcatnnanccagaaagagttccagcttaatgtctgctgaatctagaatcttctgactgtatttggggcccagcccacattcttggatgcagggtgcagcagtgtttacaaactncacacnncattnnccagaatagcaggtagaggcactggagctttgattactccagagcccccaacaagcaagatggggcctggctaaggagttgacagtgaccttagtacaggacaaacagctcatttggggctacagttgcttagaggggtcaccttcaccgtagctggtcttcccaactccgcagcgttctctcgttttcagcagaggggtagtgtgacggcaggtaaggtcccagaggtggtggccttgggcgcagccgagaagaaggtgaagatgctggcgcagcagcgcagtgacctgctggaagtgaacaagcagtgggaccagcatttccggtccatgaagcagcagtatgtgcagacagatctctgagttgtgtcagaacctgccttgtatgcagaagcacggtgatgactgggtcttcgttcttgatctatccgccggtgaaccaggactgacagtt

SEQ ID NO: 70064 - DNA, 494 bp, Homo Sapiens
ctcacggcagagtacaaccactgtcagcagaaactcaaggaactggagttggacgtacttaaacacactcagagcataaaatcacagaacaacctacaggaaaagatggttcaggagaaatctaaagttgctgatgcagaggaaaagattttggacctgcagcggaaattagaacatgctcataaagtctgtctcacagacacttgtatttcagagaagcagcagctagaggaaaagataaaagaagcaacacaaaatgaagctaaagtaaagcaacaatatcaagaagaacaacagaagaggaaacttctatatcagaacgtagatgagttacacaggcaagtgagaaccttacaagataaagaaaatctactggaaatgacctgttctcagcaacaatccagaattcagcaacaagaggccctacttaatacaactggaaaatgaaaaaagaaaatatgatgagcagtgcaagaacagcttgacacagaaaa

SEQ ID NO: 70065 - DNA, 657 bp, Homo Sapiens
  misc_feature (117)..(117): n is a, c, g, or t
taccaaaatgcaagaaaagtacagtttcataattacctttagcatcataaagctcttccacagctcaaaaatctaagtacaaatcctctttgaatttatttcagattatgttactcntaaaaggagtactaaaatgatataagtgaagttcagcaaggatttatatgcttaattaatggtctggtacccatttataaaaaaatgactgcaaacacactacatgtcataaattataattgatatacatgtgtatgcctccacagagagctttagtgtagagctttctaaactttggaactgaaagtatatacctattagtgaaactagagtgtattgtaatcttatctttcctaaacagtgtttatattagtctgtcctgggaactgttaatattacacacacagatgcacatgtgtgcaaaatatacacacgtgtgccatggccaaatatatttagaaaaacactatatactgtacgcccctcttggagatttgtaacaacaattatattaatgggtttgagaagtgctgtaatacataaggtagtttaattgtttgacatataatcttgtttcacagcattcttagaaacatgcagttcttagaaactgtttcatggatatggtttgttaaaagttatggtaaccaattacatata

SEQ ID NO: 70066 - DNA, 573 bp, Homo Sapiens
  misc_feature (52)..(70): n is a, c, g, or t
tgaaacagagttttgctccagcctgggtgacaagagcaaaaactctgtctcnnnnnnnnnnnnnnnnnnntcaatgcatataaaatatcacattaacagatgaaagaaaaaaaacacatgatcatctcaatgcagaaaagtatttgacagaatttagcacccttttatagaaaataactagaaatagaaggaaaccactctataataaggccatatgcaaaaatctcacagctaacatactccatggtgaaagactgaaagctccaacatcagcaataaggcagcaatgcccacttttgccacttatagccaacagagtattggaagtgttagccagagaaaataagcaagaaaaagaaacaaatgccatctgaatgggaaaaagcgaagttatctgagtttgcaggtggcgtgatcttaaatgtggaagaccctaaagactaaacacacacaaacctattagaactagtatatgaagtcaacacacagaaatcagttgcatatctatacacttaacagtgaacaatcctaatagaaaatgaggaaaacaatttcatttaaaatagcatcaaa

SEQ ID NO: 70067 - DNA, 563 bp, Homo Sapiens
  misc_feature (41)..(102): n is a, c, g, or t
  misc_feature (299)..(299): n is a, c, g, or t
gcgcctcaccagagtcttgctgtgtggcccaggctggagtnnnnnnnnnnnnnnnnnnnnnnnnnnnnnnnnnnnnnnnnnnnnnnnnnnnnnnnnnnnnnngtgtgagccactgcacctggctgctgagaaatctttgcctacagtgagggaaactactaaagttcctggggaagcaaagtagaatttcataagaacaaaatggatggagaggagaaaacctatggtggctgtgaaggacctgatgccatgtatgtcaaattgatatcatctgatggccatgaatttattgtaaaaangagaacatgcattaacatcaggcaccgaataaaagccatgttgagtggcccaggtcagtttgctgaagaaccgaaaccaatgaggtcaattttagagagataccttcacatgtgctatccgaaagtatgcatgtattttacgtacaaggttcgctacactaacagctccaccgagattcctgaattcccaattgcacctcaaattgcactggagctgctgatggctgcgaacttcttagattgttaaataaaataaattataat

SEQ ID NO: 70068 - DNA, 475 bp, Homo Sapiens
  misc_feature (36)..(36): n is a, c, g, or t
  misc_feature (356)..(356): n is a, c, g, or t
ggcagtacgcggggacccggctgcggtggcatcggnactgacgagaaactactaaagttcctggggaagcaaagtagaatttcataagaacaaaatggatggagaggagaaaacctatggtggctgtgaaggacctgatgccatgtatgtcaaattgatatcatctgatggccatgaatttattgtaaaaagagaacatgcattaacatcaggcacgataaaagccatgttgagtggcccaggtcagtttgctgagaacgaaaccaatgaggtcaattttagagagataccttcacatgtgctatcgaaaagtatgcaatgtattttaccgtacaaggttccgctacacctaacangctccacccgagattccctggaaattccccaattggcacctgaaaattgcactgggaacttgctgatggctggccgaactttctttagattggttaaataaaaataaatttataattaa

SEQ ID NO: 70069 - DNA, 1123 bp, Homo Sapiens
tcaacccttcggcagtactggtgttaatcggcacgagggagcgacacactctgcgtcctcgcctcaccaggaaactactaaagttcctggggaagcaaagtagaatttcataagaacaaaatggatggagaggagaaaacctatggtggctgtgaaggacctgatgccatgtatgtcaaattgatatcatctgatggccatgaatttattgtaaaaagagaacatgcattaacatcaggcacgataaaagccatgttgagtggcccaggtcagtttgctgagaacgaaaccaatgaggtcaattttagagagataccttcacatgtgctatcgaaagtatgcatgtattttacgtacaaggttcgctacactaacagctccaccgagattcctgaattcccaattgcacctgaaattgcactggaactgctgatggctgcgaacttcttagattgttaaataaaataaattataataaactgttaactcttttcagtatttaatacctgtagttcagttagtaactttttcatatatagcatgttgcctgtatgcagttgaactatataaagttcattgcaaagcagattatcttgtttttttgcatagcaatcaaagttgaaatttgtttgctacatcaacaaattaaggacattttcacaaactgagaaataaacaaatatgccaattcgtaggtggttttgccttatcctttgaatgtgacttaaaatcagcaatgatgatatagtaaatactgaaatttaggtgtaaatcaatacgttctacagggaaataatgaggctaagtatttttatgtttttagtggttttttagaaacctaatcttatagccgccattagcattactagagttatgcaaataattgcattataaacatgtttataacttagccaaaacattgatttttataactctccaagtatgagttgaaatttcttatgtcttttgataaactgcagtattctttaagtgtacttgtccttttgtttatggtacaatttaagaagtttatttaaaaaccaattttggaaggtactaggtacaggtttgcagaagaaatgaatgtagccagatggtcagagtaatacatgattagagttct

SEQ ID NO: 70070 - DNA, 696 bp, Homo Sapiens
cggccctgggataggggctgtggcagtacgcggggacccggctgcggtggctgcgggactgacgagaaactactaaagttcctggggaagcaaagtagaatttcataagaacaaaatggatggagaggagaaaacctatggtggctgtgaaggacctgatgccatgtatgtcaaattgatatcatctgatggccatgaatttattgtaaaaagagaacatgcattaacatcaggcacgataaaagccatgttgagtggcccaggtcagtttgctgagaacgaaaccaatgaggtcaattttagagagataccttcacatgtgctatcgaaagtatgcatgtattttacgtacaaggttcgctacactaacagctccaccgagattcctgaattcccaattgcacctgaaattgcactggaactgctgatggctgcgaacttcttagattgttaaataaaataaattataataaactgttaactcttttcagtatttaatacctgtagttcagttagtaactttttcatatatagcatgttgcctgtatgcagttgaactatataaagttcattgcaaagcagattatcttgtttttttgcatagcaatcaaagttgaaatttggttgctacatcaacaaattaaggacattttcacaaactgagaaataaacaaatatgccaattccgtcctaaaa

SEQ ID NO: 70071 - DNA, 843 bp, Homo Sapiens
ttaggctaggtgcgaggccggggtggaatcggcacgagggcaggagaatgtgcataagctggagcctgaggcgtggaaacacgtggaagccgtatatatagacattgcagatcgaagccaagtgctcagcaagggattacaaggcagaggaagacccagcaaaatttaaatctatcaaaacaggccgaggaccctgtgggccccaatgtggaagcaagagcttgtaaaccagaaggactgcccatatatgtgtgcatacaaactggtgaccgtcaagttcaagtggtggggcctgcagaacaaagtggagaacttcatccataagcaagagaggcgtctgtttacaaacttccacaggcagctgttctgttggctcgataagtgggttgacctgaccatggacgacattcgaaggatggaagaagagacgaagagacagctggatgaaatgagacaaaaggacccagtgaaaggaatgacagcagatgactaaagccgcctttcccctctgcactttttgcaagacagtggtcaacaggaagacccagcagctccaccctcccaagtgacaggccattttcggacgcagccgttctgtgcccattcttcaggcaactttcgattccttactgtagctaattctagatgcccttcagtattgtgaacaaatagaccgtctggtgtcacagagcccgcgtgtgcaggagcctgctcctccgagatacgtggcgtgtaggttgctgtagttacagcgcctccgtctctctccattgtgttccgatccatttctgtgtgttcccccaacctttatttccaagtgacattttcagtctttcaaataaa

SEQ ID NO: 70072 - DNA, 1043 bp, Homo Sapiens
gaggaggaaggagatggagaaagaaaaaggggggacgccagcaagccgctctccgacgcacagggcaaggagcactcagtttcctcttcacgggaggtaacaagtagtgtgctgccaaacgatttctttagtactaatcctcccaaggcccccataattcctcattcagggtcaattgagaaagcagaaatacatgaaaaagtggtggaaaggagagaaaacaccgcggaagcgttaccggaaggtttttttgacgaccctgaggtagatgcaagagtacgaaaggttgatgctccaaaagatcagatggacaaagagtgggacgaattccaaaaagccatgaggcaggtcaacactatttccgaagccatagttgccgaagaggatgaggagggacggttggaccgccagattggggagatcgatgagcagatagagtgttaccgacgggtggaaaagctacggaatcgccaggatgaaataaaaaataaacttaaagaaatcctgaccataaaagaactgcagaaaaaggaagaagagaatgctgacagcgatgatgagggggaactacaggatttgttgtctcaggattggagggtgaaaggggcattgttatagggttttaaagacccaaggtttctaacagcctctgctgttgtataaaaagtgctgtctctcagtagtatagcggttacttcatgcctcaagatttgggtacctggattgctaaactggattgttgagataaaatgagccagtgagctacagcactttggaaaatttgtgtaacatgtttttgaggtaaagttgtttttgaaatttctgaagtgttatataccaaaatgccaacttttccacgacagacttaactgtataatttcgttgtaaaatctgtaagttgtaaatattgtacatagttaaatctgtattctgttttgaatttttttaattaatagaaagaccaaccggcaaactttcagatgaatgcttactgtggtatttggaatgtatgtatcttctgaaccctacatcaagttgaaaag

SEQ ID NO: 70073 - DNA, 538 bp, Homo Sapiens
atgagccaccgtgcctggctgatgctggagcttttatgtgacatggtgactcttaaaactggggagggacgtagagatgagagtttcacacaccagcccataggtgggatgtcaagacccatcggaagtgtcgctggcctaagagaagagcacttatttctcaccatggctgatctagaattgttccctgattctgaaagaagtttacactacactggtaagcagtactattagactactgactgtggccttctgtgcatatggaataatgatttctcagatttgtaggcttgaatgtgaatgttattttatcagtaatcagaataaattgcttatattcaggagttattttaaatatttaaatgaaatttattttaggcaccaagcaccacataaactcataataactatttgcaatgcattagcatcactcacggggtaatgaaaacataccttagctgctgtaaaagcaaagtcttccgtgtccgggtgggctgaaagtttttaataaaattttagctaaacatttgtttaagtg

SEQ ID NO: 70074 - DNA, 1030 bp, Homo Sapiens
tgcttcaaagacgtcaaaaaagtgaagacaacccacagaatgagagaaaatttcacaaattgtatatctgataagagacttgtgcctagaatctataaagaatgattaccactcaataataaaaagacaaataaccccattaaaaacaggcaaaggatctgaatagacgtttctccaaagaagataaataaatggccgataaacacttgaaaagatgctcaacatcatttgccatcagggaaaagcaaatcaaaaccatgatgagatgatgagataccacttcacacccactagggtggctataataaaaaagacagatcgtaataactgttggcaaggaggtagtgaaattcgaaccatcatcacacattgctggtgggaatgtaaagtagcacagagctttgaaaaactgtttggcagtttctcaaaaacttagagttaccatatgactcagcaacttccctcgtaggtatatagaagagaaatgaaaacatatgtccacacaaaaacttgtacatgaatgttcatagccgtattattcataatagccaaaagtggaaatcacccaaatggtaaactgatgagtgaataaataaaatgtgctttatacatatgatgaaacattctttgtcaataatgaagaactgatccctgccgcaacatgggggaacttaaaagcatgatgttaagtgaaggaagtcagattcaaaggtccatgattccattataaatggcattccatctgtggaattccatatatggaacgtctagaataggaacacttcctttctatagagacagaaaggaaattaggagttgccaagagaggatggggagactggtgggtgatggctgagaaggtggccgtgtttctttttggggtaacgaaagtgttctgaaattgattgtagtgatggcagtacaactctgaatttactgaaagccattgacttgtacattttaaattggtgacttgtacggtgtacgaattacatctcaataaagctggttttcttttctttgtttcttt

SEQ ID NO: 70075 - DNA, 1490 bp, Homo Sapiens
  misc_feature (890)..(899): n is a, c, g, or t
taactcttggcatgatggaaaatcttttccatgaaatgggacatgccatgcattcaatgctaggacgtactcgttaccaacacgtcactgggaccaggtgccctactgattttgctgaggttccttctattctgatggagtactttgcaaatgattatcgagtagttaaccaatttgccagacattatcagactggacagccactgccaaaaaatatggtgtctcgtctttgtgaatctaaaaaggtttgtgctgcagctgatatgcaacttcaggtcttttatgccactctggatcaaatctaccatgggaagcatcccctgaggaattcaaccacagacattctcaaggaaacacaagagaaattctatggcctaccatatgttccaaatactgcctggcagctgcgattcagccacctcgtggggtatggtgctagatattactcttacctcatgtccagagcggtcgcctccatggtttggaaggagtgttttctacaggatcctttcaacagggctgccggggagcgctatcgcagggagatgctggcccacggtggaggcagggagcccatgctcatggttgaaggtatgcttcagaagtgtccttctgttgatgacttcgtaagtgccctcgtttccgacttggatctggacttcgaaactttcctcatggattctgaataaaagaaacactctacacctcttaaatcaaggtcatgtagataatgactttgttataaatgctacagctgtgagagcttgtttctgatttcattgttcgcttctgtaattctgaaaaactttaaactggtagaacttggaataaataatttgttttaattacgccggccggcgggcgcgctggtcgcgcacggcgcacgccgnnnnnnnnnntgtgggcgcagagggggacgagccttgctgggccgccctcggccccttaaaaaactttttcagggcccttcgcctgtgggggccgcggggccccacagggacaggggacacgggggaagtaagggtgtttcccaaggggagacccctcggtcatgaaaaaaggggctgtggtattctctcccccaataaaaaaaacgccgccgggtgggaaaccccgagggttttttttgagaaaaataccccggtagtgggggctctctggagccgcacttttctgggggtatcttatccaaccgggggagccccccggagcagaggcttcccgaagattcacaataattcgcgccccccgaccgcttggggccccgcccgctgtcccaagagggacgcgggggcggaccagtatagtcctatgggggcccgttttcctcggcgcgcactatgtggggcagacgcctgactgtcaaaagaacggcgtcgagtgtgaagaaacaccgcacgcagacatggtcgccgcgggcccggaggatacgacaaggcagcccctctgcgctcccccccctttcgcggcgtgctatctacgtcatgggt

SEQ ID NO: 70076 - DNA, 1206 bp, Homo Sapiens
cagtcgacggtaccggacatatgcccgggaattcggccattacggccgggggtgatgaaggcagaaatgaatggctcaaaacttgggagaagagcaaaacctgaaggggccctccagaacaatgatgggctttatgatcctgactgcgatgagagcgggctctttaaggccaagcagtgcaacggcacctccacgtgctggtgtgtgaacactgctggggtcagaagaacagacaaggacactgaaataacctgctctgagcgagtgagaacctactggatcatcattgaactaaaacacaaagcaagagaaaaaccttatgatagtaaaagtttgcggactgcacttcagaaggagatcacaacgcgttatcaactggatccaaaatttatcacgagtattttgtatgagaataatgttatcactattgatctggttcaaaattcttctcaaaaaactcagaatgatgtggacatagctgatgtggcttattattttgaaaaagatgttaaaggtgaatccttgtttcattctaagaaaatggacctgacagtaaatggggaacaactggatctggatcctggtcaaactttaatttattatgttgatgaaaaagcacctgaattctcaatgcagggtctaaaagctggtgttattgctgttattgtggttgtggtgatagcagttgttgctggaattgttgtgctggttatttccagaaagaagagaatggcaaagtatgagaaggctgagataaaggagatgggtgagatgcatagggaactcaatgcataactatataatttgaagattatagaagaagggaaatagcaaatggacacaaattacaaatgtgtgtgcgtgggacgaagacatctttgaaggtcatgagtttgttagtttaacatcatatatttgtaatagtgaaacctgtactcaaaatataagcagcttgaaactggctttaccaatcttgaaatttgaccacaagtgtcttatatatgcagatctaatgtaaaatccagaacttggactccatcgttaaaattatttatgtgtaacattcaaatgtgtgcattaaatatgcttccacagtaaaatctgaaaaactgatttgtgattgaaagctgcctttctatttacttgagtcttgtacatacatacttttttatgagctatgaaataaaacattttaaactgaaaaaa

SEQ ID NO: 70077 - DNA, 1420 bp, Homo Sapiens
  misc_feature (507)..(518): n is a, c, g, or t
  misc_feature (869)..(878): n is a, c, g, or t
  misc_feature (1152)..(1152): n is a, c, g, or t
agaaatatttagtgaatttactcaaatgaaggaagtttaaatgatacaggaatgaaaaatattagaaatctatgtacaataaaaagtaaatataaattagccaagtccatggacatttccagttaaacattcatacaaaaacatattcacctttttccttagatagggataacacattcatacatgacatgatgattctggcaaaaaatatcagagatactaaaactattctcaagttttaaaaatggtgcagagagtgtttcaagaacactctacaagaatgtaaacccctgatttaattccatgattttatcatgccagaagcatggttggttttagttttttaaaacagatattggtatcataacacattggcttattaataattaaggcattttacatacacagtatctcagtgtgaacaaaaaatgtttaatattgatttttttcatgttttaaactttcagtcttttcaacataagaaaatagctgcacacatttaagtgnnnnnnnnnnnnaataaaacacaatcttaaaaaagttaatgatgattggtcttggtggttcctagtggtaagtcctgtcttattttttcacatagtataaattatatttttatgcaggattgcattaaaatccagtagttcttaatgttaccaaataaccatataactcccaaatgcagcaaaggtgaacaatcttcatagtgcactttcacctcaatgaaattgaagctgctccttttggatatttttccacttcaatgtgaagcagattgctgggatttcattagtggtttcattacgtggctttttaaaagaaaaaatagttttgatttcttccacagttcacagttctcagacgagacnnnnnnnnnngtaaattatacagttcagggatgttttgaaaaaccaaatgctctttagtagatgaaatctctcaatgtaactgtaataaataagcatctacatccttagctatattaccagtatatcctggaaccaaagtaagatggttttcctgttaccataatccacttaattgttgttttaaaatttgaatatttctcaacaaataagctacaagttcacttatacttctctttctccagaaagttaaagctacattcaatctcatattcctgctgaacanaacttgggccattgtttcatggtcctgagaaacctcagaaaaaaacccactatattttgatgatgggctttctgtctgtgaagaaccagaatcactggagttaaccaaatatgttcgactatcatggtgtaatttttcaggcaggtggcctgcacaagccagttcattttctttatttgccatgtcacagcccccacttccaggggactgtttttttccccggccgtaatggccgaattcccgggcatatgtccggtaccgtcgactg

SEQ ID NO: 70078 - DNA, 1128 bp, Homo Sapiens
ggggcgcgcggccgcgtttgaatggccctgagtgggactcggcccagaagccgagggactctctaggctgccgggcgctggtcgtcagcgccgaggctgggctgaggcgccgcggtaccatgaggcgccggtacttaagagattatggcatcagaaacccacaatgttaaaaaacggaacttttgtaataagattgaggatcatttcattgatcttcctagaaaaaagatctctaatttcactaataagaacatgaaggaggttaagaaatctccaaaacagttggctgcttacataaatagaacagttggacaaactgtgaaaagcccagataaacttcgtaaagtgatctatcgcagaaagaaagttcatcatccctttccaaatccttgttacagaaaaaaacagtcccctggaagtgggggctgtgacatggcaaataaagaaaatgaactggcttgtgcaggccacctgcctgaaaaattacaccatgatagtcgaacatatttggttaactccagtgattctggttcttcacagacagaaagcccatcatcaaaatatagtgggtttttttctgaggtttctcaggaccatgaaacaatggcccaagttttgttcagcaggaatatgagattgaatgtagctttaactttctggagaaagagaagtataagtgaacttgtagcttatttgttgaggatagaagatcttggcgttgtggtagattgccttcctgtgctcaccaattgtttacaggaagaaaaacaatatatctcacttggctgctgtgttgacttgttgcctctagtaaagtcactacttaaaagcaaatttgaagaatatgttatagttggtttaacactggcttcaagcagtcattaaaaggtggtggtcagaactatcatccaaaacagaaattataacatgcatggcaaatattcaaattttaaaacaacaattaagtggattatgggaacaggaaaaccatcttactttggtttccaggatatactgggtaatatagctaagggatgtcagatgcttatttattacagttacattgagagatttcatctataaaagagcatttggtttttcaaaacatcctgaacctgtataatttac

SEQ ID NO: 70079 - DNA, 980 bp, Homo Sapiens
agtatctggtaactttattaatatcataatatctggtcacaatcttttactattatgcatttagaaagttgtctgaatactttatcatgtatataaaattggtaagttattttgaattaaattatttgtgttctacaattcagcctaatttgacaatcgcttctcatcctctaaaccctgtagaactatttactgagctctacggagacacagctacaagcaccacataagagtgtccatgtttttcttgcatgtaaaacagaaattgaaatgcaaaagcagattgccaaatcctaatactcacagaacactaggaaagcaaaaactggcatattatgggaactaaaaatgagaaagtgttccatactatacttattggaacacaatgtacaacaaaagtgctactgagattcatataaaaaattagagttaagcaactggcatgtttcatgtaaacttcaaagcagtaaaatcatatttctagaggcatactataagtgtgattcttttcaagaaatccactgcagaaaatgtggatcaatagaggcaacagaagatgatatgaagtaggacatattacaaattccctaggggattaaaatgaatagaacttttcttaaaagcctaacaaaaaagttaattcctttctaaatgaaataaaagtagacatgtttcatctattcattgctttaactatatttgaatatatgctttgaagttcttatcacagtgtttttttgatttgtaataataattagtaataatatagaaaccaaattaattgttcttaaccaagtgctatgtaacctatttagtgcttactagaggtgcatatatggaactttttaaatttggttctcaattttgaagttttgataactttaaagatgtacccaaaactatacttttttaaaaaacaacgtttggggctaaccaacattacctaattttcccaaaatccctagaacccgtggacttat

SEQ ID NO: 70080 - DNA, 1240 bp, Homo Sapiens
  misc_feature (139)..(148): n is a, c, g, or t
tttcccctttgttctttgactcaaatggtattgagctgtttgttgtatatggaagcataggtgtctatatccttactcttttatataacacaataatggcgttttccttctaatttctcagttgttaacttctttctcnnnnnnnnnnaggatagggccttgctctgtcacctgagctctagtgcagtagtgcaatcacagctcactgcaaccttactcctaggctcaagttaactattcttgatcctttattattactaatattctacaattgtttaaataaaaggaactttataatgaaacggttcggaatactggctcaagaacctatgtcaagatgagctgaattttggtaaattattttaggaattatgacaagctaattgaattaggcttgtgacaattagagtaatttacatgacaggtaaaactcctattaaaaatgtttagatgtttgcttctgtagatgtcactttagtaaaataccaatttagttttacttgtggcttatctagttagaacttagcagactttactgggacaagtttactgctcttgtaggagctcctctcacaagtagttgtaatgctgtagcatgatactcaggatcagtagcttgagatgttactatttttctcttcatctttgacttgcagagagcctcccgtttttggatccaggcatcttttctgaatcctggttccatcagtatacctgctctcctatgaccccaaatcatagtcaatggtgcctcaaacatagcaccttaagttaaaggctgcctagtgctctgaggaaagcttgctgattatcttcctgatctactcaccccaaaaggcagaaaagcaacacagtcactgctgtggtcatttgtaatgtaaagatcagttatatatatatatttgtaatgagagcaagtatatactcattatagaatcaatttaagaagtttaaaataacccagagtagaatttctatatctagtcttggtttttttcatgaatatttgcaagtaattaccattaaattcacacatgaaagattaatctgaaagatcagagaccatgttattgcctgaccacgatagaactggctcctgtggtttgggacaagtaataaaacaactgcttgagttttgtttgtaaaatacataattaatatttgacctacctcaaaatgtattgaggatctgtgaaatgctaagtgcccaaaataaaatattgctgattgtctttttatt

SEQ ID NO: 70081 - DNA, 1113 bp, Homo Sapiens
aaattatccaccaaaatctatattaaagtatgggaataattaatatatttatatggaaattgtctcatgccttataagctcctaaaataaaatcaaggtcattatgtgactaatgatagcactaggaggaaaagaaaatactgaaagtaaaacagtcttcagccttggtttcagctatctcttcaaatcagcattaagtatttaatatcagatataacatttttggcttgtcagaccagtaaatcatgtttttccactggacaaaggaagctgaagaaacaactgttgaacaaactaaatgctgtgacatgaagcatctgacttctaagtctgagtatttagttaaaatgattggtgaacatttaactgggcaaaaggaatggcatccatcatccaaacaggctcacttcccccagcccccaaaatgaacagtagttttaatagcaaaagaaataaaaagtttttttcttttgattctttagagccaactgtgaaagaggtcagcaatacattaacagcagcaatggacaaggaagagaacaatagaggattaaagtatcttgctggacgtttgttcatctttttctgtattagcctgaaaactgcaactggcttatggaaatttccggtgcatgtgtctccttagatccgttcacagatttagaattcagtctgcctgagggctctataaccatgtaagaaagctttctttatctagacttggtggcagccaaaacagactccatgtcattaaggatgtcagaactcaaagcttcctgcagacttggcatcagctcctctccttctatgttcattccatctccttccagtgttccaaggtccacatttgtcccaggaatggcttcaaggtagtctgggaaacggttctgctgtgagggcagggtgctttggttgatagtatcacctgtatccatctcatccacactgttcaggaagtcatctggggttcgagggacactgtagctgctcatgcttagtccactgtctgtactctcatctcgagagtgataggtgccactgttaaggaaaggatctgagctattggtcgtcattgttctcaattcctgagacatcccggaagaagaaaatgat

SEQ ID NO: 70082 - DNA, 1094 bp, Homo Sapiens
  misc_feature (779)..(839): n is a, c, g, or t
  misc_feature (869)..(869): n is a, c, g, or t
  misc_feature (898)..(910): n is a, c, g, or t
  misc_feature (1023)..(1023): n is a, c, g, or t
ctttgtagaaaaggtttcctctagaactgaattcctctggaattgagtgatggacttcacaacaactagccaggaagggtgacaagtaccttctgcctcctccattcttcctgggtgcagaactgtagaagaccctgaggactcctgggctagtgtgagcagctattctgcatgggtgcagatggctggatgtgaaagagacatgctctagctgcagaggcaaatttgaagtgccacggaacgttgtcaagaggtagtgagattgttgctgtgagcaaggctctgggagagtcacctcaggctcaggattctgaaccattgagatcagaaaccagatacttagccttctactgtagctacggaaccagattctggtgaatttgtccacaatcagccattggcctgtctggggagtttttggaagacagcaaagaggggcaatggctgctttcagctttgaggacagatgctatcctaagggcatggcagtacccatgttgatttgacatctctctagcccatccattgcttacagtagaagagtggggctgtatgcttgataatcttgaacattgaacttaatagatgacttgacaaggtagagatctgatattttgagattttggagaccatttcctgtgccagaatcactgctctattccataccgtgccatggaggctgttttagaagtggttggataacatgttaaataaaatattaagtgtaaaaaacaaaccccccatatcatcttttcttccgcccttcctccccaccttgnnnnnnnnnnnnnnnnnnnnnnnnnnnnnnnnnnnnnnnnnnnnnnnnnnnnnnnnnnnnngccctctcctgggtcgcgcggatttcactngacctatactttgctatttttttcggcgnnnnnnnnnnnnntcaaaaaaatcttttctaaaattttttttgtttgggagggggcggccccccctaccacaaaacaaaaacaaatgggtaaataatttttcttccccacaaagagacatccgcgngcccacaacaaaagagttgggttgtgttttctcctccgcccccaagaataacacaccccccggcggcgcga

SEQ ID NO: 70083 - DNA, 878 bp, Homo Sapiens
  misc_feature (591)..(599): n is a, c, g, or t
  misc_feature (671)..(679): n is a, c, g, or t
atggtgagtaattttactacgcagtcttgaaaacaagctcagcagcatctgagaccaatgattcatcaaagtcaggactctaggattagaaaacttgataaattgcaattcattatcatagaggagctggagaattttgagaaagattcacagtctttaaaagatttggaaaaggaatgtgtggacttttgggaaaagatatttcagaagttcagtgcatatcaaaaaagcgaacaacagaggcttcatcttttgaaaacttcattggctaaaagtgtcttctgtaatactgatagtgaagaaactgtttttacatccgagatgtgtttgatgaaagaagatatgaaagtgctgcaagacaggcttcttaaggacatgctagaagaggagcttcttaatgtacgcagagaactgatgtcagtattcatgtctcatgaaagaaatgctaatgtgtgaaatctagtttttatcaccatactttatctaattattattctctgtatataactgaggaaataagaatagtcctacaaagagaaaaatatacatgtcaccgaagcaagtgtaccctttataggaaccctcaaattnnnnnnnnntgtcttttaatggatgagagggaaccactataacatgagtccaagcccagaagacttctgtctatacaatannnnnnnnnaattttggagataaaagctttaagaaactttttgagttaattatactcataaaatgagtttctttaataaattaaattttattgtgtaaaatgtattattacataaaatgtgtttttgaatcaatgcagtttggggatgaatataattaaaatatgtttaataacttagaattcaactaataaaaatttagcctcactt

SEQ ID NO: 70084 - DNA, 1071 bp, Homo Sapiens
gcgggcccggcggagcggcgggcaaaggtccaggaaggtggcgtcagcatctgcagccgcgtcgacgttgtcggagcctccgcggaggacccaggagagccggactaggaccaggtccctgggcctccccacactccccatggagaagctggcggcctctacagagccccaagggcctcggccggtcctgggccgtgagagtgtccaggtgcccgatgaccaagactttcgcagcttccggtcagagtgtgaggctgaggtgggctggaacctgacctatagcagggctggggtgtctgtctgggtgcaggctgtggagatggatcggacgctgcacaagatcaagtgccggatggagttgctgtgatgtgccagccgagacactctacgacgtcctacacgacattgagtaccgcaagaaatgggacagcaacgtcattgagacttttgacatcgcccgcttgacagtcaacgctgacgtgggctattactcctggaggtgtcccaagcccctgaagaaccgtgatgtcatcaccctccgctcctggctccccatgggcgctgattacatcattatgaactactcagtcaaacatcccaaatacccacctcggaaagacttggtccgagctgtgtccatccagacgggctacctcatccagagcacagggcccaagagctgcgtcatcacctacctggcccaggtggaccccaaaggctccttacccaagtgggtggtgaataaatcttctcagttcctggctcccaaggccatgaagaagatgtacaaggcgtgcctcaagtaccccgagtggaaacagaagcacctgcctcacttcaagccgtggctgcacccggagcagagcccgttgccgagcctggcgctgtcggagctgtcggtgcagcatgcggactcactggagaacatcgacgagagcgcggtggccgagagcagagaggagcggatgggcggcgcgggcggcgagggcagcgacgacgacacctcgctcacctgagcgccgcaccgcttcagggacggagacaggaccgggcgagccctggggcggcggc

SEQ ID NO: 70085 - DNA, 598 bp, Homo Sapiens
  misc_feature (29)..(29): n is a, c, g, or t
agtgtccaggtgcccgatgaccaagactntcgcagcttccggtcagagtgtgaggctgaggtggctacctcatccagagcacagggcccaagagctgcgtcatcacctacctggcccaggtggaccccaaaggctccttacccaagtgggtggtgaataaatcttctcagttcctggctcccaaggccatgaagaagatgtacaaggcgtgcctcaagtaccccgagtggaaacagaagcacctgcctcacttcaagccgtggctgcacccggagcagagcccgttgccgagcctggcgctgtcggagctgtcggtgcagcatgcggactcactggagaacatcgacgagagcgcggtggccgagagcagagaggagcggatgggcggcgcgggcggcgagggcagcgacgacgacacctcgctcacctgagcgccgcaccgcttcagggacggagacaggaccgggcgagccctggggcggcggccgctcctgcactttctcccctcccccacccggcacctggtggcaccgggccaggcccaggcgggtgctgcagcctggctggacagagccccaataaacgatcccacagcctc

SEQ ID NO: 70086 - DNA, 556 bp, Homo Sapiens
cgagacactctacgacgtcctacacgacattgagtaccgcaagaaatgggacagcaacgtcattgagacttttgacatcgcccgcttgacagtcaacgctgacgtgggctattactcctggaggtgtcccaagcccctgaagaaccgtgatgtcatcaccctccgctcctggctccccatgggcgctgattacatcattatgaactactcagtcaaacatcccgctccttacccaagtgggtggtgaataaatcttctcagttcctggctcccaaggccatgaagaagatgtacaaggcgtgcctcaagtaccccgagtggaaacagaagcacctgcctcacttcaagccgtggctgcacccggagcagagcccgttgccgagcctggcgctgtcggagctgtcggtgcagcatgcggactcactggagaacatcgacgagagcgcggtggccgagagcagagaggagcggatgggcggcgcgggcggcgagggcagcgacgacgacacctcgctcacctgagcgccgcaccgcttcagggacggagacaggaccg

SEQ ID NO: 70087 - DNA, 931 bp, Homo Sapiens
ttacaggctaggtacgaggcctgggtgttgaatcggcacgagggccaactctgcctggggaggtccccaggaaggtggcgtcagcatctgcagccgcgtcgacgttgtcggagcctccccacactccccatggagaagctggcggcctctacagagccccaagggcctcggccggtcctgggccgtgagagtgtccaggtgcccgatgaccaagactttcgcagcttccggtcagagtgtgaggctgaggtgggctggaacctgacctatagcagggctggggtgtctgtctgggtgcaggctgtggagatggatcggacgctgcacaagatcaagtgccggatggagtgctgtgatgtgccagccgagacactctacgacgtcctacacgacattgagtaccgcaagaaatgggacagcaacgtcattgagacttttgacatcgcccgcttgacagtcaacgctgacgtgggctattactcctggaggtgtcccaagcccctgaagaaccgtgatgtcatcaccctccgctcctggctccccatgggcgctgattacatcattatgaactactcagtcaaacatcccaaatacccacctcggaaagacttggtccgagctgtgtccatccagacgggctacctcatccagagcacagggcccaagagctgcgtcatcacctacctggcccaggtggaccccaaaggctccttacccaagtgggtggtgaataaatcttctcagttcctggctcccaaggccatgaagaaaatgtacaaagcgtgcctcaagtaccccgagtggaaacagaagcacctggcctcacttcaaggcgggggctgcaccccggaagcaaaccccggttgcccgaaccttgggcgcgtgtccggaacctggtcgggtggcagccatggcgggaactccacctggg

SEQ ID NO: 70088 - DNA, 906 bp, Homo Sapiens
ggccccggcggagcggcgggcaaaggtcccaggaaggtggcgtcagcatctgcagccgcgtcgacgttgtcggagcctccgcggaggacccaggagagccggactaggaccagggccctgggcctccccacactccccatggagaagctggcggcctctacagagccccaagggcctcggccggtcctgggccgtgagagtgtccaggtgcccgatgaccaagactttcgcagcttccggtcagagtgtgaggctgaggtgggctggaacctgacctatagcagggctggggtgtctgtctgggtgcaggctgtggagatggatcggacgctgcacaagatcaagtgccggatggagtgctgtgatgtgccagccgagacactctacgacgtcctacacgacattgagtaccgcaagaaatgggacagcaacgtcattgagacttttgacatcgcccgcttgacagtcaacgctgacgtgggctattactcctggaggtgtcccaagcccctgaagaaccgtgatgtcatcaccctccgctcctggctccccatgggcgctgattacatcattatgaactactcagtcaaacatcccaaatacccacctcggaaagacttggtccgagctgtgtccatccagacgggctacctcatccagagcacagggcccaagagctgcgtcatcacctacctgggccaggtggaccccaaaggctccttacccaagtgggtggtgaataaatcttctcagttcctggctcccaaggccatgaagaaaatgtacaaggcgtgcctcaaagtaccccgaggggaaacagaaagcacctggcctcacttcaagccgggggctgcaccccggagcaaaaccccggttggccgaaccctgggcgcttgtcggaaactc

SEQ ID NO: 70089 - DNA, 720 bp, Homo Sapiens
gacccttgagcggagactggagatgacaggtgtgttgccagtcagatgcactgaccctcctcggagacctaacaggtgaatcccaaaaatttcaccagaggcctacagtggctctactgtgtggacctcatgtgaagggggctcagggtatcagctgtggaaggcacctagccaaccatgatgtccaggtcatccttttcctgcccaattttgtcaagatgttggaatctatcaccaatgagctgtcgctcttcagcaagacccaaggccaacaagtgtctagcctcaaagatctgcccactagccctgtggacctggtcatcaactgcctgggattgccctgagaacgtcttcctgcgcgatcaaccctggtacaaggcagctgtggcctgggccaaccagaaccgggcaccagtactcagcatagaccctcctgtgcatgaagtcgaacagggcattgatgccaaatggtcactggcactgggcctgcctctgccactgggggagcacgcaggccgtatctatttgtgcgacattggcattccccagcaggtcttccaggaggtgggcatcaactaccactcgccctttggctgcaagtttgttatcccactgcactctgcttagagggttcctgcgcaggcaggactctgctgtcccctgctgctcctgataacaaacgccttaaggatatgaagcttcatggaccttgttaaaaaa

SEQ ID NO: 70090 - DNA, 679 bp, Homo Sapiens
  misc_feature (174)..(183): n is a, c, g, or t
  misc_feature (405)..(450): n is a, c, g, or t
aatttaaaagagcagacatctctgaatcaaacacttaacatcaatttattaatattaaaaatggctaaacattcaccaaaaatgtctgcattttatgaataattttaaaaacttagtaagaagctgtagacaattttgttattttaatttctaccttatgcttatgcatttaannnnnnnnnnaggaactacagtgttatctgtcattttcatgcgaatttttttcattaatttgtgactttacatagactatttcttaaattataggtacaccaatagctggtgctggggaaggatgtttaagcaacatgctttctcttctctgcagactctaaaatagcattgccagtgcacgacattcataatttaaaatgtatgcagagcactgaaatgtataaaaagcannnnnnnnnnnnnnnnnnnnnnnnnnnnnnnnnnnnnnnnnnnnnngaagtatatgaagatctctcagtaataaaagtacaaaaagctactctttgcaatatgaaaaattgaggtattgcataaagagatatcccgtcagtgaaaagtgtgcctaaaaatgttcactgttggaaaaacaagatatacaaaagtagtgcataacaaatatacattatgtgcatgacaaaataagttagctacaaaaacactgtaccgaaattcagcaggtcatgta

SEQ ID NO: 70091 - DNA, 1762 bp, Homo Sapiens
  misc_feature (124)..(124): n is a, c, g, or t
  misc_feature (151)..(159): n is a, c, g, or t
  misc_feature (409)..(424): n is a, c, g, or t
  misc_feature (599)..(616): n is a, c, g, or t
  misc_feature (624)..(624): n is a, c, g, or t
  misc_feature (855)..(892): n is a, c, g, or t
  misc_feature (1298)..(1310): n is a, c, g, or t
  misc_feature (1652)..(1686): n is a, c, g, or t
cgagggagcgtgttggatttgccgcccagcgagggggagtcttcccagggttttacctcaaccagacccgccgtgtttgtggaagtgggggtcttcccccactctggcgggcccccgagaaatnactctctttaaagagagagattttctnnnnnnnnngttcttctctctcactaatatgaatgtctgccacaagggcggcgcggggggctcatttaaattttgtgaatattttcggggagcctctccccctttgtaggaacctccccctgttttgtaaaaaaggggatctcccacggttgaatcgggacccttctcccaggcaagcccttcccctcttttgggcgatttttgtggttccacgagaaaaccggtctcgcgggttttttccccgcccccgggggcgtgnnnnnnnnnnnnnnnngggggggagggaatttcccaagggcccctttagttccatgggccccagggtttctcccttggggaaacccagcttatggccccatgtttccccttaccctactggggccccgcgccgccaaaacgaaagggtctagaaaagcttcttcgaggggccgagggcggccgaccagggnnnnnnnnnnnnnnnnnngtggttgngggaactacagtgttatctgtcattttcatgcgaatttttttcattaatttgtgactttacatagactatttcttaaattataggtacaccaatagctggtgctggggaaggatgtttaagcaacatgctttctcttctctgcagactctaaaatagcattgccagtgcacgacattcataatttaaaatgtatgcagagcactgaaatgtataaaaagcagaatataagnnnnnnnnnnnnnnnnnnnnnnnnnnnnnnnnnnnnnnaagtatatgaagatctctcagtaataaaagtacaaaaagctactctttgcaatatgaaaaattgaggtattgcataaagagatatcccgtcagtgaaaagtgtgcctaaaaatgttcactgctggaaaaacaagatatacaaaagtagtgcataacaaatatacattatgtgcatgacaaaataagttagctacaaaaacactgtaccgaaattcagcaggtcatgtacaaagggaaaaattattattcaaagctagttctcaaacagtgttatttcttgttaactcatcacacctgtttactgagtaggaacagcacgatagcacaccccaagccacctacaagcatttaaaagagtaaaaagaggcaaatgaacattccaattagaatcatgtagttcaggagnnnnnnnnnnnnngtccctgaccagctacacaagagcaccctccattcgcatgactgctttcagtatttgcagggaattctttaaaagcagctccctttctatgtttgaatattagacagcaaatgcctccattttgacctttggaacttaacaggtatagttcattaaagcctgtattaaaagtaaagggctgcttttcctaaagatcatccataggggtcataagccaggtggttccacagcagtgctggggcaagtctttggttttgaaggatccaagatggtactgttaggtagcgcaaccccggccgtaatggccgaattcccgggcatatgtccggtaccgtcgactgnnnnnnnnnnnnnnnnnnnnnnnnnnnnnnnnnnncggccgcttcctcgctcactacttcgctgcgctcggtcgttcggctcgacgacgtagcgcctatagtgagtctata

SEQ ID NO: 70092 - DNA, 1839 bp, Homo Sapiens
  misc_feature (1727)..(1745): n is a, c, g, or t
tttcctcccactgactcgggctcctgcagcttctgcggggcttggcgccgccgtccgtgagcacccaggccgggaccccacatccccaggccagccctgaccccggcggcccctccgccgggattcctttccgaggtactggtgccggcccaagacccgggcagcgctttgtcgtgtccgcccctcagtgatcagctccgggtccccctgctcggccccgcgcgccccaagcgcagtccccggaagtgcgcgccggggccccagcaaagagtctgagaagccaactggggccaaacaagttttagaacctctactggctgatgccaacatcatcagagatgaactgttcttaccagaaacttctctgctcctgacaccccacctctccccagaagagaagaaggagagtggccacgttgattcagccaagcacctccaggaggtcccctctggatgtcccatgaggctgcccctcagccacagcccagagcacgtggagatggctttgctcagcaacatcctagcggcctattcctttgtctcagaaaatcctgagcgagcagctctgtactttgtttctggcgtgtgcatcgggctggtgctgaccctggctgctctggtgataaggatctcttgccacacagactgcaggcggcgtcccgggaagaagttcctgcaggacagagagagcagcagcgacagcagcgacagcgaggatggcagtgaggacaccgtgtccgatctctccgtgcggagacaccgccgcttcgagaggactttgaacaagaatgtgttcacctctgcggaggagctggagcgcgcccagcggctggaggagcgcgagcgcatcatcagggagatctggatgaatggccagcctgaggtgcccgggaccaggagcctgaatcgctactattagggagcagcaggaccccggaaaccactggaggccgcctggaaaggagagcgtctgcagggacagtgggcacaaggaactgaacccagctctgctaatattgtgatttcagagaaaaagcaggacatgccccttttctagccaggaggattgctcctttttggccaaatgtatggagaagtagaaaaatcaaagcagttcatcaccctttccaggtctcggaatggtgctgaaaaatcctctccaacactgtggatggagatcggagaaacgcgactgtggtttctcttgatttctgaggatctcagaagtttcagcagacttccttgctctgtgttattcctttgcaaaaggaaagatcattatagcatgagggctgggaatagcagggtgaacttaacccaataaatgcaatttcctaaatgacttcatgctatggaggtgattctgattcaaatagcatgatccatgcttattatttaaggctgatttttaaaatcttgtgttgcaagggcaacctcgtccattttaactggcacctcagggattaaaatcctactttttagtgtagttcccacctcattcatgaaaatgaatagaactattgtattatgggagatgtgtcagtgaactagaaaatgtcaataacctcaaaggatgaagggtttttattttaaatagtttataaaatatatattgacatgcatatttgaaaatgctgcataaaaataaaagtggtgtgttttccccctctttggagacaagaaaattttattatgactctagataattgtgattttaaacactttgnnnnnnnnnnnnnnnnnnnaattggatttcaaagaaaagaatggaaatgagaggtaaggattaaagccaaagttaggatgggaattaaaaaaataaacattacataaaatttt

SEQ ID NO: 70093 - DNA, 1085 bp, Homo Sapiens
cccaccgcataggtgacatatagaccagtgttacaaaaagcaggctggtaccggtccggaattcccgggatatcgtcgaccacgcgtcgcactgactcgggctcctgcagcttctgcggggcttggcgctcgcgtccgtgagcacccaggccgggaccccacgatccccaggccagccctgaccccggcggcccctccgccgggattcctttccgaggtactggtgccggcccaagacccgggcagcgctttgtcgtgtcacgcccctcagtgatcagctccgggtccccctgctcggccccgcgcgccccaagcgcagtccccggaagtgcgcgccggggccccagcaaagaagacggaagaaggagagtggccacgttgattcagccaagcacctccaggaggtcccctctggatgtcccatgaggctgcccctcagccacagcccagagcacgtggagatggcttttgctcagcaacatcctagcggcctattccttcgtctcagaaaatcctgacgcgagcagctctgtactacgtttctaggccgtgtgcatcgggctggtgctgaccctggctgctctggtgataaggatctcttgccacacagactgcaggcggcgtcccgggaagaagttcctgcaggaccagacagagcaagcagcgacagcagcgacagcgcaggatggcacgtgaggaccaccgtgtccgatctctccgtgcggagacaccgccgcttcgagaggactttgaacaagaatgtgttcacctctgcggaggaactggagcgcgcccagcggctgggagagcgcgagcgcatcatcaaggagatctggatgaatggccagcctgaggtgcccgggaccaggagcctgaatcgctactattagggagcaccaggacccccgggaaaccacttggaggcgccctggaaaaggaaaacgtctgcagggacatggggcacaaggaaatgaacccagctctggctaaaatgggggtttccgaagaaaaagcagggaatggcccctttttctaaccagggaaggatggcccccttttttgggccaaagggtatgggagaaagt

SEQ ID NO: 70094 - DNA, 776 bp, Homo Sapiens
  misc_feature (597)..(656): n is a, c, g, or t
tttggttggttaaaaaagtttaatgagctgtaaaataaatacacttccattaaatattaaataaattatttacaacttgaaaaaatactttttaccttcgtgcacctttatatacagaaatagcataaaaagtgacaattgaaagtttaaaaccatcataacaaaaagggtccattgtcttatgatccactggaaagaggaccgactcatcatttatggctatgacttggcagtgactccaatgtgatatcctgtaattttatcttcagttatgctatagcatgtacatttccattctcttgtcgaagtttctttcgttcctcagcttctccttcatatttcctgacgtattgtcttctaagctggactgtaataacagcaacagctgtgaggatcacagcagacataaaggcagctatggctgctaatgcaatttttgataaactactgtcaatcatgctgtgagttttcatggacttttccccacaccgttcaccgaaatattcttgctgacatttgcatgttactgcttccaggtgctctatatatttgcattctccgtgaatgcagaaattttgaaattctgcattacatggnnnnnnnnnnnnnnnnnnnnnnnnnnnnnnnnnnnnnnnnnnnnnnnnnnnnnnnnnnnngggtttatctgaagtattttcactttccgtcttgttttgggggggcttaactactgttaactctgactgaatcatcgacatatagcaggtattgtggtcgttacatacctctgagtagtc

SEQ ID NO: 70095 - DNA, 981 bp, Homo Sapiens
  misc_feature (579)..(643): n is a, c, g, or t
ggagacgttcgcacacctgggtgccagcgccccagaggtcccgggacagcccgaggcgccgcgcccgccgccccgagctccccaagccttcgagagcggcgcacactcccggtctccactcgctcttccaacacccgctcgttttggcggcagctcgtgtcccagagaccgagttgccccagagaccgagacgccgccgctgcgaaggaccaatgagagccccgctgctaccgccggcgccggtggtgctgtcgctcttgatactcggctcaggccattatgctgctggattggacctcaatgacacctactctgggaagcgtgaaccattttctggggaccacagtgctgatggatttgaggttacctcaagaagtgagatgtcttcagggagtgagatttcccctgtgaatgaaatgccttctagtagtgaaccgtcctcgggagccgactatgactactcagaagagtatgataacgaaccacaaatacctggctatattgtcgatgattcagtcagagttgaacaggtagttaagcccccccaaaacaagacggaaagtgaaaatacttcagatnnnnnnnnnnnnnnnnnnnnnnnnnnnnnnnnnnnnnnnnnnnnnnnnnnnnnnnnnnnnnnnnntccatgtaatgcagaatttcaaaatttctgcattcacggagaatgcaaatatatagagcacctggaagcagtaacatgcaaatgtcagcaagaatatttcggtgaacggtgtggggaaaagtccatgaaaactcacagcatgaattgacagtagtttatcaaaaattgcattagcagccatagctgcccttatgtctgctgtgatcctcacagctgttgctggtattacagtcccagcttagaaagacaatacgtccgggaaattttgaagggaaaaagcttgaggaaccaaaagaaacttccgacaagaagaaatggaaaaaggtaccatgcctatt

SEQ ID NO: 70096 - DNA, 955 bp, Homo Sapiens
  misc_feature (450)..(529): n is a, c, g, or t
  misc_feature (645)..(645): n is a, c, g, or t
  misc_feature (691)..(691): n is a, c, g, or t
  misc_feature (724)..(724): n is a, c, g, or t
ctgaagcactgaatacaaatattcctgggctcctgttttcaaatagattgaccacgaaaatgagctccatggaaattatcaatttgattataatctgttgtaatctgggtgttggagcattgtaacatagagtaactctaatttataattctcagttttttccacctgcaagtagtactcactaattcccaactataatcatgagtggacactactttcaggtagaaaaaactgaaaattataaattagggttatgcagtcctctctaacttttatattgtgttaggtaatgaggcacgcatggctgttacccctgtgagcgctcactgctatgacatctttctctcatgtctctaaaattatattcacgtttgagagactcttgtcaataaatcttttcttttttagttgaacaggtagttaagcccccccaaaacaagacggaaagtnnnnnnnnnnnnnnnnnnnnnnnnnnnnnnnnnnnnnnnnnnnnnnnnnnnnnnnnnnnnnnnnnnnnnnnnnnnnnnnntccatgtaatgcagaatttcaaaatttctgcattcacggagaatgcaaatatatagagcacctggaagcagtaacatgcaaatgtcagcaagaatatttcggtgaacggtgtgggngaaaagtccatgaaaactcacagcatgattgacagtagtttatcanaaattgcattagcagccatagcctgcctttatngtctgctgtgatccctcacaagctgttggctgttattacagtcccagcttagagacaatacgtcagggaaatatgaaaggagaaactgaggaaagaaaagaaacttcgacaaaagaaatggaaatgtacattgctattagcataactgaaagataaaattaccgggatattccctttgggagtcacttgcccaaagcatagccctaaaaggggatgaatccggtccttcta

SEQ ID NO: 70097 - DNA, 627 bp, Homo Sapiens
  misc_feature (71)..(161): n is a, c, g, or t
  misc_feature (168)..(266): n is a, c, g, or t
attcttttcggaggtcatttaccttcattgtctttggatcaagtttagaccaagtgggtaggtgtagaaannnnnnnnnnnnnnnnnnnnnnnnnnnnnnnnnnnnnnnnnnnnnnnnnnnnnnnnnnnnnnnnnnnnnnnnnnnnnnnnnnnnnnnnnnngcctgannnnnnnnnnnnnnnnnnnnnnnnnnnnnnnnnnnnnnnnnnnnnnnnnnnnnnnnnnnnnnnnnnnnnnnnnnnnnnnnnnnnnnnnnnnnnnnnnnngtcctctttctcaggaagagacagtaatgatttgtatatacggacaccaaaatctctttgaagcatttcgttgaaaagttccgcaaacaatgaaacctcaaatgaatgttctttattatcctctaatctgtagtccaataggacactcaaagacatgatgctacaatcaaacttgccactttttgcagcccaatttggatgtacaatgatggccggttcatcaggcaaaatatatcttctttctcgacgctggcgttctatttcctcttgacgtttcctttcttcttcctctttatcgtcttcagatttcctatcatcatcctcatcctcttctttttcagatttctctaactccttctgt

SEQ ID NO: 70098 - DNA, 710 bp, Homo Sapiens
  misc_feature (400)..(469): n is a, c, g, or t
  misc_feature (505)..(596): n is a, c, g, or t
gcggccgtctactactactatacggctgcgagaagacgacagaaggggttagagaaatctgaaaaagaagaggatgaggatgatgataggaaatctgaagacgataaagaggaagaagaaaggaaacgtcaagaggaaatagaacgccagcgtcgagaaagaagatatattttgcctgatgaaccggccatcattgtacatccaaattgggctgcaaaaagtggcaagtttgattgtagcatcatgtctttgagtgtcctattggactacagattagaggataataaagaacattcatttgaggtttcattgtttgcggaacttttcaacgaaatgcttcaaagagattttggtgtccgtatatacaaatcattactgtctcttcctgagaaagaggacnnnnnnnnnnnnnnnnnnnnnnnnnnnnnnnnnnnnnnnnnnnnnnnnnnnnnnnnnnnnnnnnnnnnnnctgatgaaccaaaacccaaacggagaaaatcaggcnnnnnnnnnnnnnnnnnnnnnnnnnnnnnnnnnnnnnnnnnnnnnnnnnnnnnnnnnnnnnnnnnnnnnnnnnnnnnnnnnnnnnnnnnnnntaacaatcaagatgaatatgaccctatggaagcagaagaagctgaggatgaagaagatgatagggatgaggaagaaatgaccaaacgagatgacaaaagagatatcaacagata

SEQ ID NO: 70099 - DNA, 784 bp, Homo Sapiens
  misc_feature (616)..(666): n is a, c, g, or t
cgggggtaatagccaaacaatcatgatagcatgtgtcagcccttcagacagagactttatggaaacgttaaacaccctgaaatacgccaatcgagctagaaatatcaagaataaggtgatggtcaatcaggacagagctagtcagcaaatcaatgcacttcgtagtgaaatcacacgacttcagatggagctcatggagtacaaaacaggtaaaagaataattgacgaagagggtgtggaaagcatcaatgacatgtttcatgagaatgctatgctacagactgaaaataataacctgcgtgtaagaattaaagccatgcaagagacggttgatgcattgaggtccagaattacacagcttgttagtgatcaggccaaccatgttcttgccagagcaggtgaaggaaatgaggagattagtaatatgattcatagttatataaaagaaatcgaagatctcagggcaaaattattagaaagtgaagcagtgaatgagaaccttcgaaaaaacttgacaagagccacagcaagagcgccatatttcagcggatcatcaactttttctcctaccatactatcctcagacaaagaaaccattgaaattatagacctagcnnnnnnnnnnnnnnnnnnnnnnnnnnnnnnnnnnnnnnnnnnnnnnnnnnntgtggctggtaaagaggataatacagacactgaccaagagaagaaagaagaaaagggtgtttcggaaagagaaaacaatgaattagaagtggaagaaagtcaagaagtgcctcgtgcc

SEQ ID NO: 70100 - DNA, 1712 bp, Homo Sapiens
cagtcgacggtaccggacatatgcccgggaattcggccattacggccgggggcctgaaaacctccgcgccaccgctgcgctctttacaaaggccccgggcgcgagaggacgtgctctgccagccagtgggaaggcaggcctgacgcgctgcgggagcgcgggaggatcggcggctcgcggtcactggtccctggctcggttccccgcaccccggggctcacacttacccgcgcggaggagcagcggccgggtgtccacccccatcctgcgcccagtctcctcgattcccctcgctctgagccgggagagccgaacagctgaagagagttcactgactccccgagccccaggtgggccttgtgcacatcatgaccagttttgaagatgctgacacagaagagacagtaacttgtctccagatgacggtttaccatcctggccagttgcagtgtggaatatttcagtcaataagtttaaacagagagaaactcccttccagcgaagtggtgaaatttggccgaaattccaacatctgtcattatacttttcaggacaaacaggtttcccgagttcagttttctctgcagctgtttaaaaaattcaacagctcagttctctcctttgaaataaacacatatgagtaaaaagaccaatctgatcgtggacacgcagagagctgggctacctaaataaaatggacctgccatacaggtgcatggtcagattcggagagtatcagtatctgatggagaaggaagatggcgagtcattggaattttttgagactcaatttattttatctccaagatcactcttgcaagaaaacaactggccaccacacaggcccataccggagtatggcacttactcgctctgctcctcccaaagcagttctccgacagaaatggatgaaaatgagtcatgaacacagaaagtctaagaggagaaatatgatggatgaagagctctgtagatgctgtatagacactaaataagagttgattagggtagtatattatagtcatctgttatgctgtgaaatttggaattcagtattatcattttgaagtctgtaaattgtgttagtcattaacttagtcacctgttgtattctggatctacacaaaattattttaactgctcttattaatctgtgaggattaatatacaaaaagtatcctttgagatgaagtcgtgttctcaaaataaggttatattattttctttttctgcttgattttcatcttgtgttttgctttgtttttgtaaggaaccatctcttggtttggtcacatcagttcacaacagccatttgttttcaaggtcaaggctccaggcaggttgttactggtgtttgcagcctgtcagtacttgcagtactggaataggttctaggctagtgtctgcgcgtcactgtggttttagcatgggaggacttatttgagaaatactaccttacttttctatgatttctttttacagagttatagtgtgtttactcctaagatgacagttctctttgtctatattcagcatctaagacaaatatttaaacattttaaagaaccactgtgttaagtttaggattatttacttaccaaattagaagtttgacttttatgtgttatacacaatcttaaaatttcacgaattcacctttttaatagtatccatgtacataataaaatcaaagtttaattagccgaaaaaaa

SEQ ID NO: 70101 - DNA, 1320 bp, Homo Sapiens
  misc_feature (78)..(112): n is a, c, g, or t
agaattatagatcatataggcgctccgctttattagcgaacgacgagcgcagcgagtcattgagcgaggaagcggcgnnnnnnnnnnnnnnnnnnnnnnnnnnnnnnnnnnncagtcgacggtaccggacatatgcccgggaattcggccattacggccggggaccactgtcgccatgaacagtgtgggggaggcatgcacggacatgaagcgcgagtacgaccagtgcttcaatcgctggttcgccgagaaatttctcaagggggacagctccggggacccgtgcaccgacctcttcaagcgctaccagcagtgtgttcagaaagcaataaaggagaaagagattcctattgaaggactggagttcatgggccatggcaaagaaaagcctgaaaattcttcttgaccttgacagtcaccttgaaggatttcgcaagtccagaaattgaggactctggatttttgtcaactaactctgtgaacatagccatcagatttgatgaggaacttaggagagaggagttttatttcctccttcgatgttttcctctcagttgtaaaagatgaactctttgagatgatttctcacctgctgtggtatcttgcaggaactgtgtgctaaaattgaacaatttttttgagattatggttgcaatacttggcgtggaatcagctttacataaatataccttgtatgcaaacgatgataaactagtcaggatgagcagagctgcctgacctcttgatttctgctgcaaaagacatatacactgtactggggtcactatttatgaaagcaattggttaggacctctttttttcctctcagggaactaatgctctgaaaagggatctgggcacaacagtttcagtgagtgcttttgagcacacttttatttttatatagtaactaatggttaagattgatggtggcctggattagcaaagaggaagacagcttttaacacagttccctgccttcacaagaggtgtcagattaagatgtgaaagctgcaagaatgttgcagtgaacaccatttcagagctctcagtgtgcagttcaggaattaagatacttggaatagctgtggaggaagaacctaaattgcaaagatctgctattgccagctctcaacccaagtcagtgaattgtcaacctgcatatcctaaaaatgtcaaaatgctgcatctggttaaatgtcggggtaggggggaagctgaaggtgctcgcttcatttgccttgtttactcatcctgccctgtaatgtctgtaatcctgaagatggaataaattgtaacatttagtttctatcattaaaa

SEQ ID NO: 70102 - DNA, 1059 bp, Homo Sapiens
cagtcgacggtaccggacatatgcccgggaattcggccattacggccggggactgtcgccatgaacagtgtgggggaggcatgcacggacatgaagcgcgagtacgaccagtgcttcaatcgctggttcgccgagaaatttctcaagggggacagctccggggacccgtgcaccgacctcttcaagcgctaccagcagtgtgttcagaaagcaataaaggagaaagagattcctattgaaggactggagttcatgggccatggcaaagaaaagcctgaaaattcttcttgaccttgacagtcaccttgaaggatttcgcaagtccagaaattgaggactctggatttttgtcaactaactctgtgaacatagccatcagatttgatgaggaacttaggagagaggagttttatttcctccttcgatgttttcctctcagttgtaaaagatgaactctttgagatgatttctcacctgctgtggtatcttgcaggaactgtgtgctaaaattgaacaatttttttgagattatggttgcaatacttggcgtggaatcagctttacataaatataccttgtatgcaaacgatgataaactagtcaggatgagcagagctgcctgacctcttgatttctgctgcaaaagacatatacactgtactgggggtcactatttatgaaagcaattgggtaggacctttttttcctctcagggaactaatgctctgaaaagggatctggggcaaaaaagtttcacgggagtgccttttgaccacaactttttattttttatataacaaactaaagggttaaagaattgatgggggggccctggcatttggcaaaggagggaagaacccgcttttttaacaaccgtgtcccctggccctccacaagaagggggtccacaaataaaaaatgggtaaacgcctgccaagaaatggtttccaggtggaaccccccattttcccaaccttctcccgggggtgcgagtttccggggaattaaaccaaaaacttgtggggaaaacacttgggggcggcggaaaagaaccccaaa

SEQ ID NO: 70103 - DNA, 774 bp, Homo Sapiens
  misc_feature (15)..(15): n is a, c, g, or t
gctcaggaagagccnaaagaagcagaaatgagcagaaaggagttgggcttgatgaaggcgtggatagcctgaagcagccattcagagcagacaaaaggatcggcaaaaggaaatgacaatttctggctcagatggaagcaaagtactgcaaatcttccaaaggaggagggaaaaaatctgctctcaagaaagaaaagaaataatggaatttttctcttcaaaggtccttaggtgtaaattgatgccatcgtaggcaaggtgcaggcaggatttgaaggcaaaagtcaattcagctcttgagaaaaggtgtctttccagcctgaatttttcagattgactagaccaagcagaatctctcaacctgatcttagtatttcctagaaagcacttgacattgtgtgaggtctcacctgaaggaacttggtggtgacatttgggagggtggagggaggcagtgtccttcctgacagcacttgcctccatggatcttctgtacacagaactcttatctaggatgtggttctgttcatgctgctttctgcgatgtgcgtgtctgttagaataggctctctacccagctagaacaccttccagacacttgctggacagctatcttccacatacttcccagtttacatttggtcttaatgatcttgaatagatcctctcttcattttactcagccaggttttgtactgatgtacaggtgttaaattacttcaagcatttttgtaagaggtgtatataattcaataaaaaaggtaaaacatgaaa

SEQ ID NO: 70104 - DNA, 464 bp, Homo Sapiens
ttaagtttcttactgccacatatggtgtgaagtgacagtaagttgcttaatgacatcctgcagtatctgcttgcttttggagactccagtgagatgttgaaattgttcctgtgcttggtaactactttcctctgccaggctatgggaaagaggatgtaattgtgaataatatacaccatccagtctttaatgtgctgcaacaatgtagtaatttgtttttttcatttgttcccactgcctttgtgtacatagaaaacttaaaaatttcccccagtctattagaagttaagatgttccctaatttattaaatatgcctttattcacaatttgtttttttaggttattcttaatgcattatagaattaagtatgactttgtttatttttattacagtatgtagttattgacatattgtggtttgcagaattatcaattgtataaactaaacctttaattattaaaa

SEQ ID NO: 70105 - DNA, 553 bp, Homo Sapiens
agttcagggacctgtggcggatccggagcccctgtggtgactgcgaaggcttcgacgtgcacatcatggacgacatgattaagcgtgccctggacttcagggagagcagggaagctgagccccacccgctgtgggagtacccatgccgcagcctttccgagccctggcagatcctgacctttgacttccagcagccggtgcccctgcagcccctgtgtgccgagggcaccgtggagctcagaaggcccgggcagagccacgcagcggtgctatggatggagtaccacctgaccccggagtgcacgctcagcactggcctcctggagcctgcagaccctgaggggggctgctgctggaacccccactgcaagcaggccgtctacttcttcagccctgccccagatcccagagcactgctgggtggcccacggactgtcagctatgcagtggagtttcaccccgacacaggcgacatcatcatggagttcaggcatgcagataccccagactgaccactcttgagcaataaagtggcctgagggctggggttttg

SEQ ID NO: 70106 - DNA, 685 bp, Homo Sapiens
  misc_feature (22)..(23): n is a, c, g, or t
agaatgaaattatgtaatactnntaagaattgtagtgattgcagggttgtgttaaggtaacattttatgcatgtgtcagtgacagaaaggatcagggtataaaacttagcactaaatagcatgctccttaggaagttttaaggtaagcagtaggaatattcatgtaattctgatgagtttatgtaagttaaggaaaatgcaatgccagtttgttgactttaaacactaaaaacaaaatacatttcgtggaaccaacaaaggagacattctggggaaaaacttaaattgctcaaatttaaataagggctctcactttatatagtagatttgtcaggatcccatgaacattgcttttcttgatttctcacatatgagggttgggcaaaagggacttctctagcctcttcgataatgtaggtagacttgtacttagtgaatcccattataatgttaggtactatgttctaagactatttctataattggactgaaggctcctgcaaacataaattgctgatatggatatagtaacataagaaataccaaaatagggacatttgcaagaccttttccatttaatcatcagtttaataaaaatcatgcttttggtacagtgttcatgtaccataactgtattggaatatttgtacgatgttaaatatttttaataaaatttaacatgttc

SEQ ID NO: 70107 - DNA, 1242 bp, Homo Sapiens
agccacgatgtattttatgacttaccctcagaagtcaaactctcatttcttcaatagtgtagtggttacacaagtcaggcctattaaatgtgggaaggaaccacacaagggtgtgaatagaaaaaggcagggatggttgggggccaacttaaaggctggctgccatgcaggggaagcctaaaagcctggtaggggttcatgtaccctgccaccatcctcctttcacttgctattcctcttcactgaagaccccaagaagcatatctcatttcagaaaccagcagagatgatgacttataagtcatggaggaaggacgaggtggatttgaagagaaagccacaaaataggaagggtgaaggtctccagtccaaggaccaggtctggaagactggaaaaacggaacagatgacgtttagggaagggagacacaggctgccccaaggttcaagaataaagggtagcataagacaagagtgcttacccttggcagtggagtcacacttctcctttttacaaccccaaagaaagtctggtgtccagttcagccctgcttgtgtcacgtatcctttgctgctctgagtccttggggcctgagaactgggacccatgagtcctgctgcccagctgctacgggctgaattctgtccccctaaattcttacgttgagaaacccctggaacctcagaatgagactgtacttggagattgagcatttaaagaggtgattaacttaaatgaggctggttaaagttaaaatccagtccaactggtgttcttagaagaggaacgttgggcacataatgaaactagagatgtgtgtgcatggagggaagaccgcacaaggacacagtgagaagacagctgtctgcaagccaacaaaagaggcctctaggaaaaaccaggcctgctgacaccttgatcttgaacttctcgcctccaaatgtgagaaaataaatctgttgtttaaaccacctggttctgtggcattttgttatgggggccctagcaaactgaaacccaagccttctgcactgttccgggatgttaacttttctgtgaactaactccaaacctctgctgtgtaatgtgtgagaaaccagacccggagaatgcctttccagagtccaggaggttagatgggttgggcttccccagccaattgacaaaaacgtgcctgtggtggatcacaaatgcacttgtgtgcagtcagagattgtttccactcttagttccttcagccc

SEQ ID NO: 70108 - DNA, 1151 bp, Homo Sapiens
  misc_feature (1039)..(1047): n is a, c, g, or t
ggggaaatgaggccagaacttgagtatttactaacacgtttttcaaaagatgtcagtgttatacctaaagctaaaaaaaagcaagggtttgtcatagagggaacctctaaataatttcaggggtaggggagatgttgtcaataggaaatgggataaaatatcaagagacaatgaaaacactgccttgacatgaggaccagcaagtttattcttttcattttcagtgatgttgggaatggactgggttttaaaagggagcttgaagagggaatgtttgacagtcacagaaggttcctgcagcagatgcctcttttagccatttctcatttttttcctcaaattttacctactgaggctcaagccttcacagtgagctgatggtctctacaggggaggggagtctagggaatttatttggtatttgtaaggcaagcggtgatttctctctaatatatctgagttattgctcatttaaaactgttaagtccagtataattttccctgatatgaaaaaatgtgcatttttttcacttagcaacaaagtaccttctaatttccaatagtccgtgaaagttggggctgaagtacctaagtgtgaatgtctctcccgttaaactgagtgtagaaatctgaatttttaaaagagctgtaactagttgtaagtgcttaggaagaaactttgcaaacatttaatgaggatacactgttcatttttaaaattccttcacactgtaatttaatgtgttttatattcttttgtagtaaaacaacataactcagatttctacaggagacagtggttttatttggattgtcttctgtaataggtttcaataaagctggatgaacttattcggcaaacaccgagcggcacccgtctatcactatgtcgggccgcctccggccctcgcggaaggtttcctaaacacatttcgtttgggcggcggcggcccccaggcgggtaaagtggaacctgcggccataggcgtgttctccacaaggagaaccctgggccctggaactaagggcctgggaaatnnnnnnnnnaataaagaataaccgcccgggggtgtgcaacacccgacgccgtgttctcggagaaacaaacccgccccacaaggggagttcgcctcggagaggtgcgtatttac

SEQ ID NO: 70109 - DNA, 550 bp, Homo Sapiens
aatacatctgtgcaccacggtgctcctctgcaagctaatcaagtcaatgggtgctccctttatcttatcaaagacctggaaggaactccctgctgttttaaaaaagagaaaactataattttacaagacacaattgaaagaagaaaaatgttacttcagtggtatcagcacttcaagacagagcttaaaatgaaatttactaatattttagaaagctcatttttaatgaataataaaagttaattatctttttgagctaacatgtgatttttaaaatcattttgactactgggtgtataaatgtgtttgtgtgtgtatgtatttatagatgttctttaaggtacccttgaaaactctacattatgtatgccacataatgacatttcagtcagtggtagactacatatattgatagtgggtcccataagattataatggagctgaaaaaatttctatcgcctagtgatgtcatagcctagtgatgaccttgtgttttgcaattacattcatcacgtgtttgtggtgatactggtgttaacaaatctattga

SEQ ID NO: 70110 - DNA, 844 bp, Homo Sapiens
  misc_feature (1)..(1): n is a, c, g, or t
naacacacacactaatttgagaggacccgtagggtgtctgagcccagccacctgagtttttagtactgtgttgtcaggctcttcccaggcctcaggtgttgtcttttgtgctgtgtggggatgcattgctgcctgtatttatgatcttttgccgtggttctgagcattcacctcaccatgtttacaaagaactgttttgtatatagacattttcaggcacgtgctttgcaccaaccctgcgtggctcttgtctgtgttagctgtcacggtgtgcacactaatctctgttaaagttgtctatggctgttctacttgtaagatagttttctatttccttcagtaatgtgtccacagtaccctgtatttcgagttccattatactgaagtactcatgttttaatagtgcctctccaaaggcctcaccttggacagaggtcaatccttgatgctccagcacaggtgacgtcactaattgtcactttccagtttgtttttctctattaaggaagacattttctaattgcatctccatgggctgtgagactgtgtgaagccgtttgtgtggtctccatgtaggtgctgtgttcccggcaccgccttgctctgaacactggtaattccaggtgctgcgcttggcagaggggtctcgccaaagcgcatgtgtgtgcatgtgtgaacgtgtgtgtcctttgcatggttgggcgtgggtgccttgctagggcatcagcaggacattgtgtgtatagttacaatgcttccaaactggaactctacattttgtatcttttaaagctcctataagtaaaataactattggctttattaaaaatatacatttaataat

SEQ ID NO: 70111 - DNA, 2103 bp, Homo Sapiens
  misc_feature (1360)..(1394): n is a, c, g, or t
acaaccactacccacccaattgggaaaacgagggctccccaggctggtaccggtccggaattcccgggatgcgtgtcagtggcgctagcggcggacccggctgggcagttccttccccagaaggagagattcctctgccatggagtcctacgatgtgatcgccaaccagcctgtcgtgatcgacaacggatccggtgtgattaaagctggttttgctggtgatcagatccccaaatactgctttccaaactatgtgggccgacccaagcacgttcgtgtcatggcaggagcccttgaaggcgacatcttcattggccccaaagctgaggagcaccgagggctgctttcaatccgctatcccatggagcatggcatcgtcaaggattggaacgacatggaacgcatttggcaatatgtctattctaaggaccagctgcagactttctcagaggagcatcctgtgctcctgactgaggcgcctttaaacccacgaaaaaaccgggaacgagctgccgaagttttcttcgagaccttcaatgtgcccgctcttttcatctccatgcaagctgtactcagcctttacgctacaggcaggaccacaggggtggtgctggattctggggatggagtcacccatgctgtgcccatctatgagggctttgccatgccccactccatcatgcgcatcgacatcgcgggccgggacgtctctcgcttcctgcgcctctacctgcgtaaggagggctacgacttccactcatcctctgagtttgagattgtcaaggccataaaagaaagagcctgttacctatccataaacccccaaaaggatgagacgctagagacagagaaagctcagtactacctgcctgatggcagcaccattgagattggtccttcccgattccgggccccctgagttgctcttcaggccagatttgattggagaggagagtgaaggcatccacgaggtcctggtgttcgccattcagaagtcagacatggacctgcggcgcacgcttttctctaacattgtcctctcaggaggctctaccctgttcaaaggttttggtgacaggctcctgagtgaagtgaagaaactagctccaaaagatgtgaagatcaggatatctgcacctcaggagagactgtattccacgtggattgggggctccatccttgcctccctggacacctttaagaagatgtgggtctccaaaaaggaatatgaggaagacggtgcccgatccatccacagaaaaaccttctaatgtcgggacatcatcttcacctctctctgaagttaactccactttaaaactcgctttcttgagtcggagtgtttgcgaggaactgcctnnnnnnnnnnnnnnnnnnnnnnnnnnnnnnnnnnncacatgcgagtgccgtgtggccctgggaccctgggcccagaaaggacgatgaactacctgcagtggtgatggcctgaggcctggggttgaccactaactggctcctgacagggaagagcgctggcagaggctgtgctccctcctcaggtggcctctggctggctgtgggggactccgtttactaccacagggagacagagggaggtaagccatcccccgggagaccttgctgctgaccatcctaggctgggctggccccagcctcaaccccacaccagggtgccctgaggcccaggagatgtgctccatatcgatgctcctgatgcacatgaggactgggactgtggttgagtactgatggaagagcaaaaggagggagggtggaagaggcagcacaagagctataaagagacggcgacaaggagagaagcaccgaagccccacaatggttcaaaaggcaacaggaaccaaacggccactggaggaaggcaaggagcgcccacctctgacagctgagacaaagtcccgagacagcacattcgggagcatgagacaataaggaacagaagtccagacacgatccacttggagtgtgacagcgatcgaacaggagaaaaagagcagacagcggaaagaaggacacgagacagagaaagacaaaaaagccaccaaagaagacagaagacgagaagaacaaacacagaccaca

SEQ ID NO: 70112 - DNA, 1345 bp, Homo Sapiens
  misc_feature (1133)..(1188): n is a, c, g, or t
ggtccaaggtagcgaggcctgggtggcgaattcggcacgaggagcacgttcgtgtcatggcaggagcccttgaaggcgacatcttcattggccccaaagctgaggagcaccgagggctgctttcaatccgctatcccatggagcatggcatcgtcaaggattggaacgacatggaacgcatttggcaatatgtctattctaaggaccagctgcagactttctcagaggagcatcctgtgctcctgactgaggcgcctttaaacccacgaaaaaaccgggaacgagctgccgaagttttcttcgagaccttcaatgtgcccgctcttttcatctccatgcaagctgtactcagcctttacgctacaggcaggaccacaggggtggtgctggattctggggatggagtcacccatgctgtgcccatctatgagggctttgccatgccccactccatcatgcgcatcgacatcgcgggccgggacgtctctcgcttcctgcgcctctacctgcgtaaggagggctacgacttccactcatcctctgagtttgagattgtcaaggccataaaagaaagagcctgttacctatccataaacccccaaaaggatgagacgctagagacagagaaagctcagtactacctgcctgatggcagcaccattgagattggtccttcccgattccgggcccctgagttgctcttcaggccagatttgattggagaggagagtgaaggcatccacgaggtcctggtgttcgccattcagaagtcagacatggacctgcggcgcacgcttttctctaacattgtcctctcaggaggctctaccctgttcaaaggttttggtgacaggctcctgagtgaagtgaagaaactagctccaaaagatgtgaagatcaggatatctgcacctcaggagagactgtattccacgtggattgggggctccatccttgcctccctggacacctttaagaagatgtgggtctccaaaaaggaatatgaggaagacggtgcccgatccatccacagaaaaaccttctaatgtcgggacatcatcttcacctctctctgaagttaactccactttaaaactcgctttcttgagtcggagtgtttgcgaggaactgcnnnnnnnnnnnnnnnnnnnnnnnnnnnnnnnnnnnnnnnnnnnnnnnnnnnnnnnngccctgggaccctgggcccagaaaggacgatgaactacctgcagtggtgatggcctgaggcctggggttgaccactaactggctcctgacagggaagagcgctggcagaggctgtgctccctcctcaggtggcctctggctggctgtgggggactcg

SEQ ID NO: 70113 - DNA, 957 bp, Homo Sapiens
caaggtagcgaggcctgggtggcgaattccgcacgaggggagtcctacgatgtgatcgccaaccagcctgtcgtgatcgacaacggatccggtgtgattaaagctggttttgctggtgatcagatccccaaatactgctttccaaactatgtgggccgacccaagcacgttcgtgtcatggcaggagcccttgaaggcgacatcttcattggccccaaagctgaggagcaccgagggctgctttcaatccgctatcccatggagcatggcatcgtcaaggattggaacgacatggaacgcatttggcaatatgtctattctaaggaccagctgcagactttctcagaggagcatcctgtgctcctgactgaggcgcctttaaacccacgaaaaaaccgggaacgagctgccgaagttttcttcgagaccttcaatgtgcccgctcttttcatctccatgcaagctgtactcagcctttacgctacaggcaggaccacaggggtggtgctggattctggggatggagtcacccatgctgtgcccatctatgagggctttgccatgccccactccatcatgcgcatcgacatcgcgggccgggacgtctctcgcttcctgcgcctctacctgcgtaaggagggctacgacttccactcatcctctgagtttgagattgtcaaggccataaaagaaagagcctgttacctatccataaacccccaaaaggatgagacgctagagacagagaaagctcagtactacctgcctgatggcagcaccattgagattggtccttcccgattccgggccccctgaggtgctcctcaggcccaaatttgattggaaaagaaaagtgaaaggcatcccacaagggtcctggggtttcgccatttcagaagtccagacatgggacctgcgggggcaacgctttttctctaaccattggtccctctcagg

SEQ ID NO: 70114 - DNA, 711 bp, Homo Sapiens
  misc_feature (73)..(205): n is a, c, g, or t
  misc_feature (213)..(237): n is a, c, g, or t
  misc_feature (654)..(654): n is a, c, g, or t
gagacagggtctcactctgttgcccaggctatttttaaagggaaatcaggaaataggtaaggtaggaacatcnnnnnnnnnnnnnnnnnnnnnnnnnnnnnnnnnnnnnnnnnnnnnnnnnnnnnnnnnnnnnnnnnnnnnnnnnnnnnnnnnnnnnnnnnnnnnnnnnnnnnnnnnnnnnnnnnnnnnnnnnnnnnnnnnnnnngtttaccnnnnnnnnnnnnnnnnnnnnnnnnngaagcagtgtaacccagaaaagggaaaggaactttgcactgctggagaaaaacaaataggaaaatgctgttctcagaacaggaaccaaggctttctgacgaagaagaaaccttggactctgggatgaccgccacaaataccaacaggtttgaggcagcctgggatgtgatccagaggaaagccaccacagtgaatactatgaaaatgactgtgtttccctgcatggctaactggaaactcaggatatttgctggaaaaaacaaaagactctgttgatccttttcattcctgctgactgtgcaacttgtaatctgcagtttgaatgataacagcataagacctgggaaccgcctataataaagcagtgtgccagaaaggggaagaatttgggacataaattggtgtttccgtcattcncaacttgacgctaagaattttaaagagaaaaaaagaatgcagaaagcaagtgggcag

SEQ ID NO: 70115 - DNA, 749 bp, Homo Sapiens
  misc_feature (227)..(264): n is a, c, g, or t
  misc_feature (458)..(491): n is a, c, g, or t
cttttatatttttatttaaatctggattacgaaaatatagtacccatgagcatttcatgttagaaaccccatttaaagcactataaggctgaataggcacaagcgattaaaagtagatgccaggccacataaaaataaatgttttaatttacttagagctgtattcaagttgtttgataccagacagaaagctgacagtctgttctttgtaaactgcctttccctgnnnnnnnnnnnnnnnnnnnnnnnnnnnnnnnnnnnnnnactaagccccttctgacacctaggcagataaagataagagtagtgcgcagtacaaatgtcagctctgaagaggaggaagtaaatcttcaatgctagggcagatcttcactatccgtgatccagtcttaatttgagcatgagagcaaaatttagtcatctacacaagaagcaaaagcaaggaatagttgttgggnnnnnnnnnnnnnnnnnnnnnnnnnnnnnnnnnnaggcaagaagtgttgccggtagggtatgtgtgctttctttgccttcctatttcctttcaaagaaatctcttgtaaattacaaaactgtgaattgggttgccaaaaactgttgcccttcgttagatgcttcaaacagtgtaaatcctatactgcaccctgtccacctctgctccctcctccctcccctgagagtgaggacctcatccgaccatgtaattaccattcgcttgctattaaagagcctttcaaactcaaaaa

SEQ ID NO: 70116 - DNA, 1406 bp, Homo Sapiens
  misc_feature (96)..(114): n is a, c, g, or t
  misc_feature (136)..(187): n is a, c, g, or t
  misc_feature (254)..(374): n is a, c, g, or t
  misc_feature (1329)..(1364): n is a, c, g, or t
caaaactaggttggttaaacatatctctggtacatcaaggggcatgatacaaaccagtctaaagactgtttataaaggagagagctggcgacttannnnnnnnnnnnnnnnnnnggacagagtctccctttgtcannnnnnnnnnnnnnnnnnnnnnnnnnnnnnnnnnnnnnnnnnnnnnnnnnnntgggctcaagtgttcctctcaccttatcctcctgagcagctgggactacaggcacacaccaccacannnnnnnnnnnnnnnnnnnnnnnnnnnnnnnnnnnnnnnnnnnnnnnnnnnnnnnnnnnnnnnnnnnnnnnnnnnnnnnnnnnnnnnnnnnnnnnnnnnnnnnnnnnnnnnnnnnnnnnnngtgtgtgtcactgtgcctgacagctgacagttttaactgacaacttggataacagaggctgctattttggttttagataattggccagtgacagagtttacccttgcctcctttcttggtctgccagctttgtcctttctgagtgattctctttctgtattgagaggaagtgtgggtctacatagggatgtttggatgctatggcaagaatctttttgtgtttggagtgtagtccatttgcaatagaaataaaaaaatccgtcaccaaattgtaacctggatgttatagcccagcatctagaaatcctatgaaatgtattagcacaatatcttgccattgtcccatctaggaaattttttcttgttgtgaggtagggaagtgaggaggaaagccatgccgaagcaaatgttagaatcttaggcatcctatttgttcatgccatgggtatttgctttggacttggagtctgtactttgaaagaggcctttgaaaaacaaataattctgtgtgaattttcttgtagcgtgcttcatgaaaatatctacttatccaggtttgcaaatgtacatgttcatttgaatgtaaatcaccatttcttggaaccccacgttttttcttaaaaattattctgaattaaatgtatatttctttagccttccctacacagtactaataaaagacttttctttctgttcatgaatggatgcctttatgtgatatagagtcatgtgtgtatgtgtagctttaagggcaatttcagaaatgcattagatgaatgacattttataaagcgatcacaattgatatctacaggctattatgtctcatgttgattcatgatccaggaagttttatgtatttaaaaaattgctatcgtgttatatttttccaatttttggagaagaaaatagctgtttaggctctctagccacaataaatgtaagcaggaaatcnnnnnnnnnnnnnnnnnnnnnnnnnnnnnnnnnnnncctgagcaggcggccgcaagcttattccctttagtgaggtta

SEQ ID NO: 70117 - DNA, 1311 bp, Homo Sapiens
  misc_feature (45)..(147): n is a, c, g, or t
  misc_feature (220)..(267): n is a, c, g, or t
  misc_feature (1151)..(1151): n is a, c, g, or t
gggtccggaattcccgggatatcgtcgacccacgcgtccgattgnnnnnnnnnnnnnnnnnnnnnnnnnnnnnnnnnnnnnnnnnnnnnnnnnnnnnnnnnnnnnnnnnnnnnnnnnnnnnnnnnnnnnnnnnnnnnnnnnnnnnnnctttgggactcttcaaccacagactgaaggctgcactgtcggcttccctatttttgaggttttgggactcaannnnnnnnnnnnnnnnnnnnnnnnnnnnnnnnnnnnnnnnnnnnnnnnaccttgtgatcataattgcccccctggggtcctcttggcttctctctcctgtcgtggaaccatgcctcacaaagcaagggctgttggcccagagtactctctgcttactgcatgaaagaagaacctctgattcatgcatgaggctggatgaatgaaaggagctcatagctctccatcatactcccctgaaacatagcctcagcaacaagcttctaagggcagaacgagaaatgatgaagccccgctcctcctgggaagcagaaaactgcagctgaaagatggggaggagttttggaattttcaccacttaccagttattttggagagctgatcagtagaacgcctcatgctgtcatcatagaagttgatcaaagtattgttttctttcagtccactaattatatttgtgtcctcaaattatattctaccaaaattctgtttcaccatagtccaagtaattttaaaaaggtttcttgcccctggtcttattatgcaaaacgtaagaactatccttttccaccatctctttgaaaaatcaaatataaaactgaaacacaattctgttcctttcatggtaatcttttctatagtactctattttctgctcattgctgacagtaatgaccacatattacatttcaaatatgtatctagttttcctaatcccttatcaaatatatatttatgaattgcagtggcagtataaacacttccatctatatcttcatatgtagaaagcacagtttcttgcacaggagagacgcaataagtatagtgtctattatgaccacatttataagtcaaaaaggagtttgaaatgtttctacttaaaaagccctcctttttcaaaaattctgtgagactttgtgtagaacagggaattnattactttccttaagtggggtaggtagaattcaccaagtgatagccctcctatttcctgggaggtttctttttggggcaatggattttttaaaccttataaaaaccccagttttaagtttgaaccggccctttgaaggggctattataaaattggatatc

SEQ ID NO: 70118 - DNA, 1026 bp, Homo Sapiens
gaagaacactgttgtagtttagaaggcttttcataaatcccctcataggcaaagatgaaaacttcccactatttttttcccctcttaggaagacatactggaaagaaaatgtttagcatcttagtgtagtatagctattgtaaacagttcatgactagattttgattcggaaatctatactgaccaaggattaatcttaaggattgtataattcattaaagctgtggtctttccatgtggagactgatagaaaataattttgtcccaagtcttatttgctgactttttctgtcatgagtgagattgttgaacaaactgaatatatgggctatagcaagtagctttacagtacagatcttacaattaagttttgcttttgttaaagtgtgtaccattttttctgtttggagtaagacaaaaattgttttgacataggttccctagggtacacttgctctagcatactttaaaggccactgttgcaaagtctacattttatgctgaatctgcattctgtcaggcacccgtagaaagacctcagtacatgctttgcactctcctttgctccctttttccaatttcttattgcatatcattttgttgtaatacagaaagcagcatttttaaatgtccgtgttaagaattggcccactggtaccaactcacctctattttgtcagttcatagttgaagattttgttttatttcaaaaacaaagtacatttttgaaataatgtttcagaataaaataatctcacttttaagtgatccattttaaaatttgtaattcaataaagttttttttgttgcgtaacccgccacccacccaccgcgacaagaatacaaaaatttgtcgggccgcctcgggccctcgaaaaaaactttccaagaccatttccttttggggcgccgcggggcccccagtaggggtaaaggggaaccatggggcccataaccctggttttccccttagggggagaattccccggggggccaagtgaaacatagaggggcctttggggaatt

SEQ ID NO: 70119 - DNA, 1441 bp, Homo Sapiens
  misc_feature (42)..(84): n is a, c, g, or t
  misc_feature (87)..(121): n is a, c, g, or t
agcgaaagctgatatcgactatatgggcgctagctcgtaatnnnnnnnnnnnnnnnnnnnnnnnnnnnnnnnnnnnnnnnnnnncgnnnnnnnnnnnnnnnnnnnnnnnnnnnnnnnnnnncagtcgacggtaccggacatatgcccgggaattcggccattacggccggggagagaggctgttcgcagagctgcggaagatgaatgccagaggacttggatctgagctaaaggacagtattccagttactgaactttcagcaagtggacctttttgaaagtcatgatcttcttcggaaaggtttttcttgtgtgaaaaatgaacttttgcctagtcatccccttgaattatcagaaaaaaatttccagctcaaccaagataaaatgaatttttccacactgagaaacattcagggtctatttgctccgctaaaattacagatggaattcaaggcagtgcagcaggttcagcgtcttccatttctttcaagctcaaatctttcactggatgttttgaggggtaatgatgagactattggatttgaggatattcttaatgatccatcacaaagcgaagtcatgggagagccacacttgatggtggaatataaacttggtttactgtaatagtgtgctgttcatggaaaccgagggctgcatcttgtttatagtcatctttgtactgtaatttgatgtacacaacattaaaagtactgacacctgagaatttctgctcaagtagtatcagtgatcatttaaaatttggaggggtctttggtttacagccatgtgacaattaaaagcactaaagggagatcatgttaaagctcttaatttatattaaaacagtagcctttgtctttaaaaaagttgttgctcatgaatattataaaatgatctacaggtttcaattcaacctgtttctaggtttttttgtaaatttagttttgattaagcattataagcatttgagtctataaactttatagtagcatctttcagaataaacatttttaattgatttcagtggcaactctcaaattgattacaatatgagatatatcagtgtcgtccattaacactcataagaataatatttactgtgtcagtgctattttaggattatagttattgtttgattatttcaggttgaaaagtagaagttccaaggttttgattttggtctggtctttaagtgaaaaattaaagcaaccagtagatgtaggttaaacttttacttcatagacttaatatgtaattaatatattgccaagcaacactgttaaagaaaagtaaaactcattttttcttgttcttaatttatatattacaagatactgtaaggtattctttatgaagttgatatataaaaatttacatttttagaacattagtgaatggatcatcttttacaattaaaagtatattttgattatcagtt

SEQ ID NO: 70120 - DNA, 797 bp, Homo Sapiens
cagtcgacggtaccggacatatgcccgggaattcggccattacggccggggggggtcgactgacggtaacggggcagagaggctgttcgcagagctgcggaagatgaatgccagaggacttggatctgagctaaaggacagtattccagttactgaactttcagcaagtggaccttttgaaagtcatgatcttcttcggaaaggtttttcttgtgtgaaaaatgaacttttgcctagtcatccccttgaattatcagaaaaaaatttccagctcaaccaagataaaatgaatttttccacactgagaaacattcagggtctatttgctccgctaaaattacagatggaattcaaggcagtgcagcaggttcagcgtcttccatttctttcaagctcaaatctttcactggatgttttgaggggtaatgatgagactattggatttgaggatattcttaatgacccatcacaaagcgaagtcatgggagagccacacttgatggtggaatataaacttggtttactgtaatagtgtgctgttcatggaaaccgagggctgcatcttgtttatagtcatctttgtactgtaatttgatgtacacaacattaaaagtactgacacctgagaaatttctggtcaagtagtatcagtgatcatttaaaatttggagggggtctttggtttacaggcatgttgacattaaaagcactaaagggagatcatgttaaagctcttaatttatattaaaacagttagcttgtctttaaaaaagttgtggtcatgaatattcttaatg

SEQ ID NO: 70121 - DNA, 1008 bp, Homo Sapiens
  misc_feature (95)..(129): n is a, c, g, or t
ggcggcaggaagaagaaatgatcatcactatagggcgctagctcgccgaggcgaacgaccgagcgcagcgaagtagtgagcgaggaagcggccgnnnnnnnnnnnnnnnnnnnnnnnnnnnnnnnnnnncagtcgacggtaccggacatatgcccgggaattcggccattacggccggggagggggaaacggaagtgagcggcggggtcgactgacggtaacggggcagagaggctgttcgcagagctgcggaagatgaatgccagaggacttggatctgagctaaaggacagtattccagttactgaactttcagcaagtggaccttttgaaagtcatgatcttcttcggaaaggtttttcttgtgtgaaaaatgaacttttgcctagtcatccccttgaattatcagaaaaaaatttccagctcaaccaagataaaatgaatttttccacactgagaaacattcagggtctatttgctccgctaaaattacagatggaattcaaggcagtgcagcaggttcagcgtcttccatttctttcaagctcaaatctttcactggatgttttgaggggtaatgatgagactattggatttgaggatattcttaatgatccatcacaaagcgaagtcatgggagagccacacttgatggtggaatataaacttggtttactgtaatagtgtgctgttcatggaaaccgagggctgcatcttgtttatagtcatctttgtactgtaatttgatgtacacaacattaaaagtactgacacctgagaatttctgctcaagtagtatcagtgatcatttaaaatttggaggggtctttggtttacagccatgtgacaattaaaagcactaaagggagatcatgttaaagctcttaatttatattaaaacagtagcctttgtctttaaaaaaagttgttgctcatggatattataaaatggtcctaaggtttccaattcaacctggttctaaggtttttttgtaaatttaagtttga

SEQ ID NO: 70122 - DNA, 1840 bp, Homo Sapiens
  misc_feature (69)..(69): n is a, c, g, or t
aaaagaaaaaatagagcaggaggaggcccgggtgtttaattcggcacgaggcgtgcagcaggcacaggncgtaggagctctccatccccgagggaaagaagttcgacacgctctggcagctagtcgagcattattcttataaagcagatggttagttaagagttcttactgtcccatgtcaaaaaatcggcacacagggaaatgttaattttggaggccgtccacaacttccaggttcccatcctgcgtcctcccctgcccaagggaaccggcaagagagtactgtgtcattcaatccgtatgagccagaacttgcaccctgagctgcagacaaaggcccccacagagaagccctacccatggacacagaggtgtacgagagcccctacgcggaccctgaggagatcaggcccaaggaggtttacctggaccgaaagctgctgacgctggaagacaaagaactgggctctggtaattaaggaactgtgaaaaagggctactaccaaatgaaaaaagttgtgaaaaccgtggctgtgaaaatactgaaaaacgaggccaatgaccccgctcttaaagatgagttattagcagaagcaaatgtcatgcagcagctggacaacccgtacatcgtgcggatgatcgggatatgcgaggccgagtcctggatgctggttatggagatggcagaacttggtcccctcaataagtatttgcagcagaacagacatgtcaaggataagaacatcatagaactggttcatcaggtttccatgggcatgaagtacttggaggagagcaattttgtgcacagagatctggctgcaagaaatgtgtagctagttacccaacattacgccaagatcagtgatttcggactttccaaagcactgcgtgctgatgaaaactactacaaggcccagacccatggaaagtggcctgtcaagtggtacgctccggaatgcatcaactactacaagttctccagcaaaagcgatgtctggagctttggagtgttgatgtgggaagcattctcctatgggcagaagccatatcgagggatgaaaggaagtgaagtcaccgctatgttagagaaaggagagcggatggggtgccctgcagggtgtccaagagagatgtacgatctcatgaatctgtgctggacatacgatgtggaaaacaggcccggattcgcagcagtggaactgcggctgcgcaattactactatgacgtggtgaactaaccgctcccgcacctgtcggtggctgcctttgatcacaggagcaatcacaggaaaatgtatccagaggaattgattgtcagccacctccctctgccagtcgggagagccaggcttggatggaacatgcccacaacttgtcacccaaagcctgtcccaggactcaccctccacaaagcaaaggcagtcccgggagaaaagacggatggcaggatccaaggggctagctggatttgtttgttttcttgtctgtgtgattttcatacaggttatttttacgatctgtttccaaatccctttcatgtctttccacttctctgggtcccggggtgcatttgttactcatcgggcccagggacattgcagagtggcctagagcactctcaccccaagcggccttttccaaatgcccaaggatgccttagcatgtgactcctgaagggaaggcaaaggcagaggaatttggctgcttctacggccatgagactgatccctggccactgaaaagctttcctgacaataaaaatgttttgaggctttaaaaagaaaatcaagtctgaccagtgcagtttctaagcatgtagccagttaaggaaagaaag

SEQ ID NO: 70123 - DNA, 147 bp, Homo Sapiens
gcggccgcctactactactactatacggctgcgagaagacgacagaagggaaggcaaaggcagaggaatttggctacttctacagccatgagactgatccctggccactgaaaagctttcctgacaataaaaatgttttgaggcttt

SEQ ID NO: 70124 - DNA, 782 bp, Homo Sapiens
  misc_feature (71)..(71): n is a, c, g, or t
gatcagccctcccctcaccaccttcccgtcccaggccagcccagggcccgaagcccacccactcgcgtctntagcagccgctcttgtcctctgggtacggctcgcgagagtgttggttaccatggtgaagctggcagccaaatgcatcctggcaggagacccagcagtgggcaagaccgccctggcacagatcttccgcagtgatggagcccatttccagaaaagctacaccctgacaacaggaatggatttggtggtgaagacagtgccagttcctgacacgggagacagtgtggaactcttcatttttgactctgctggcaaggagctgttttcggaaatgctggataaattgtgggagagtcccaatgtcttatgtctcgtctatgatgtgaccaatgaagaatccttcaacaactgcagcaagtggctggagaaggctcggtcacaggctccaggcatctctctcccaggtgttttagttgggaacaagacagacctggccggcagacgagcagtggactcagctgaggcccgggcatgggcgctgggccagggcctggaatgttttgaaacatccgtgaaagagatggaaaacttcgaagcccctttccactgccttgccaagcagttccaccagctgtaccgggagaaggtggaggttttccgggccctggcatgacgagctggagcagatcgtgctgcacaaccggagaagacagaattacctctgctcttttaatatataatgatggctttaaataaaattaggagaaaatgtc

SEQ ID NO: 70125 - DNA, 532 bp, Homo Sapiens
  misc_feature (15)..(15): n is a, c, g, or t
ggaaaagtgtcattntcacatctcgtcacacgtacagtgactgcaactaaaagcacaggctttgtagaaacagacatgggttcaggccccagctccaccattcacaaggtgtgtggcttcctgcaaggtaccttcatctctgagttacctgactccatctgagtttccttcttgtaaaactggcatccatgaaagtggctacctcgaagggcgtgaagatgaaatgaggtggaaagtaggtagcccccgaatgagggaagcattgagtgagagctggccctctgacccttctaaaagaacacagccaactttttaaactgtctttccagaaagagatggaaaacttcgaagcccctttccactgccttgccaagcagttccaccagctgtaccgggagaaggtggaggttttccgggccctggcatgacgagctggagcagatcgtgctgcacaaccggagaagacagaattacctctgctcttttaatatataatgatggctttaaataaaattaggagaaaatgtcaaaa

SEQ ID NO: 70126 - DNA, 664 bp, Homo Sapiens
  misc_feature (109)..(109): n is a, c, g, or t
tccctactcatgactctaaaaagtgcatggcttggggctatactttgttttgcagttgttggtatcgtgcctttccttatctacattagcttagactataccttatttntaagaagagaaagtggaaattaactgtggcaaaacctattttggcacaaccacatttgttcattatacaaaattagcttcctatgctttagaaaaaatgtgagttattactctgaaagttgtgattctgattcctcatggtttggagctcagaaatttcttaacatgtctttgctgttagtcaagcacaggatttgttttctgcaaaagtttattttcaatgaagaatacttgtcctaatagctcataaaaagtacctttgcactttaaatcctaggaatagggaacaaggaaacttactgggaagttcaaaagaaagaataacaggaccttctagtcagcagggcatgtttggaaaatgttaatacgccatgatttttgaagaccaattttagttcaggaggtggttttaaatattggatgaaaacttacaggctgttttcaatattcatttctgaaatactttagtatgatagataaatttggttaagttcttgttcattgtgaaatactgttggaagaatttttttcaaaataaagacttctgaatttgtgt

SEQ ID NO: 70127 - DNA, 1328 bp, Homo Sapiens
cagtcgacggtaccggacatatgcccgggaattcggccattacggccgggggagtggtctcaatgcccacttagcctctgcctctgaatttgaccatagtggcgttcagctgatagagcgggaagaagaaatatgcattttttatgaaaaaataaatatccaagagaagatgaaactaaatggagaaattgaaatacatctactggaagaaaagatccaattcctgaaaatgaagattgctgagaagcaaagacaaatttgtgtgacccagaaattactgccagccaagaggtccctggatgccgacctagctgtgctccaaattcagttttcacagtgtacagacagaattaaagacctggagaaacagttcgtaaagcctgatgctggaactacaactggccaagaaggaggagaagctgactggagaaggatttcatctatgagcaggtctccaggctcacagacaggctctgcagcaaaactcagggctgcaagcaggacacactgatcttagccaagaagatgaatggctatcaaagaaggatcaaaaatgcaactgagaaaatgatggctcttgttgctgagctgtccatgaaacaagccctaaccattgaactccaaaaggaagtcagggagaaagaagacttcatcttcacttgcaattccaggatagaaaaaggtctgccactcaataaggaaattgagaaagaatggttgaaagtccttcgagatgaagaaatgcacgccttggccatcgctgaaaagtctcaggagttcttggaagcagataatcgccagctgcccaatggtgtttacacaactgcagagcagcgtccgaatgcctacatcccagaagcagatgccactcttcctttgccaaaaccttatggtgctttggctccttttaaacccagtgaacctggagccaatatgaggcacataaggaaacctgttataaagccagttgaaatctgaatatgtgaacaaatccaggcctctcaaggaaaagacttcaaccaggcttccttgtacccacaggtgaaaaatgtgagcataatacttctaatattattgataagtaaggtaaccacaattagtcagcaacagagtacaacagggtttctatttacccaccaactactatacctttcatgacgttgaatgggacatagaactgtcctacatttatgtcaaagtatatatttgaattgcttatattttctttttcactctttatattgagtacattccagaaatttgtagtaggcaaggtgctataaaaatgcactaaaaataaatctgttctcaatgaagtacggaaatgg

SEQ ID NO: 70128 - DNA, 1239 bp, Homo Sapiens
  misc_feature (1057)..(1065): n is a, c, g, or t
tacaaatgttaacaaagcaattaccaatggcctttttacatattttttctttaatgaggaataatatgcatgtagaaaagacctacttaaagtcttcatttatattctttcaaatcaaatctttatttaataacttatatatgttgttggaatggttacattgttgcagccctttgtattttgtggtagttgaaattgtatcacttctaaacagcaaactgtttttgtttttaattagcagatatctgaagtactatttttgcagggtttgcacaggcccgtaactgtctactactttgatataatctgtatacatcctgtatgctgagctggtaaaatacattgtaaattacatattaaatattttatctgcttttacaagcgcaaggtgcaaaaatatatacaatagtctcattgatgactgtaaagtgaattaacatttggtgattatgcctagcttttttgactaatataaagatcatagctccccttcacttctgtcttaacttgaacatggcgtgtttaaattttcatacatactttacttgaattattgctgttgtcacatatttttgcctctgtgagttcatctgatgattgagcagtagcatttgccttttgggttttttgtttgttattatagaagagatgacttctgctgattttgctttagaatggttaccttagaagaatttgggtggctcatgttgaatttcacttctgcaatagctttcattttctcataggctttataagagatgggttcagtggtatgagcagaggaagagatcccagatagtagccagttaaccaagactcattcatatagcacgtagtttatgttcctgaggcagcacttttagatcctttgtgagcaagttctatttgttcattgcttgccagagatgaacacagaatgttctgtttcattttacaagaactatcctgagtttctgtggatggaaacattacatgtaatgcagatatagtgaacactggaaagatttattaaagaattatatttgtgtatactttataaattagtccctcattagannnnnnnnncttaagcataagactgaacttaaatgtgttaattttagtagaatcaggcactgctcgcagaaggaacacagattgtagagattaacataaattgttcttgttctaatatatatattttttcatttctgtcgtgcttggaaaactagtaaatattatgtctaagataaaatggaa

SEQ ID NO: 70129 - DNA, 1170 bp, Homo Sapiens
  misc_feature (78)..(112): n is a, c, g, or t
  misc_feature (1038)..(1048): n is a, c, g, or t
  misc_feature (1093)..(1113): n is a, c, g, or t
atgatagatcactatagggcgctagctcggttgtagacgaacgacgagcgcagcgagtagtgagcgaggaagcggcgnnnnnnnnnnnnnnnnnnnnnnnnnnnnnnnnnnncagtcgacggtaccggacatatgcccgggaattcggccattacggccggggtggtagtggcagtgttcgtgtgctcaggtctgaatcgccgagggaggaggcggtggaggaagaggtggcggcggtggcggtggtcgtagcggtggcggaggaggcgggtacgaatcagctgcgggcggagacatggccaacatcgcggtgcagcgaatcaagcgggagttcaaggaggtgctgaagagcgaggagacgagcaaaaatcaaattaaagtagatcttgtagatgagaattttacagaattaagaggagaaatagcaggacctccagacacaccatatgaaggaggaagataccaactagagataaaaataccagaaacatacccatttaatccccctaaggtccggtttatcactaaaatatggcatcctaatattagttccgtcacaggggctatttgtttggatatcctgaaagatcaatgggcagctgcaatgactctccgcacggtattattgtcattgcaagcactattggcagctgcagagccagatgatccacaggatgctgtagtagcaaatcagtacaaacaaaatcccgaaatgttcaaacagacagctcgactttgggcacatgtgtatgctggagcaccagtttctagtccagaatacaccaaaaaaatagaaaacctatgtgctatgggctttgataggaatgcagtaatagtggccttgtcttcaaaatcatgggatgtagagactgcaacagaattgcttctgagtaactgaggcatagagagctgctgatatagtcaagcttgcctcttcttgaggagcaccaacatctgttatttttaggattctgcatagatttcttttaaactggcattcttgcctaatgatgttatctaggcaccattggagactgnnnnnnnnnnntccctgctctgtaaataaagctaattaaacgtctgtgtaaatttnnnnnnnnnnnnnnnnnnnnncctgagcaggcggccgcaagcttattccctttagtgagggtaattttagcttggcac

SEQ ID NO: 70130 - DNA, 467 bp, Homo Sapiens
  misc_feature (22)..(22): n is a, c, g, or t
aaaataacacaggtactttccnactgtcagaggctgtgacgttgtgtattcggaaagcagccttcccctgcagtgatgccatcccgcagaatcgaagttctccctcgaatacggtgcactctgcctgtcttccacttcctttccatctgcatacacgttcaccacctgccttaggctggaacttacccacttcagctccatggtctctgcactcatggtcgggaacaggtgacagggcagatcagcgtcttcacccaccatggccaggatgggcccagagggtccaagcacagaaaactgagctgagtgaggcatgagcagctgaagcaaaaggaggcagacacgaaagttgagcagaaggaaggccaggaaacttgccattttcattcatgctgcatatcaggagatactcttagcattcccctctgaaaatcacagcccacagaagaaaggcagttaatagttct

SEQ ID NO: 70131 - DNA, 944 bp, Homo Sapiens
  misc_feature (82)..(82): n is a, c, g, or t
  misc_feature (93)..(93): n is a, c, g, or t
  misc_feature (95)..(95): n is a, c, g, or t
  misc_feature (101)..(102): n is a, c, g, or t
cccttatgcccttatacagtaggaaatgggttagaaaagttatgacttacaagcagacagatgtggacaacagagtgggatntaacacatggnantacatnnatgggagaattaaaaacgttctgagtgctgtgtaatgagctttggtgggtgtcactcctttaatcctcacaacaccctgtcaggtagtctcatttggcaagtatggaagcagaggcagggcaacattaagtagcttacataactcacacggtaatttgtgcagttgggagatgttcagcttcagtccctggccaattgcccgttcttttccagcctgatttttcctgcatgggaagagcccacatgtagccctgaggttcccttcccaggacagctccaggatcgagatcactgtgagtggttgtggagttaagacccctatggactccttcccagctgattatcagagccttagacccagcactccttggattggctctgcagagtgtcttggttgagagaataacgttgcagttcccacagggcatgtgactttgaaagagactagaggccacactcagttaataatggggcacagatgtgttcccacccaacaaatgtgataagtgatcgtgcagccagagccagccttccttcagtcaaggtttccaggcagagcaaataccctagagattctctgtaatattggtaatttggatgaaggaagctagaagaattacagggatgtttttaatcccactatggactcagtctcctggaaaaggatctgtccactcctggtcattggtggatgttaaacccatattcctttcaactgctgcctgctagggaaaactgctcctcattatcatcactattattgctcaccactgtatcccctctactgggcaagtgcttgtcaagttctagttgttcaataaatttgttaataatgctgaaaa

SEQ ID NO: 70132 - DNA, 1277 bp, Homo Sapiens
  misc_feature (78)..(112): n is a, c, g, or t
ctgatagatcactatagggcgctagctcgtttgtagccgaacgacgagcgcagcgagtagtgagcgaggaagcggcgnnnnnnnnnnnnnnnnnnnnnnnnnnnnnnnnnnncagtcgacggtaccggacatatgcccgggaattcggccattacggccggggtcttactgtttctcatggtgagaagacaatatttgctttctctttttcctttcttccggatgagaggctaagccataatagaaagaatggagaattattgattgaccgtctttattctgtgggctctgattctccaatgggaataccaagggatggttttccatactggaacccaaaggtaaagacactcaaggacagacatttttggcagagcatagatgaaaatggcaagttccctggctttccttctgctcaactttcatgtctccctcctcttggtccagctgctcactccttgctcagctcagttttctgtgcttggaccctctgggcccatcctggccatggtgggtgaagacgctgatctgccctgtcacctgttcccgaccatgagtgcagagaccatggagctgaagtgggtaagttccagcctaaggcaggtggtgaacgtgtatgcagatggaaaggaagtggaagacaggcagagtgcaccgtatcgagggagaacttcgattctgcgggatggcatcactgcagggaaggctgctctccgaatacacaacgtcacagcctctgacagtggaaagtacttgtgttatttccaagatggtgacttctatgaaaaagccctggtggagctgaaggttgcagcactgggttctaatcttcacgtcgaagtgaagggttatgaggatggagggatccatctggagtgcaggtccaccggctggtacccccaaacccaaatacagtggagcaacaccaagggagagaacatcccagctgtggaagcacctgtggttgcagatggagtgggcctatatgaagtagcagcatctgttgatcatgagaggcggcctccggggagggtgtatccctgcatcatcagaaaatcccttcctcggctggaaaagaccgccagcattccatcgcagaccccttcctcaagagcgcccaagcctggatcgcagcctgtgagggacctggcctattttgctggtgcttctcgccggaacagtactccttgtgggacaccgacgaatacttctccgtcccggggaaaagcaggaccgaatgcacaaaaggttgcgcgcacagccgaaatactaaaagc

SEQ ID NO: 70133 - DNA, 888 bp, Homo Sapiens
  misc_feature (744)..(744): n is a, c, g, or t
taggggggagagagtatgaagtcgacggcgcgccgaattcggcacgagggagagactcaaccataatagaaagaatggagaactattaaccaccattcttcagtgggctgtgattttcagaggggaatactaagaaatggttttccatactggaacccaaaggtaaagacactcaaggacagacatttttggcagagcatagatgaaaatggcaagttccctggctttccttctgctcaactttcatgtctcactcttcttggtccagctgctcactccttgctcagctcagttttctgtgcttggaccctctgggcccatcctggccatggtgggtgaagacgctgatctgccctgtcacctgttcccgaccatgagtgcagagaccatggagctgaggtgggtgagttccagcctaaggcaggtggtgaacgtgtatgcagatggaaaggaagtggaagacaggcagagtgcaccgtatcgagggagaacttcgattctgcgggatggcatcactgcagggaaggctgctctccgaatacacaacgtcacagcctctgacagtggaaagtacttgtgttatttccaagatggtgacttctacgaaaaagccctggtggagctgaaggttgcagcattgggttctgatcttcacattgaagtgaagggttatgaggatggagggatccatctggagtgcaggtcactggctggtacccccaacccaataagtgagcgacacanggagagacatcccgctgtgagcactgtggtgcgatggatggctgtatcatacactcttgactgaagcactctgtgggtgactgtctcaaatctctcgctgaaaagcacatctccgactctagaccactgtcgctgagactctct

SEQ ID NO: 70134 - DNA, 1355 bp, Homo Sapiens
  misc_feature (992)..(1002): n is a, c, g, or t
agacgctgctgcctgtgagtcttgggccctggcagttgaggaacaagagcgggaggagggagtcaggacccagacctacagtgggtcagtgttcgaaggaccaggttgtggacgagacggggctgtgaggattcaggctcttgggaagggactgactgagaggatcaggctcggagaagacgcggctgtggggacccaggcgacaagaccggacataggcaaccgggaaggaggccagtacggccggcaagtcggggagggccgcgcagtcggaccggctgctgagacgaacgcttcactggggcagtctctgcatatcatggggagatagacgctgctgcctttaattggccttggtcctcacagctccaaaaagaaacaggatctcgataagctctatgagctgaagtccaaagctcggcagattatgaaccagtttggcccctcagccctaatcaacctctccaatttctcatccataaaaccggaaccagccagcacccctccacaaggctccatggccaatagtactgcagtggtaaagataccaggcactcctggggcaggaggtcgtcttagccctgaaaacaatcaggtattgaccaagaagaaattacaggacttagtaagagaagtggatcctaatgagcagttggatgaagatgtggaggagatgctgctgcagattgctgatgattttatcgagagtgtggtgacagcagcctgtcagcttgcgcggcatcgcaagtctagcaccctggaggtgaaagatgtccagctgcatttagagcgccagtggaacatgtggatcccaggatttggctctgaagaaatccgaccctacaaaaaagcttgcaccacagaagctcacaaacagagaatggcattgatccggaaaacaaccaagaaataacacacggaaaggtcagggaatggacagcaatgtatttggagatacttgagctgagaactcagccatctcatccttggannnnnnnnnnnaatgctttacagagaagcatatattttttattaacagtgcagcaatatctataatgactgagaggatctgccaaaagaataaagcctcctaccccaacttccggtcccttttccctgccatctcaaagaggagcaatgtatcttccagagaagattttatttgtggtttattatataagtgactgaatatgggacaaagcattatggtctttttgggtaagacagtattagcaggatttgtaaagggttttgtttccttctcccttccccttttccctgtactttgtaatgtcagtgtttatatgaatatgactttcatttgcttttccagaataaagaagttattaatcgaa

SEQ ID NO: 70135 - DNA, 1250 bp, Homo Sapiens
aatagtgactgctactttatttcttggaaaagcattaaaattaacatgaaattttatttattaaaagcaaagctttttattaaaacttcaatgcttaaaaacatgaaacatcaaacagtatttattaaacattagtatttattaaacattaaaatacaattgtatttactgaacattcttactctttaaagtgaatgtgtaaaaaccacttttaaaagagatctacagataatgagtaactccagaaacaaaggaagatgaggaatgtgaactaaccaggagaagaacttgagatccttgacaattaactccttggtctctcaagatttctatctttacaaagaattctacatgtactatcgttctggcatagaatttccacacatttcacataaaatcccttgtctctaactaaagaaaacttttttcttagtagtgaaataaatgtgttgagtgtctactggtatgcatatatcaagaattttagagacactaaatttttagacatgtgataagaatcatctgactaaaataccttatttccttatcttgagggtcctatggagtcactattattactctaattttacatttgtgtaaactgtgggtcagaggttaaatgacttaagaacgcacagtaaatgtgtcattgaatccacagacttgtggaagtcagcatattttattgggaaaagcatgagcttcaaagtaaaacttatggtcaaatctcattactggtgcgttcttaagtcatttaacctctgagccacagtttacacaaatgtaaaattagagtaataatagtgactccataggaccctcaagataaggaaataaggtattttagtcagatgattcttatcacatgtctaaaaatttagtgtctctaaaattcttgatatatgcataccagtagacactcaacacatttatttcactactaagaaaaaagttttctttagttagagacaagggattttatgtgaaatgtgtggaaattctatgccagaacgatagtacatgtagaattctttgtaaagatagaaatcttgagagaccaaggagttaattgtcaaggatctcaagttcttctcctggttagttcacattcctcatcttcctttgtttctggagttactcattatctgtagatctcttttaaaagtggtttttacacattcactttaaagagtaagaatgttcagtaaatacaattgtattttaatgtttaataaatactaatgtttaat

SEQ ID NO: 70136 - DNA, 842 bp, Homo Sapiens
ggatacatgtcttgtcagaattgtcgtattaagtaatgtctttccctcttgcttctttggcaaatgttgatacacagtgtttggacttactgaagagttactgaagcctgtgggacttaataaatacaatatgctactccctgttgtgattgaccaatacaaataccaaacaagaaagacaatgcattccattagtctgctattctgtttccttcaacttcatacatagattcatatatgaagtactgcattgtaaaacaactatagactcatattaaatgttatttctatttataatattcagcaaaagtgaaagacttgtgaagcatatgacattctatttttgacttattagtcctagtgtgaaagcattaatattattagcatgaaatttttacttcagattttaagctcatgaataaagatatatctgtgttgatctctagatatttttagtaatacccaaatatattcagtccttattgttttaatataagctttctgtgttcagtataattttatttttctcacaccttaaatatgaacttaggaaataaggagggaagtacaaagattattgactatacaacctaccagctgaaagaaagatcttcatcaacatctgtatctttccagaggtatacagaattaaaatttgatcttcaagctttaatgatccagttttaagtcaacggcagaagtatgttgaatatttcatcactcaatcttgaactgatttagaagagactctttgctgaaattgaattgcacttatacatgtaaattgtcaacatgtaatttggaattttctgattaataaatgtggttttggacatctaaaa

SEQ ID NO: 70137 - DNA, 828 bp, Homo Sapiens
cccttctccccaaacaaaatatcaattctgtgtctctacatgcctttgattccttagaggtcggtaatttaacataaaacagggatgtcactttgaggggcagatgaaagtctagagaactgttccttaatagcattgtaaaagttccattccaactgccagtgtagattttaaaagtgttaaatagtgactcccttgattaaactgtttgtaattatttgagtagattaataatgaaaatactttggaaataatatacattttgacattctaccaagaggacaactttggttctggaactggtttctatttgtcaaatcagtttccttttaacataattaatccctttaacaaaaagccgtctatgggattaaaagacacgtgaaatgatacttttattattcccttgctcatataactttaaaaataatacttttagctctaatagctcaagaacacaatattcgttaatgttcagtaaagtagcctgagacattttcaatgtttccttaaggtttttgaatgactgtatatttggcagttaagcagtgccacactacagggtagatatggtaaattttatatttgtatatttacagttacaaaacaaatgtacttttaccttttatttctgaccctgtgtgttagagcagttgcatgctctcctgctgttaaaaacacattgttaagctgtggatttgtactcaataatgacttaggataaacatttattttcattcattgctttacatactagacatttttcttctctttgtaagtagattcaaattagatagtcaataaaacatcttgaaaatcccacaagcc

SEQ ID NO: 70138 - DNA, 1032 bp, Homo Sapiens
  misc_feature (30)..(30): n is a, c, g, or t
  misc_feature (39)..(39): n is a, c, g, or t
  misc_feature (54)..(54): n is a, c, g, or t
  misc_feature (63)..(437): n is a, c, g, or t
ccagcacgcgccttttaacgttcttgcctnttgctgccntttgctcacatgtcnttcctgcgnnnnnnnnnnnnnnnnnnnnnnnnnnnnnnnnnnnnnnnnnnnnnnnnnnnnnnnnnnnnnnnnnnnnnnnnnnnnnnnnnnnnnnnnnnnnnnnnnnnnnnnnnnnnnnnnnnnnnnnnnnnnnnnnnnnnnnnnnnnnnnnnnnnnnnnnnnnnnnnnnnnnnnnnnnnnnnnnnnnnnnnnnnnnnnnnnnnnnnnnnnnnnnnnnnnnnnnnnnnnnnnnnnnnnnnnnnnnnnnnnnnnnnnnnnnnnnnnnnnnnnnnnnnnnnnnnnnnnnnnnnnnnnnnnnnnnnnnnnnnnnnnnnnnnnnnnnnnnnnnnnnnnnnnnnnnnnnnnnnnnnnnnnnnnnnnnnnnnnnnnnnnnnnnnnnnnnnaagaattcggcacgaggtcaatcagagaacgacgacgaccaagagagaaaagaagatctacaggagtttcattttggacacaagatagtgatgaaaatgaacaagaacaacaatcagacacagaagagggatccaataagaaagaaactcagacggattccatttctagatatgaaaccagttctacatcagctggtgatcgatatgattccttgctgggtcgctctggatcatacagttacttagaagaaagaaaaccttacagcagcaggctagaaaaggatgactcaactgactttaaaaagctttatgaacaaattctagctgaaaatgaaaagctgaaggcacagctacatgatacaaatatggaactaacagatcttaaattacagttggaaaaggccacccagagacaagaaagatttgctgatagatcactgttggaaatggaaaaaagggaacgaagagctctagaaagaagaatatctgaaatggaagaagagctcaaaatgttaccagacctaaaagcagacaaccagaggctaaaggatgaaaatggggccttgatcagagttataagcaaactttccaaata

SEQ ID NO: 70139 - DNA, 353 bp, Homo Sapiens
tttaaattaagagcttgtactctaaggataaagatctttcatatttatttttgtcaaattttggaaagctctttacatatcactggcatcacatcttttctacactgctcctgattggacctttaattctgaagtatcactatttcacagtatagaagaagacttaagaatataataattatataactaacattggtaccttaaatcgatctaggaacgaagagctctagaaagaagaatatctgaaatggaagaagagctcaaaatgttaccagacctaaaagcagacaaccagaggctaaaggatgaaaatggggccttgaacagagttataagcaaactttccaaataaa

SEQ ID NO: 70140 - DNA, 962 bp, Homo Sapiens
aaaatttcaaatatattttattcaaaattctccatttaggagaaaagatatataacaatgtttacacatgctttaataacttatttcactgtacaacttacattctgtataacagtacaataaaccagccaaagaaaataaccagttagcacttaaataagaatctaccatgtaaaaaacacagtatgggacactacaaggtagtatttatatattttttaaatgactgagctacagtacaacagtcatctagttcagtggttgtctaaaacatcaagctgtccacatctttctgattcatgatgggaaagctattatgacctttcacattcgaacatgtcattttattgtgtaaatttggtgggtggggggcagaagggctctattacctttatccctttcttataaatatattttcccttttatattacttccagaattttaaataaaatatttatttgtgtttgtgtaactacaatgtcaacattgtgttagaattatattaatcagttattttatagccagcaaaatggtccaaacgcattaagaaaacaaaagataacttagctctgccaaagtagcacctaggaaaacagcacttcagtaaaatttctcctgctattccttatagcctattgcaggcaaacagcaacaacttcaaaaacataggcagaaatgcaagaaggaagtactcaaggaactattttctgtttctgaaaaaaagatcttattagttagtatattctctaaggaattttataatctcagagttgcaatgattgccaaagcaggtacatggtaagacttagcaagaaaaaaacaagatgaaaatgactgaccagtgaaatctgaacttgttccaagtaattagattttctaaggagaaaaaaggcacaggaggtgcacatttcaatttggctcaaaaataatgaaaattaatttaaaaagttggcaacaattaa

SEQ ID NO: 70141 - DNA, 1068 bp, Homo Sapiens
  misc_feature (16)..(16): n is a, c, g, or t
  misc_feature (32)..(32): n is a, c, g, or t
  misc_feature (50)..(50): n is a, c, g, or t
  misc_feature (56)..(56): n is a, c, g, or t
  misc_feature (61)..(61): n is a, c, g, or t
  misc_feature (491)..(521): n is a, c, g, or t
  misc_feature (799)..(807): n is a, c, g, or t
gggaataaagccaagnttcccccctgggaccnccaacgtcttaccggatnggggancagtngcccaggaggatacccaacttgatagccagagggggttttatgcaaaacgcactcaacctccgcccttgggggaatgaaagggtcacttctgcatcatcactagctagttttctagtgttagagaggcttacaaatgtttgccattctcataagtgttttgaacttgatctttgtgacttgtgcttttttagcttctctcttgaatcagagtatcattgtcttcctccaaggagttagaatttcccagtttaaaacaaaaagggaaatgtcctaggttttctttgtgcttctcatttttcctttgttgattcaattcctgtgatttttgttctcttccctgaagtgctttacagtgcatggaatctccatcattgttattttaacgatagtaattcacagtcctcagaagcctatttttaaagcagaagnnnnnnnnnnnnnnnnnnnnnnnnnnnnnnnccttcctcttttctctcatctcacctctctgtgttgattactaatcatcttagatattattgctagtggatgtatggtagatgggttgaagcttttctgataattattacacaatttaaaacaacatatatatttaaaataaatatatacagtaaatatattgagccatgttaacctgccaatgagatctgtgaaaaaataatggcctcatttttctctttttaatttcttttacccttttgtgaagcagctatacgtggcatacatgtatttaaagnnnnnnnnntagatgtagagtgttatatttacacttttaacttagcatgtggtgttgaagtattactgtagatcaagtttgtcttccgcactaagatgtgaggaaattgtgatttgttctctccaccacaaatgaattacacatttattatcttctatcattttgaaacactgcagtttaccatgggacactgtatatatttcttgccataatggtaaaggactgattgatatatttaagagttaataaatttgtgataactgctgaaaa

SEQ ID NO: 70142 - DNA, 1044 bp, Homo Sapiens
  misc_feature (18)..(18): n is a, c, g, or t
  misc_feature (68)..(68): n is a, c, g, or t
  misc_feature (249)..(249): n is a, c, g, or t
  misc_feature (263)..(263): n is a, c, g, or t
aataagtaagatatatgnccatccctcatattcccagtaatgctgcatccattcagaagcagtgtgtncagttgatcagttctgtcacactatgccaatttttttagcaagatctgcactgaacgtgacagtggaacagtataccactagagtatgtgttctcttctcccgcttcactcttcttcccaatcaaaacaccagtgagcctgtctggtatttgatcatagagaaaagaaagggagtgctgtntgagtgtccttctntgcagaaaggagaaaatgtgattgtgtttttttaccagccctacttctaagtgtcactgcctggtttttctctttttcaaggattagaactaagaggacacaccagcatcggagtgtattaagcccctgaaacacatggtagctagggactgaacacaggaaccgtatgacagcagcacaaacccccaaaggatgttcctgccttgtgggcccctgagccccttgggagactgagaatcatgaccagattcatccagaactgctgcagtgttaagtgaaaatcctctgtagttgttctgcagaggaaccttccttccattagaaaatttctgctcaatacagaatggtccacatcacccaaagtgcactgttggagatgctgtgaaattaaaacctctttgtacctgagacatctagattcacctcaggaggcctgaaggaaatgtgtaacttgtgggaaagaactagacaaccatttaggaattctctagatatactcagcctaacccagtggcttaacacaaggagattggctttgatctttttttcttgtggcatcttccagcaagttagaagtctcatgggataagactgcagttcccctggttcaatagctggaacagtgattttaaatgtccctttttctggatcccttgtaaacatgaaatcattccatggatggctgccttataattttgtctctttccactttaattgtgaatggttaaaaaaatgctgttttctgatattaaatttttattagtgcataccttaaaaaaaa

SEQ ID NO: 70143 - DNA, 1186 bp, Homo Sapiens
  misc_feature (44)..(78): n is a, c, g, or t
gaacgacagagcgcagcgcagtcattgagcgaggaagcggccgnnnnnnnnnnnnnnnnnnnnnnnnnnnnnnnnnnncagtcgacggtaccggacatatgcccgggaattcggccattacggccgggacactagctgcagttatgacagagaagtctccttttaccacaccaattggtcgaaaagatgaagcagatcttgcaaaatcagctttggccatggcggattcagaccacctgacgatctacaatgcatatctaggatggaagaaagcacgacaagaaggaggttatcgttctgaaatcacatactgccggaggaactttcttaatagaacatcactgttaaccctagaggatgtaaagcaggagttaataaagttggttaaagcagcaggattttcatcttccacaacttctaccagctgggaaggaaacagagcctcacagaccctctcattccaagaaattgcccttcttaaagctgtactggtggctggactgtatgacaatgtggggaagataatctatacaaagtcagtggatgttacagaaaaattggcttgcattgtggagacggcccaaggcaaagcacaagtacacccatcctcagtaaatcgagatttgcaaactcatggatggctcttataccaggagaagataaggtatgccagagtgtatttgagagaaactaccctaataaccccttttccagttttactttttggtggtgatatagaagttcagcaccgagaacgtcttctttctattgatggctggatctattttcaggcccctgtaaagatagctgtcattttcaagcagctgagagttctcattgattcagttttaagaaaaaagcttgaaaatccaaagatgtcccttgaaaatgacaagattctgcagatcattacggaattgataaaaacagagaataactgaaactgaaattcatggtcaactgctttaaaaattaagatgaagatacagtcatgaaattatctgaaaatgggtcatcacattaagtatttcattacttaaaatgttggtactagccattaacttaaaggtggtgggaaaaaagcacatactttaaacatgtataattttctagttcctttttaatgatgattattctgaatgtatttgccactacatttacaataaattctttggtattatgcaaa

SEQ ID NO: 70144 - DNA, 1938 bp, Homo Sapiens
  misc_feature (74)..(108): n is a, c, g, or t
  misc_feature (1061)..(1100): n is a, c, g, or t
  misc_feature (1378)..(1390): n is a, c, g, or t
tgagatcatatagggcgctagctcgttcgatgcgaacgacgagcgcagcgaagtagtgagcgaggaagcggcgnnnnnnnnnnnnnnnnnnnnnnnnnnnnnnnnnnncagtcgacggtaccggacatatgcccgggaattcggccattacggccggggggctccgcctggtgcggccgcggcgggagggactggattatgtcggccccgtttgaggagcggagtggggtggtaccgtgcgggaccccgtggggccagtggtaccagaccttggaggaggtgttcattgaagttcaggtgccgccaggcacgcgcgcccaggatatccagtgcggcctccagagccggcatgtggcgctgtcggtgggcggcgcgagatcctcaagggcaaactctttgattctacaatagctgatgagggaacatggactttggaggacagaaaaatggttcgtattgttcttacaaagacaaagagagatgcagcaaattgttggacttctctactagaatctgaatatgcagcggatccttgggtgcaagaccaaatgcagagaaagcttacattagagagattccaaaaagaaaatcctggttttgacttcagtggagcagaaatctcaggaaactacactaaaggtggaccagatttctcaaaccttgagaaataactgctttttttcctgcattctgtggatcctagcagatattgccaacttaatcagataaacagattatgtaatggaagaaaaatgcggatgcctacagttaacagattgcaaaatgtatcttaaaatggttctaaaaattgcattcaaacataatttacataggaaatgtactgtgggaactattctatggatatatggtaaagttgttttggacttgtttttgctcagcatgaagttttatatgctgcattttactaattccatatttaaccatatttttaatacaaaagaacattagagtatagatcatgtgaaatgaagggtgcctttggggaaaattaactttttcttttgataagtatgatattcaataaaattttctaaataggnnnnnnnnnnnnnnnnnnnnnnnnnnnnnnnnnnnnnnnntgacacccgcatcacaccaccaaaaaaatttctaaaccatccgtttggaaacccggaccaaaaaaagcaatctaccttgagacatacctgctcccttagaaaacccttgtacaaactttttggtcctggacccctccccaaataaaaaacggcccgggtgggaatccattcggttttcgaccgaaactccctagccccaccccttggggccctctactcgccccccaatacaaaatagggatctccaagcgacaacatcggattttcccttttaccannnnnnnnnnnnnggggccgtcaccagccgcaaattactctgccgcgacactttccattcacaggcccctctccagtccggggattcggggaatatcccatattatattactccgcgccctttgaagtgagaacacacttcctacttccgcacacagcggtgggagcataatgcctccctctaaggcccgcttttctgccccccaacacataacccctcgccccccacggcaacaaaggacccgtgcgagccacacttgtaattcctcgccgctgttgtttctctccgaccaacctcttaaaactcggagataatgagaaatatcatcccgtcccgcgccggtatttagaatgttcagcgccaccacaacaaataatttgcctccatatatatcgcctcttcactgtaaaacgcaacgccccggggtgtatctactccattctacgcggctatctgcggtggctgaggagaaaataaatcgtgcttttccttacacacatcacacttctcttaggtgaagtagcagcagccaggttccctaacccgtacatatcctccctc

SEQ ID NO: 70145 - DNA, 764 bp, Homo Sapiens
  misc_feature (715)..(715): n is a, c, g, or t
tgaactccatacagttgtagatttcagtttttaaatagtctggggttttatttttcttttcaaaatatctaatagacttagcaatcaatttagaacaaatatttggcccttaatatatctttagtgagggaagtagcttttatttcctgcttgtttaggttttctgttggtacataaaaacaaaattgctgtctcagactgaatctacttgaatctaggaaggcacatctcatccctattgtggtttttagggacacttttctctttcccagagatgagaggaccaattcaggacagaagagccctcgtgaataccaacgtgctagctcaggttcccttctttcctccatcagagctattggtagggttttaaggtcgtgtgtgcatcatgcttccaatgtcaagagatttcctcaaacagcctgtttactagatgaattttccagctggtgaaatacatgagctttgttgttttcctggtcttccaatagcctgtcattattgttagatattatggcacctgttgttgaatgtaggttcccttacagccctggtctagatgatcctagatggggtgagacatatgcaagccattggtatgtgcataagcagttgcaatgaaccttaggctgacttggtagtaggcatttgtctttctgttcatgcattgaataaacatttttaagaaccatctatgtgccaggctttgtgctangcactgacagtagagagatgaagacatagtccttgcacttaagggattc

SEQ ID NO: 70146 - DNA, 1428 bp, Homo Sapiens
  misc_feature (225)..(318): n is a, c, g, or t
ttgtggtgaaagagtatgaagtcgacggcgcgccgaattcggcacgaggctcccccggtgacccctagcaaaccaatggccggcaccacagaccgagaagaagccactcggctcttggctgagaagcggcgccaggcccgggagcagcgggagcgcgaggagcaggagcggaggctgcaggcagaaagggacaagcgaatgcgagaggagcagctggcacgggannnnnnnnnnnnnnnnnnnnnnnnnnnnnnnnnnnnnnnnnnnnnnnnnnnnnnnnnnnnnnnnnnnnnnnnnnnnnnnnnnnnnnnnnnnnnncggctgcagaagcagaaagaggaggccgaagctcggtcgcgggaagaggcggagcggcagcgtctggagcgggaaaagcacttccagcagcaggagcaagagcggcaagagcgcagaaagcgtctggaggagatcatgaagaggactcggaagtcagaagtttctgaaaccaagaagcaggacagcaaggaggccaacgccaacggttccagcccagagcctgtgaaagctgtggaggctcggtccccagggctgcagaaggaggctgtgcagaaagaggagcccatcccacaggagcctcagtggagtctcccaagcaaggagttgccagcgtccctggtgaatggcctgcagcctctcccagcacaccaggagaatggcttctccaccaacggaccctctggggacaagagtctgagccgaacaccagagacactcctgccctttgcagaggcagaagccttcctcaagaaagctgtggtgcagtccccgcaggtcacagaagtcctttaagagggtttgccttggatccgggcacagttgtgagggctcctctgcatcacctaccaggatgtctggaggagaaaaagacagaacaaagatggaagtggcctgggcccctgggggtgggtcctctctgttgtttttaatctgcaccttatagactgatgtctctttggccggagccagatctgcccctcagtgcattcgtgtgctcgcacgcgcagacatcccttctcccccatacacacatatacactcacagcctctctggcctcttcccttggggaggggccacctgtagtatttgccttgatttggtggggtacagtggatgtgaatactgtaaatagcttgtgctcagactcctctgcgtggagagggtgggtgcaggaggcagaccctccccccaaagccccctggggagatcttcctctctctatttaactgtaactgagggggatcccaggtctggggatgggggacaccttgggccacaggatactggttgcttcaggggtacccatgccccctgccctcgcctggaatcagtgttactgcatctgattaaatgtctccagaaataaagaataattctgccaaaaaaaa

SEQ ID NO: 70147 - DNA, 497 bp, Homo Sapiens
  misc_feature (295)..(295): n is a, c, g, or t
atggaggtggagtatttaggacttggtgaccaaacagatgtgagagatggacaaagacaggaaagtataggatggccagcaggttttgcccttgagggctctaaagatgatgaatatagaagaaacaagattaggactgaggccagggtggagagacaatgagtttaactgtatgaagttcctgtgaaacattcaaacgaagacattaaaaaggtagtccaaacactggtatacagtcaggaagaccctcagcatttgatgtggtaattgaagcttcagacagacagagatgtgngatctggggcaggcaagggagtacaggaagtccagaaggaaggcatggcatggaagctcaagcaaatgcctttccaaaaggagaatgaaagatggcacctaaccctgcagagagcagagaaaaggactgcagtgtccactggctctggccacagaagagtcacagtgatttcagagagtaacttgggtttcttagggaaagg

SEQ ID NO: 70148 - DNA, 875 bp, Homo Sapiens
tttttatattttgtttttattcaagagttactcacaggcagcactttaaaattaggctttttaaattaaaggccaaaactaaaaaagtttgcaaatatgacattactaaaagaatgatagccttaataatttaaactctaaaatgtccgtcctgtggagttaaggtctttatacacagaatgtgtaagatcgatatcatttaaaataaacaactgaaaaaccacagatggtgggtaaatttgtcaatgaagataaacatcagtttcagccttctagagtatgaaaaccggcaattaattaatcctgtgacagaatataaactgtacttcagaattttgactttaaagtctctttctccagcagcaaatcagcatatctatgttgaagttccttttctctttcttgttgtcgctgaacgtcttcttttagacactctagcctccggggaatagcagaatcttcatgtttcttgagttcttcaaaagtgcgtaactccaagtgagcctgttcaatttggtcccataagtcattcaactgtttcatgagccccatagcacgagactggtaacccccaagcaaaattttcatcttcttttccatctttgcagccctcttggcttctgtcgtcatgtgacccctgtttatctcgagcctcttttcaagtgattcaattctgtcctttttactagccagattggcccgtgtgtagcggctctgcccaggaagatataaaacttgactgtagcattcttcccacacctggttataagcttcacttgagagctctccatggctcattccttgtttaaccacttccatctcctgcaccaaaacatcctgggcctttttcagctcttctttggagaacttttccc

SEQ ID NO: 70149 - DNA, 419 bp, Homo Sapiens
tttgttacaaaaccttgtattaatcatttcccttcactttcaatataacgttgatatgaaatatagccatgattcttagttacatgggaggaaatgaataataaatacattgtagcaagtttaaaccacaagggtgtttcactggtaacaacatttgaaaactgtacacttgcaaagaacagcatcttcaaacattagtatatctgtatatcagtaaagcttttacatgtaacaaacatgctctttccatatatgacaaatttaaaaaatatgcattgcttggcaacatgaactaggcaaaaatatttctttgttcactaactttatacaggaaaacaggacgaaaggcatgcatgtacaatacagatgcctgcacagggcatgcaacaaaagaaagctttttaaaagtcagcttacat

SEQ ID NO: 70150 - DNA, 991 bp, Homo Sapiens
  misc_feature (867)..(924): n is a, c, g, or t
agaattcggcacgaggggatgttttaccgttttgatgccatcagaaccttcgggttcctgtcacgactgaagttggcacagactgccctgacagtggtagctttgccaccaggctattacttgtactcccagggcctcctcactctcaacaccgtgtgcctcatgagtgggatatcgggctttgccctgaccatgctgtgctggatgagctatttcttacggagactggttggtatcctgtatctgaatgagtctggcaccatgctgcgggtggcccatctgaacttctggggctggcggcaggacacatactgtcccatggcagatgtgattcccctgacagaaaccaaggaccggcctcaggagatgtttgtgcgtatccagcggtacagtgggaaacagaccttctacgtcaccctgcgctatggacgcatcctggacagagagcgtttcacacaggtgtttggggtacatcagatgctcaagtgaacaactgggacctggacctctgggtaaccctgggtcgcctggattaacaggaaggctgagggtgtgggcaaggctgaagaaaggggactgggtacttggagactttgcctgggcccctgggaacatgtgttttgtggtgaataaattcacaaggcaagagctggtgtacaggtttaggaaaaaggctctaagcaagttcttacagcacttgtttgtgacattcagtcagataatggccagaaatttttgttaagagccagttcttagaaaaacctatgccaaagtcacccataaagtccattggtgtgaaagagaaaggcaaagaggtgtggcgggggagcgtaagatttggagtcagaagtctcagttctgtcattnnnnnnnnnnnnnnnnnnnnnnnnnnnnnnnnnnnnnnnnnnnnnnnnnnnnnnnnnnaaagtcctgcttgtttcatgggatgggtgtgggaataaacaataaatgtcaaacgtgtggcagactc

SEQ ID NO: 70151 - DNA, 587 bp, Homo Sapiens
ctacgtcaccctgcgctatggacgcatcctggacagagagcgtttcacacaggtgtttggggtacatcagatgctcaagtgaacaactgggacctggacctctgggtaaccctgggtcgcctggattaacaggaaggctgagggtgtgggcaaggctgaagaaaggggactgggtacttggagactttgcctgggcccctgggaacatgtgttttgtggtgaataaattcacaaggcaagagctggtgtacaggtttaggaaaaaggctctaagcaagttcttacagcacttgtttgtgacattcagtcagataatggccagaagtttttgttaagagccagttcttagaagaacctgtgccaaggtcacccatagagtccattggtgtgaaagagaaaggcaaagaggtgtggcgggggagcgtaagatttggagtcagaagtctcagttctgtcatttgtcctggagcaggttattgagtctctttgaatcttggttttcacatctgtaaaatggaaagtcctgcttgtttcatgggatgggtgtgggaataaacaataaatgtcaaacgtgtggcagaaaaaaa

SEQ ID NO: 70152 - DNA, 1087 bp, Homo Sapiens
cagtcgacggtaccggacatatgcccgggaattcggccattacggccgggggaggcctgcctgaccgaccttcagcagggctgtggctaccatgttctctcgcgcgggtgtcgctgggctgtcggcctggaccttgcagccgcaatgtcaccaggagactaaagtccatcaaaaacatccagaaaattaccaagtctatgaaaatggtagcggcagcaaaatatgcccgagctgagagagagctgaaaccagctcgaatatatggattgggatctttagctctgtatgaaaaagctgatatcaaggggcctgaagacaagaagaaacacctccttattggtgtgtcctcagatcgaggactgtgtggtgctattcattcctccattgctaaacagatgaaaagcgaggttgctacactaacagcagctgggaaagaagttatgcttgttggaattggtgacaaaatcagaggcatactttataggactcattctgaccagtttctggtggcattcaaagaagtgggaagaaagccccccacttttggagatgcgtcagtcattgcccttgaattactaaattctggatatgaatttgatgaaggctccatcatctttaataaattcaggtctgtcatctcctataagacagaagaaaagcccatcttttcccttaataccgttgcaagtgctgacagcatgagtatctatgacgatattgatgctgacgtgctgcaaaattaccaagaatacaatctggccaacatcatctactactctctgaaggagtccaccactagtgagcagagtgccaggatgacagccatggacaatgccagcaagaatgcttctgagatgattgacaaattgacattgacattcaaccgtacccgccaagctgtcatcacaaaagagttgattgaaattatctctggtgctgcagctctgtaaagaaggaaaattcagccagttgattttgtttttagcttactgctgcctttgtccgaagaaactgttcctccattatttgaattactgaagacagcaagatatttgtaaattatcttaaaataaacaacttaaaataa

SEQ ID NO: 70153 - DNA, 1602 bp, Homo Sapiens
  misc_feature (51)..(93): n is a, c, g, or t
  misc_feature (96)..(130): n is a, c, g, or t
  misc_feature (1288)..(1299): n is a, c, g, or t
acacgaacaatcgtacaagaactcaacttaattagggcgcgcactcttgannnnnnnnnnnnnnnnnnnnnnnnnnnnnnnnnnnnnnnnnnncgnnnnnnnnnnnnnnnnnnnnnnnnnnnnnnnnnnncagtcgacggtaccggacatatgcccgggaattcggccattacggccgggggagggcctgaccgaccttcagcagggctgtggctaccatgttctctcgcgcgggtgtcgctgggctgtcggcctggaccttgcagccgcaatggattcaagttcgaaatatggcaactttgaaagatatcaccaggagactaaagtccatcaaaaacatccagaaaattaccaagtctatgaaaatggtagcggcagcaaaatatgcccgagctgagagagagctgaaaccagctcgaatatatggattgggatctttagctctgtatgaaaaagctgatatcaaggggcctgaagacaagaagaaacacctccttattggtgtgtcctcagatcgaggactgtgtggtgctattcattcctccattgctaaacagatgaaaagcgaggttgctacactaacagcagctgggaaagaagttatgcttgttggaattggtgacaaaatcagaggcatactttataggactcattctgaccagtttctggtggcattcaaagaagtgggaagaaagccccccacttttggagatgcgtcagtcattgcccttgaattactaaattctggatatgaatttgatgaaggctccatcatctttaataaattcaggtctgtcatctcctataagacagaagaaaagcccatcttttcccttaataccgttgcaagtgctgacagcatgagtatctatgacgatattgatgctgacgtgctgcaaaattaccaagaatacaatctggccaacatcatctactactctctgaaggagtccaccactagtgagcagagtgccaggatgacagccatggacaatgccagcaagaatgcttctgagatgattgacaaattgacattgacattcaaccgtacccgccaagctgtcatcacaaaagagttgattgaaattatctctggtgctgcagctctggattaatgaaaatcaagttccatcctcagacaagaggtaaagaaggaaaattcagccagttgattttgtttttagcttactgctgcctttgtccgaagaaactgttcctccattatttgaattactgaagacagcaagatatttgtaaattatcttaaaataaacaacttaaaatacgnnnnnnnnnnnncaaacacgcggacagtagggcataaagaaaaaaccacaggacatttcttttaaaacacaatagtatagcgcgggtgccaaggagggctacacgccccccggaaaaacgcccgcgaaaaagaaagggcggtttttgggggcccccccggaccccacaaaaaaatttttcaaacccttcctccttggggccccggcggcccccctagggggagagacgagaacgggggccaaacttctgtccctcccaagagaagaacccccgcggcgcaaacaacaaagtggcttcgggttacctccccccaac

SEQ ID NO: 70154 - DNA, 976 bp, Homo Sapiens
  misc_feature (79)..(113): n is a, c, g, or t
aaaattataatcactataggcgctactcggtctgcagcgaacgacgagcgcagcgaagtagtgagcgaggaagcggcgnnnnnnnnnnnnnnnnnnnnnnnnnnnnnnnnnnncagtcgacggtaccggacatatgcccgggaattcggccattacggccggggggcgcatgcgcgctgaggcctgcctgaccgaccttcagcagggctgtggctaccatgttctctcgcgcgggtgtcgctgggctgtcggcctggaccttgcagccgcaatggattcaagttcgaaatatggcaactttgaaagatatcaccaggagactaaagtccatcaaaaacatccagaaaattaccaagtctatgaaaatggtagcggcagcaaaatatgcccgagctgagagagagctgaaaccagctcgaatatatggattgggatctttagctctgtatgaaaaagctgatatcaaggggcctgaagacaagaagaaacacctccttattggtgtgtcctcagatcgaggactgtgtggtgctattcattcctccattgctaaacagatgaaaagcgaggttgctacactaacagcagctgggaaagaagttatgcttgttggaattggtgacaaaatcagaggcatactttataggactcattctgaccagtttctggtggcattcaaagaagtgggaagaaagccccccacttttggagatgcgtcagtcattgcccttgaattactaaattctggatatgaatttgatgaaggctccatcatctttaataaattcaggtctgtcatctcctattaagacagaagaaacacgccatcttttgcctttaataccgttgccaagtgctgacagcattgagtattctatgaagatattgatgctgacgtgctgcaaactttaccaagaatacaatctggccaacatccatctactattcgctgaaggagtccaccacttagtgagca

SEQ ID NO: 70155 - DNA, 997 bp, Homo Sapiens
  misc_feature (82)..(116): n is a, c, g, or t
  misc_feature (878)..(878): n is a, c, g, or t
  misc_feature (908)..(908): n is a, c, g, or t
  misc_feature (950)..(950): n is a, c, g, or t
aaagatttgttactaactataggcgtagctcgcggtagtcgaacgacgagcgcagcgaagtagtgagcgaggaagcggccgnnnnnnnnnnnnnnnnnnnnnnnnnnnnnnnnnnncagtcgacggtaccggacatatgcccgggaattcggccattacggccggggaccgaccttcagcagggctgtggctaccatgttctctcgcgcgggtgtcgctgggctgtcggcctggaccttgcagccgcaatggattcaagttcgaaatatggcaactttgaaagatatcaccaggagactaaagtccatcaaaaacatccagaaaattaccaagtctatgaaaatggtagcggcagcaaaatatgcccgagctgagagagagctgaaaccagctcgaatatatggatcgggatctttagctctgtatgaaaaagctgatatcaaggggcctgaagacaagaagaaacacctccttattggtgtgtcctcagatcgaggactgtgtggtgctattcattcctccattgctaaacagatgaaaagcgaggttgctacactaacagcagctgggaaagaagttatgcttgttggaattggtgacaaaatcagaggcatactttataggactcattctgaccagtttctggtggcattcaaagaagtgggaagaaagccccccacttttggagatgcgtcagtcattgcccttgaattactaaattctggatatgaatttgatgaaagctccctccatcttaaaaaattcagggctgtcatctcctattagacggaagaaaagccctctttttcccttataccgttgcaagtggctgacagcatgagtttcctttgacgattttgatggctgacggggctgcnaatctcccaaaaataccatctgggcccaantccttctactacctccctgaaggagtcccccccttagggaancaaattggtcggaatgacggcccctggaccattgccgaccatgaaca

SEQ ID NO: 70156 - DNA, 1298 bp, Homo Sapiens
  misc_feature (80)..(114): n is a, c, g, or t
gagatgattaatcactatagggcgcctagctcgttcgagcgaagaacgagcgcaggagtagtgagcgaggaagcggacgnnnnnnnnnnnnnnnnnnnnnnnnnnnnnnnnnnncagtcgacggtaccggacatatgcccgggaattcggccattacggccgggggatagcgcgcgaggccctcggtcggacgggacgctcgggattcagggactgcctcggcacacgggaagttgccctacaggcgcgggagaaagcgcaggcggcggcttagcagggagaggcaggctgcagtgcacatgggtcaggcacacgcgaggggcagcccccgagggccgtcccagagtcccccgcgccgccggggtcctaacggggtgcaccgtcttccgccgcacgtggattcagcgcgatgcccaaatccaagcgcgacaagaaagtctccttaaccaaaactgccaagaaaggcttggaattgaaacaaaacctgatagaagagcttcggaaatgtgtggacacctacaagtaccttttcatcttctctgtggccaacatgaggaacagcaagctgaaggacatccggaacgcctggaagcacagccggatgttctttggcaaaaacaaggtgatgatggtggccttgggtcggagcccatctgatgaatacaaagacaacctgcaccaggtcagcaaaaggttgaggggtgaggtgggtctcctgttcaccaaccgcacaaaggaagaggtgaatgagtggttcacgaaatacacagaaatggactacgcccgagctggtaacaaagcagctttcactgtgagcctggatccagggcccctggagcagttcccccactccatggagccacagctcaggcagctgggcctgcccaccgccctcaagagaggtgtggtgactctgctgtctgactacgaggtgtgcaaggagggcgatgtgctgaccccagagcaggctcgcgtcctgaagctttttgggtatgagatggctgaattcaaggtgaccatcaaatacatgtgggattcacagtcgggaaggttccagcagatgggagacgacttgccagagagcgcatctgagtccacagaagagtcagactcagaagatgatgactgaaagggactcgggactgaaggtctcctggaagcttctgggtctcactggaccatcaggactgctgccgcccctctggagagagcagctttttatttgtctgtagacagggaacatgatgggcactgacctcctgtaaagaataaaactgtgggccgggcgcggtggctca

SEQ ID NO: 70157 - DNA, 1318 bp, Homo Sapiens
  misc_feature (661)..(724): n is a, c, g, or t
cagtcgacggtaccggacatatgcccgggaattcggccattacggccggggctttgctgcctttacgatacagcaaaatttgattctccattaccaggctgtacacaaatcagatctacctgcattttcagcagaggtcgaagaggaaagtgaagctggtaaagaaagtgaagaaactgaaactaaacaaactttgaaagaatttcgatgtcaggtaagtgactgttctcgaattttccaagcaattactggcctaatacaacactacatgaaacttcatgaaatgactcctgaagaaattgaaagtatgactgcttcagtggatgttgggaagtttccatgtgaccagttagagtgtaaatcttcatttactacatatttgaactatgttgttcatctagaggcagaccacgggattggactaagggcaagtaaaacagaagaagatggtgtatacaaatgtgattgtgaaggctgtgaccgtatatatgcaacccggtcgaatctcctccgacacatttttaataagcataatgacaaacataaggctcatttgattcgtccaagaagattaacaccaggccaggaaaatatgtcaagcaaggcaaaccaagaaaaatcaaagtctaaacatcgggggacgaagcacagcagatgtggnnnnnnnnnnnnnnnnnnnnnnnnnnnnnnnnnnnnnnnnnnnnnnnnnnnnnnnnnnnnnnnngcaaagattgtgcagattgaagaaaataagccttattctctgaaacgtgggaagcatgtatattctataaaggctagaaatgatgccctgtctgagtgtacaagcagatttgtaacccagtatccatgtatgataaagggatgtacttcagttgttacaagtgaaagcaatataattagacattataagtgccataaattatctaaggcatttacatcacaacaccgaaatcttcttattgtattcaaacggtgttgcaactcacaagtaaaggaaacgtctgagcaagaaggtgctaagaatgatgtgaaagattctgacacgtgtgtatcagagagcaatgataattcaagaacaacagctacagtttcacaaaaggaagttgaaaaaaatgaaaaagatgaaatggatgaactaacagaattgtttattacaaaattaataaatgaagatagcacaagtgtagagacccaagctaatacttcttcaaatgtaagtaatgattttcaggaagataacctctgccagtcagaaagacaaaaagcaagtaatttgaagagagttaataaggaaaaaaatgtctcacaaaataaa

SEQ ID NO: 70158 - DNA, 654 bp, Homo Sapiens
actgataatgtgatgtcttttataaaatggggtaattttacctgatgacagtattgaagactttacttggaaaaattaagaagttgacagctctactttagacctcagaattatttttgaaatactgttttcccagataacaaaagaattatctagagaatgttaaatgtatgactttgtttttctcaataaatgtcagcataataagcaaaggtgtccagttagtccactgagaaacaaacattttgaacttgcagttccctccttttgccacttgatggaaggttcttagaagtctagctatacaacatacttacaagcatatgcttaaacaataaaagttccagagtggcaatagaaaggcatacatagacatctcgctgtttctactattgcaacagagaaggaaagttagtcccatggatctttcaggagcagcaaaaaataaccagagctttactgttgccctgacaagaacccaccatccagagaggtatttcctgagcacctacaagaattccggcactgaggatgggcatcagagtgaggaacaggcaggtagccctgcattttcatcacagtatcaaaaggagaccatattctcctccaggaaaaaataacatagtattaaacaagcagtgaaaccccgtctct

SEQ ID NO: 70159 - DNA, 1036 bp, Homo Sapiens
  misc_feature (822)..(822): n is a, c, g, or t
  misc_feature (829)..(829): n is a, c, g, or t
  misc_feature (836)..(836): n is a, c, g, or t
  misc_feature (843)..(843): n is a, c, g, or t
  misc_feature (865)..(865): n is a, c, g, or t
  misc_feature (905)..(905): n is a, c, g, or t
  misc_feature (919)..(919): n is a, c, g, or t
  misc_feature (923)..(923): n is a, c, g, or t
  misc_feature (926)..(926): n is a, c, g, or t
tttttgccagtcacataataaacatatattaacagatgtacaatttgagaattctaattcaagaaatacagcttccagaggatcctttaggatctatgttcttattgcacatggctcagcccgtctagggacatctaccaagaccagatggtcggggcgtgggggcagagcaccggggccacagtgggtaggcactctggccacatcagttcttataatctctctgggctgaagtggctgcttcattgcagggttggaccttgtttaaaaaccagatttgacatttccttaccgaacttcctttcccagcaagaatcctatttgttgggggacttttaaaaaaagagccgagagaaactctgggagggtggttatcacctcctggctggcagcttggggaagtaaggctttggaagacggcgggcgcaatgacacacccaccgccacaggaaaacatggtcattccagaaggcccaggagaaactgtgggaataaataaaacctccctcctcccactggcggcaagtgctgttttaagcaaaatcctcatttcaatgtgagggtaagaaaactattctggttcaggtgtatcctttgtccaaggtacgagaggaggcctggcggtcacatcaacagcgagtgaagacagaggcagccacgggcactgccttttcttcaggagtcgaggaggctgccctggggtcccggcaccactgactgactcggaggaagaactttctgaagtccttggtgcatgacttaggaaaaaccagtggcaatgatggagctgtgccctgtggcacctataggcaagccactganggactangggtggngaatggntagtaattctggccctctgcangctcccttctgtgggcaggggctggaggctcctgggacangacaagagccacancgtnctnaaggggaaagggggctcacccagcaggtcttggtgggctctacgtgacccatctgactggactgctccatggctgtccctcgtgcggatctggctccaaggcaatcctta

SEQ ID NO: 70160 - DNA, 660 bp, Homo Sapiens
  misc_feature (422)..(467): n is a, c, g, or t
  misc_feature (472)..(585): n is a, c, g, or t
cgggtatgaagacagattttatgatgccagtcatttccagaggggctgcccgctgtggcacagcaccacctggtggccaccccaacccatgcacctccccccatcccagtaccctgacagcaagccaatgaaagaggtgttaatatggctattttccaactgaggaaacaggcaaaagtgtagtcatttctccaagtcagtcaagttagcgagtggtagatgtgctataccttgttgcacccattttgggacctgtttgaatggcatgccccaccatcgctcccacatctgccagttatgtttaaccccacgtgctatttccatcatggcctccccacatcttattttcaaacaggctgaaaacagatggcctcatttgccgactgagatcatgctcaagattagggatgcaccgggcacgnnnnnnnnnnnnnnnnnnnnnnnnnnnnnnnnnnnnnnnnnnnnnnagtgnnnnnnnnnnnnnnnnnnnnnnnnnnnnnnnnnnnnnnnnnnnnnnnnnnnnnnnnnnnnnnnnnnnnnnnnnnnnnnnnnnnnnnnnnnnnnnnnnnnnnnnnnnnnnnnnnngtggtagtgagctgatatcgcaccactgtgctccaggatgagccacagagcaagactccgtctcaaagaaagaaa

SEQ ID NO: 70161 - DNA, 695 bp, Homo Sapiens
  misc_feature (138)..(138): n is a, c, g, or t
gtcaagctcctcaataaacttgtctccacttcttcgagtgcagtgtgtcttcaccaggacccccagaacaccacaaacctggagagcccagaggctgccagaccctgctgcatgggaaggacatctccagggacatgngagagaggacagcctctctgaggaggaaggcccctaaaaggcaaagctaaggccacagcagccacaagaacctcagcgcagagccctgcccacagcaggtgcccagtgaatacctgatgacaaaaggaatcagaggaaaatacaaatcagacagaaaagctgtggaaaatgcagatactccctcaggaacagcagaaatccaaagcagacaccacctccacccctcacatcagccagacctggagagaacgatcatcttgaatgacaatgatgaacacagcgctccctattttgctaagcgctgtgctaaactatatgccttaactcatcttaatgtctacaacagcttatatgagggctttaaaccaaggcttggtaaactactacccatgggccaaacctggcccatcatctagttctgtatagcccacaagccaagaatggtttttacatttttaagtggttgaaaaaaaatcaaaagaatattttgagactgtgaaaaccgtatgaaattcaaattccaatatccaacaaaataaagttttattggaacgggg

SEQ ID NO: 70162 - DNA, 661 bp, Homo Sapiens
  misc_feature (22)..(22): n is a, c, g, or t
atgtgaaagcatttcattcctntaagaggcctaactcattcaccctgacagagttcacaaaaagcccactttagagtatacattgctattatgggagaccacccagacatctgactaatggctctgtgcccacactccaagacctgtgccttttagagaagctcacaatgatttaaggactgtttgaaacttccaattatgtctataatttatattcttttgtttacatgatgaaactttttgttgttgcttgtttgtatataatacaatgtgtacatgtatctttttctcgattcaaatcttaacccttaggactctggtatttttgatctggcaaccatatttctggaagttgagatgtttcagcttgaagaaccaaaacagaaggaatatgtacaaagaataaattttctgctcacgatgagtttagtgtgtaaagtttagagacatctgactttgatagctaaattaaaccaaaccctattgaagaattgaatatatgctacttcaagaaactaaattgatctcgtagaattatcttaataaaataatggctataatttctctgcaaaatcagatgtcagcataagcgatggataatacctaataaactgccctcagtaaatccatggttaataaatgtggtttctacattaaaaaa

SEQ ID NO: 70163 - DNA, 2020 bp, Homo Sapiens
  misc_feature (1369)..(1377): n is a, c, g, or t
  misc_feature (1669)..(1775): n is a, c, g, or t
  misc_feature (1818)..(1920): n is a, c, g, or t
  misc_feature (1941)..(1961): n is a, c, g, or t
ggggacttaaattgcgacttcaggtagaaatcaccaaacagtctccaacgttgcaaagaaatgccttgtatatcaaatcttccaagatcagccggctgcctgcttacttgaccattcagatggctcgatttttttataaagagaaggaatctgtgaatgccaaagttcttaaggatgttaaatttcctcttatgttggatatgtatgaactgtgtacaccagaacttcaagagaaaatggtgtcttttcgatccaaattcaaggatctagaagataaaaaagtgaatcagcagccaaatacaagtgacaaaaagagtagtccccagaaagaagttaagtatgaacccttttcttttgctgatgatattggctccaataattgtggatactatgacttacaagcagtactaacacaccagggaaggtctagttcttcaggtcattatgtatcatgggtgaaaaggaaacaagatgaatggattaacgttgatgatgacaaagtcagcatcgtaacaccagaagatatcttacggctttctggtggtggagactggcatatcgcttacgttctactctatgggcctcgcagagttgaaataatggaagaggaaagtgaacagtaatcttcattttagtatttatgcttagatgtgaaaataaatgttatttgttgatcatttctataatccagagctttagaggaagacacataggtgggtttatgtttcacctcatttggaacaaaagaggacagaagcagaccactctgtgcaccaacctaaaaaattacagagaagagaaaattatctttggattgtgctgccctatataaaggtggcagaaagacatttttaaaaagcttattatttcttgcattattttaaaaagttcagagttgaaatgcctttcaaccatttccttctgtggtcatttttcttgctgcctttttcacccaagattcagcagtcagatgtttactgcacacctattacctattatttgctgttcttgcatggttcaaaccaccattctgtagccacccatcctttgccttatctaacaaacatttttccaggaaggtggaaaaggaagtgttgctctcattgtgtgactcagtgctgctgtccatcccatggaaacatgggcacaatcaagtatttgtccagcctattgcaggcttttcctgactttaaaataaattgtgatcaataatagtacctttgattatacatttattattgtgtctctctctgatgtactgtggattgtacatttaactttggaatggctttgtaataatcagtcttaagaaaatgttgacaagctctggttgcttatttttagaaaatgaggacatttaataataatnnnnnnnnngggattaatagcttttgacctcaagtcttttgtcttctgagtgttggagcttggctgaagacatgtttaatactgtacaatttctgaagatggttattaacactgtgctgttaagcatccatttaaaaatatttgttatcttctttgcctgcctgtattttaaaaagaaatacaaagttgtaaaagtaatggatttctttggatgctgaatgcagtgatgttatcagtcagattctttccttggctcagttgtgtttgtatttcctttcttaattccccaaatcttggctgnnnnnnnnnnnnnnnnnnnnnnnnnnnnnnnnnnnnnnnnnnnnnnnnnnnnnnnnnnnnnnnnnnnnnnnnnnnnnnnnnnnnnnnnnnnnnnnnnnnnnnnnnnnctactaaagatataaaaattagctggatgtggtggtgcacacnnnnnnnnnnnnnnnnnnnnnnnnnnnnnnnnnnnnnnnnnnnnnnnnnnnnnnnnnnnnnnnnnnnnnnnnnnnnnnnnnnnnnnnnnnnnnnnnnnnnnnntgacagagagactctgtctcnnnnnnnnnnnnnnnnnnnnnggccggccgctcgcgacggacgcgtggtcgacgatatcccggaatccggaccggtccac

SEQ ID NO: 70164 - DNA, 1341 bp, Homo Sapiens
  misc_feature (1180)..(1202): n is a, c, g, or t
  misc_feature (1204)..(1208): n is a, c, g, or t
gggagacttaagactactgagttgtgaaaattacaaatctgaagaacatagtgtccaggaaagtggtttagcacgaagaggccccttattaccatgtatcccacttataggaggtgttgggtggtgttattccgcagtgctttcagtcttccatgtgagctcgtgctgctgtgacctgctatatgtagtctcgttgccaaagtctgcagaagagctcttcagttgttggtgtgcactccaagtcaggatggacaatgtgtttacggtttagtattcaatgcattccttggtctttgcctaaataacagttttatatgcacattgaaatggaattatacttcaactatattattaaatgtaatgcaaccaagttcctcccagattaaacttcccaggtgttcagaattacttttgctcttctcacgatcccatattgtattatcacttgtcttctagaggtcagaattccataatatatgtcactcaaaagttacatggttgctttcacttaaggatcattgtggagtttaaagatgaatgaaaaactgcttcttagtttactacatggtataggcccttttttcttaaacccagggatatgattattttgtcatataattttgtttcaggctaaaaggtaaatgtgtttgcttcagaaacttgttaacttcagttttttgaatgcaacaggatacctcccttccaaactgaactgtagaagcagagcagcagcagttatgtgatgcaacacttgatggtacagtaaatttactggcatttttctccttaaaaattaaaatccttgacatagaccatagcatggcttgaaatgctatgtctgcatgataatttaaaatggaagatttaaactttgcactccaaaagcttatttggatttttttcttgcactgttttgtgtaatgcagaataatgattttatttctacagctttgtagattctaacatttatgtatctttattttcatattgtacagtaattttactttaaattatttaaataggctattttatttatttcaaatgcagttgtattagttctcattattgaactgtctgtgcactgtatgtagcaagcatttttcatctgttgtatacaagtggaaagggtattagaagtgtaactgtgctattatttcaataaagacctcttgacatttannnnnnnnnnnnnnnnnnnnnnnannnnnacctggtcggccgccccggccctcaaaagcttttcaaaaccttcctttggcgcccggggcccggaaggaaagggacctgggccttacttgtttctaagaaaacccgggccttggatagggctggaatcccccc

SEQ ID NO: 70165 - DNA, 495 bp, Homo Sapiens
aatccagttttcctgatgagagagggagctatctcttcataagtgatgcaatgcaatgcaggcatgtacaagtacaaggaaagatttatttttaaaaaatcatagtgtaactggatgaataccagcaacagcacctgctaaagcaaacagcctgttcattaaaaactggacttgagggaatggagaaagaatctgaggagcctgcagtcagcatgcttgcagagaccttatggctacagaagacgatgattaacccatagaggttcaatgtagttttcaagaagagggtgggaaagcataagatggggactaagactttgcctttaaccttcatgacatgaagaattgaatgactctttgttggaaaaaatggcagttatgagataattggatccatgttaattatatatatttctgtatatatagtaagtggttattgatgtgcctttgttaaccatttcactatttaataaatgtgtgtgtagtttattcaaa

SEQ ID NO: 70166 - DNA, 2893 bp, Homo Sapiens
  misc_feature (2667)..(2667): n is a, c, g, or t
  misc_feature (2708)..(2708): n is a, c, g, or t
  misc_feature (2714)..(2714): n is a, c, g, or t
  misc_feature (2732)..(2732): n is a, c, g, or t
  misc_feature (2764)..(2764): n is a, c, g, or t
  misc_feature (2766)..(2766): n is a, c, g, or t
  misc_feature (2801)..(2801): n is a, c, g, or t
  misc_feature (2805)..(2805): n is a, c, g, or t
cacccacaacataacacatcacataccatctgacaaaaacggctggtaccggtccggaattcccgggatatcgtcgacccacgcgtccggggcgggaagtcgggtcccgaggctccggctcggcagaccgggcggaaagcagccgagcggccatggagctgtgcgggctggggctgccccggccgcccatgctgctggcgctgctgttggcgacactgctggcggcgatgttggcgctgctgactcaggtggcgctggtggtgcaggtggcggaggcggctcgggccccgagcgtctcggccaagccggggccggcgctgtggcccctgccgctctcggtgaagatgaccccgaacctgctgcatctcgccccggagaacttctacatcagccacagccccaattccacggcgggcccctcctgcaccctgctggaggaagcgtttcgacgatatcatggctatatttttggtttctacaagtggcatcatgaacctgctgaattccaggctaaaacccaggttcagcaacttcttgtctcaatcacccttcagtcagagtgtgatgctttccccaacatatcttcagatgagtcttatactttacttgtgaaagaaccagtggctgtccttaaggccaacagagtttggggagcattacgaggtttagagacctttagccagttagtttatcaagattcttatggaactttcaccatcaatgaatccaccattattgattctccaaggttttctcacagaggaattttgattgatacatccagacattatctgccagttaagattattcttaaaactctggatgccatggcttttaataagtttaatgttcttcactggcacatagttgatgaccagtctttcccatatcagagcatcacttttcctgagttaagcaataaaggaagctattctttgtctcatgtttatacaccaaatgatgtccgtatggtgattgaatatgccagattacgaggaattcgagtcctgccagaatttgatacccctgggcatacactatcttggggaaaaggtcagaaagacctcctgactccatgttacagtagacaaaacaagttggactcttttggacctataaaccctactctgaatacaacatacagcttccttactacatttttcaaagaaattagtgaggtgtttccagatcaattcattcatttgggaggagatgaagtggaatttaaatgttgggaatcaaatccaaaaattcaagatttcatgaggcaaaaaggctttggcacagattttaagaaactagaatctttctacattcaaaaggttttggatattattgcaaccataaacaagggatccattgtctggcaggaggtttttgatgataaagcaaagcttgcgccgggcacaatagttgaagtatggaaagacagcgcatatcctgaggaactcagtagagtcacagcatctggcttccctgtaatcctttctgctccttggtacttagatttgattagctatggacaagattggaggaaatactataaagtggaacctcttgattttggcggtactcagaaacagaaacaacttttcattggtggagaagcttgtctatggggagaatatgtggatgcaactaacctcactccaagattatggcctcgggcaagtgctgttggtgagagactctggagttccaaagatgtcagagatatggatgacgcctatgacagactgacaaggcaccgctgcaggatggtcgaacgtggaatagctgcacaacctctttatgctggatattgtaaccatgagaacatgtaaaaaatggaggggaaaaaggccacagcaatctgtactacaatcaactttattttgaaatcatgtaaaataagatattagactgttttttgaataaaatatttttattgattgaacctttgaccctctatcttattacatttagaggcctggcatctttcttgtgagacaagcttaaggacacaaaagaaacacaactttgtgataccactcttctgaaggctacttatagtaataacttcatagatgaacagcatgattcaggtacagtggctttaaacatcaaagcacatttctcattatataaattaaaacgggtggctccagtgccactatcaaagcttaagttatatcttttatctagttctctgaatgtactgaaacagtactttattcgtccaataaataaagcaataaaaattgttcttactgaaaatgaagtagctaggtgctcctgaatttctctccaaaaactaaaacatttaggtcaaaccacttctccggttgagcagtgtattttgatcttgaggattcatggcttgataagtagatagttctaaggcaaaagtagctgagcctgatgttagcgttcgaagcacagttgaataacccataatttctgctaagggaacaaatccaataacaactttgttgtcctggcgagtctgaatttcctgaatgtttcctcttctttgtgccagatctgccaggacagggctgagataatctctagctactgtaacctcaagattcatcagaggctccaaaacttgcttatcagctttccttcagagccttttgcacgcatcttgagacacaggcagaaatcatagttgtggaggtgcangatgattgtcaggaatgtaagtattgctacatctgaatggngatcangcatggtcttgagaatgngcgtgattcatttcatggctctgggaactcanangctcatgatctcacaatcaatcatcaaggataaanattncatggctgtcactctaacaaagcttgtctagttactagacgtgacacggtagagcctcatccgggagcgaagtcatcatcctgtctta

SEQ ID NO: 70167 - DNA, 502 bp, Homo Sapiens
gcatttcccaaggtcctgctaaccacgggcaagaaatgttgccctaggataaagatggaggaaacaaatcttgatgaaatattgcctctgtgtataagctttgaacttctgaacttaattcaatgattttaatttaggtactcagaaacagaaacaacttttcattggtggagaagcttgtctatggggagaatatgtggatgcaactaacctcactccaagattatggcctcgggcaagtgctgttggtgagagactctggagttccaaagatgtcagagatatggatgacgcctatgacagactgacaaggcaccgctgcaggatggtcgaacgtggaatagctgcacaacctctttatgctggatattgtaaccatgagaacatgtaaaaaatggaggggaaaaaggccacagcaatctgtactacaatcaactttattttgaaatcatgtaaaataagatattagactgttttttgaataaaatatttttattgattg

SEQ ID NO: 70168 - DNA, 2279 bp, Homo Sapiens
  misc_feature (238)..(238): n is a, c, g, or t
  misc_feature (1130)..(1138): n is a, c, g, or t
  misc_feature (1607)..(1637): n is a, c, g, or t
  misc_feature (1755)..(1755): n is a, c, g, or t
aaaaggctattttacatgcaactttgggagaggtttcaaaaccccaccagagggttaacatgcttaaatcctaggagtggatcccatttagtgtaagaataaatgtcagaaatctcttaattgtatacagattgctcaaggattttaaggataattgtgaaagccaaaaattcccaagaaataaaatcttatttgaatttatcacaaaagtttacagtcctagtaaaagccaacaganctgtatagaatatctgcatctacatcaaaaaagggaagttttatcaactagaatagagagctttccaactgctgaatacaaaaatttctcagaatctcttggaaaacagatccattcagactccaatctcctcactgaagtaaaacacaaaaggtgtttaaatgaaggggaatggatgttagttgtaaaaataaaatcagattatttccattatgtcaattcatatactgcatgaactgtctaccatgaaaactttatgtcccaaatttctcaagatgttaaactatgctctttccacaaacatacaatggggttaaagcatgttgctgggtcgtcctttttactagctagcttttgtccatttaccaatttccatttcatttgactaacttccctgataaagtggtatctgtgtttctacagagaaaaataattctgtcttcatcaaaatcacaacagacatgccttcctagaacatttagagggatggccaggtgtaatcactggtttaataaaaacaggagaatatccaaaatgaaaatatttgagtttcaaaatgaattttcatcactgtattctgaagaatgtagttctttcctcttgttagccctccacctcgcaccactcagtccaccattcactggaaagaacaaacctcactgctcttgaatcttttttatactttaagctatgaggcaaggttcagaatcaccagaatgaatcccaagttgccactatttaaaaagtaggtgaagaatgataatgcctgcctgtgtactggtgcagatgggacattttcacccactaaaaccactgcaaaataatttctcaatagataactgaatagtgcatcttccttgaaccagataaatcatacaatatttaattaccnnnnnnnnnccaagcgggtactcaaacttttgataagcaataaagagttctaagaaaggtaaggcaaagaatcttcctgagccaaatggatacaacatggagattttcttatctttcatactaagctaattaatgataggctcaaaaaatgcagtatacttataaaaagccgctttcataaagccagtgcttactaaatgttagcatatcaaagtgggagaaacactgccattttaaagcaataaacttaaaatttcaagaaacagcctatgagaaatagcacttcctatacaaattaggtataaaaaaattaccaaaaatgtattatagtcacaatcacagtctttggagtagtacgtagaaagtctggttttgcttttgtcttttaaaaaagagtaaatacatagcaaagttttattttcagcaagttcatcctcctgttagaacacaaataattcctggtttagggcttcaattnnnnnnnnnnnnnnnnnnnnnnnnnnnnnnntgcagagtgctattcctcaacatggctgttggaaaatttaactccaggaagtgcaatgagtgagatcaggcaaaactacagtaaatacacactcaccataactataacttagtcccanaaggaatgaacaatcctctatacaaggtaaatggggtgaaatgagaaaattggtgacctgtgttttatctttcttttatataggatggataacgcattctttaggtcatctacattaaatgtactttagaaacaaaaatttacttgatattttgacaaacccacccttcattccttaggttaatttctgtgttaatttttacattactaatcattgtactgctatagctaagtcaactaaaaatcagttatgtagtgttgctcaacagatgtacaaatagcaagctctatgattacgtaaaaacaagctttttaaaataaagaatgcaataaagttccaaatgaatggcacagggcaaaacacatataacaaacgtatttagacagagtatcaggtgcccatcagtttctcttctaaagataaaatgcttgaggaaggtcttgagaaaacgctcactccctctaaacttttagcttctacatggtgtcagatgttacaattggtatgaaggataaatgctttta

SEQ ID NO: 70169 - DNA, 1305 bp, Homo Sapiens
agctatgtgacatatagaccgtgtagaaaaagcaggctgtaccggtccggaattcccgggatatcgtcgacccacgcgttccgcacctggccatccctctaaatgttctaggaaggcatgtctgttgtgattttgatgaagacagaattatttttctctgtagaaacacagataccactttatcagggaagttagtcaaatgaaatggaaattggtaaatggacaaaagctagctagtaaaaaggacgacccagcaacatgctttaaccccattgtatgtttgtggaaagagcatagtttaacatcttgagaaatttgggacataaagttttcatggtagacagttcatgcagtatatgaattgacataatggaaataatctgattttatttttacaactaacatccattccccttcatttaaacaccttttgtgttttacttcagtgaggagattggagtctgaatggatctgttttccaagagattctgagaaatttttgtattcagcagttggaaagctctctattctagttgataaaacttcccttttttgatgtagatgcagatattctatacagttctgttgtcttttactaggactgtaaacttttgtgataaaattcaaataagattttatttcttggtaattttggctttcacaatttatctttaaatccttgagcaatctgtatacaattaagagatttctgacatttattcttacactaaatggatcaactctaggatttaggcatgttaacttctgttgtgttttgaatctctccagagttgcatgtagatagcatttatttctgtgcccttaaacccatttagaaaataactacaaagtaaaaatgtagaggaaatagaaatgtattttttcatgaacattttgatacaaatttcatcatttaatgattcaccaatttcttgcattaatttgaatttaagcatttaattcaaagagaggggagcatccattattgatacatgtgggcttttaaaaactccatcctttataaatagtcaaggtttgggccacacaaagtatatttttatcatggaaaaatttcaactcctcaagccgtaatgttgaacagaattggagtattttctttataatttcttgaacaggcaaatgaaagcttattatagaatgcatgtattttcttttatctttggaacatcagcaccagtatattgctggcagctattgtattaaaaaataaagtatattttcactatcataaaggattcttttttcccccctcatgaaaataaacaacaacttggggtaaaagtg

SEQ ID NO: 70170 - DNA, 684 bp, Homo Sapiens
  misc_feature (164)..(164): n is a, c, g, or t
atactttaagctatgaggcaaaggttcagaatcacccagaatgaatcccaagttgccactatttaaaaagtaggtgaagaatgataatgcctgcctgtgtactggtgcagatgggacattttcacccactaaaaccactgcaaaataatttctcaatagataantgaatagtgcatcttccttgaaccagataaatcatacaatatttaattaccgaaaaaaaaccaagcgggtactcaaacttttgataagcaataaagagttctaagaaaggtaaggcaaagaatcttcctgagccaaagggatacaacatggagattttcttatctttcatactaagctaattaatgataggctcaaaaaatgcagtatacttataaaaagccgctttcataaagccagtgcttactaaatgttagcatatcaaagtgggagaaacactgccattttaaagcaataaacttaaaatttcaagaaacagcctatgagaaatagcacttcctatacaaattaggtataaaaaaattaccaaaaatgtataatagtcacaatcacagtcttgggagtagtacttagaaattcggtttgcttttgtcttttaaaaaagagtaaatacatagcaaagtttattttcagcaagttcatcctcctgttagacacaaatatcctgttaggatgcttcga

SEQ ID NO: 70171 - DNA, 607 bp, Homo Sapiens
  misc_feature (491)..(491): n is a, c, g, or t
ttcggcacgaggggggaagtggatttgggaggagacgacctgtgcagaggagagacacctggggtcagcctcatcctcctcacccatccctttgagaacttggctaagggttttctcccaccccacacacctcactcaacccatcctgcctggctggctctcaggagctgcctgagcctgatttttgcagagtttcttcagggaaagcctggagaatgggaagtcttcccccatcctgctctgtgtctctgccctagcagatgaaagggctcaaagggctcgaagcttttggaaaagtactgctgacaaccaggagtcaatcgggcagtgaccccatgcctgtgtgggggagacaagggaggtgtgtgtggggagcatgagtgagcaagctgtcctcggccctccttccactgtcacggccactgcaagaggaaatgagaaggccaggaggccagggatggacagacgctgcccacaaagcaggcacaacnaggtgtggggtggacaggagatgcaagccttgtaattaagatctccagacacctgttgtgaactctcgcccattcacaccctagcaggtggttcacacctcaaggaagaaaatagc

SEQ ID NO: 70172 - DNA, 702 bp, Homo Sapiens
gaagtcagtcccaggagagtgaggttgtgcccacctgctgaagttgagtccctcacagctatctgtgtctcgcaggccttcctgggctatgtgctgtatggagagtgccaggaggtcttgtggtggggaggagtgttccttattctctgcggactcaccctaatccacaggaagctcccacccacctggaagccccttccacacaagcagcagtagcaccacttggctagacggaccagctggaaagatcatgatggtggcccagccttgggatgtcatgtgggactgtgtcctagggcgatccagttgtgcagccttctgaccatcagccaagggaagcaggcctctgatggagcaggctctggctctgtaaggagaggtgcagctgcagcagtgttctaccggaagtgttttgatcatctgtacagtgctttggattcttcctcccaggcctaccccagtgagccttcgcagatgctggagatcctggggttggtctgctttgtgtatggtacttgaaaccacgctgtaattattgtcctgttgccaaacaaaagccagtcatgtaactctagaagcagtgactggtggggctttctgacagttccatgctgatgtatcaggccatctgtgtcatgcttatgtattatggcaagaagaggaaaactggattaataaatacgttttttgtaagttaaaact

SEQ ID NO: 70173 - DNA, 1471 bp, Homo Sapiens
  misc_feature (1360)..(1394): n is a, c, g, or t
ttttggttcagattaatttaatcaggacttataaggtttgttttctgtgttccattctaaagagcataaatattaaatgcttataaaatacacttcattcaaaatgctttaaatacaaaacacaagttgagcacaaaacaatgcatcatggtctcgtggatacatttacaaaacactgtaatgaaaaattaacagcctcaagtaagtagataatactatacaactcttgctcaacaaatgacattttaaacaaagggagaaaaagcccacgcaatgtcaattagtgttgttcttttaaccatattgaatgtgattaaagaagaaattttcgaatttttagtagcggtattaaaattaagttactttctaaactggattaaaaacagcactaagtcttcaaagaacttacttaaagttgttagaaaattttgactttccagttggcaatatgaccaaaatacataagagggcaaatcacaagtgacagcatggagatgtccctaaacatttcacatttcgtacagatcgaggacggtgttcactagtacatacgtgtcataaactggactttcttggctcaatgacaggtgtagaaaatcgtgattcttataagactatctcataaagtccaagaacaaacatattcacccaaaaaaaattctaaactatgcacttttgtttcttaaaaaaccaaacagtgtaaatcagattttaagctaggaagaggaaatccgttttttagcctcgcggctgtatccatcctcctgttcagctgaacggatgaagcacaatagcgacaactttgttacagactaaaatccaacaggtaattccaacaccacctgctactctagtaggaaaggctaccaggcggtctagaggggttatccatttactcggcacgacagccacagggacagaataatacttccaaatgagtgagatcatcagggcagcctgcaatacgtagaaagcgacacttatcacccattttatcttggctaattgagctgtccgagctttcacatgggttttgagcttatccgtcatcttgttgatctttctttccagcctggcatatctggcaaactcgtccatcatgttgactgtggagagctcctgcttcatgtcctggatctccgctctcatctgtgactcctgctccgcgtccttctgcagcaccctggacatgaaggatgagaaggacgggaggaggatcctaagaacattgcatccaaacacgaagctgagcaccagcaaccacgcccagtggtcggccgcggctgagctcatcccggacgctcctggctgtgctgtaatggccgaattcccgggcatatgtccggtaccgtcggactgnnnnnnnnnnnnnnnnnnnnnnnnnnnnnnnnnnncgccgcttcctcgctcactacctcgctgcgctcgtcgttcgctctacagagctagcccctatagtgatcgatcactt

SEQ ID NO: 70174 - DNA, 985 bp, Homo Sapiens
cgcggagcaggagtcacagatgagagcggagatccaggacatgaagcaggagctctccacagtcaacatgatggacgagttggccagatatgccaggctggaaagaaagatcaacaagatgacggataagctcaaaacccatggtactgtgtcccttgcagcctggaggcttcatgagagcggatgaatagagaagtctgtatgtgaagattagtagaatacatactttgcttcttggatgttctgaatattgatggaaacttaagttatctggaggaaactcagtaataagtattactttcctcttatttgctggtgaacctttgctttctaagcacagaaatatctaagatcctctcagattttcctcagagccaactctttaaaattttaagctaactcttaaaaattgtaggttttcatttttaaattcatcacttttctgagagaagcccagaaaaaaagtctcacagtggattcccagaggcttttgttccactctctagaaaaatgcccagcagtgtcctcttctgagtgtcacctcccgggtccagtgtcctgtgatgaagagcgctttctcagggcagcccgtgtgctgagggaccccggtcacagtgtgtgcacagtcagagagctgtctctgtggctaggaaaacagacagaggggcctgtccaggcccaggacaagctggactcccaccaggggttcgtgtacttgtgcacactgggcaaataaggaggaaaatttagtcctgttgtgaaagctcggacagctcaattagccaagataaaatgggtgataagtgtcgctttctacgtattgcaggctgccctgatgatctcactcatttggaagtattattctgtccctgtggctgtcgtgccgagtaaatggataacccctttagaccgcctggtagcctttcctactagagtaggcagtggtgttggaattacctggtggattttagtctgtaaaaacttg

SEQ ID NO: 70175 - DNA, 829 bp, Homo Sapiens
  misc_feature (793)..(793): n is a, c, g, or t
aataaagttaaacagtaaaacaaaaattcacaagctgcctccctgtccacccccgcctccctcccctgccctcggtcttcggcattggttccctttgctccaccccactcacagagacacagggcatccaactgagaaaacgaaactgctctaagcacacggagacgtgatgaagggaggaggtgaactgtttccacattcaagattaaactgagtgaatctgcattttctgggttctgggtggttgcccttcattagccaaattgaaaaaagaaattccctggaccagatgctgaaagagaaaagaggggttggtagttggctatggattttctaaggaagatcactttgctctgattatggaaaagtcttcaagggctgcttcaaactcaaacacagagagaaactctatgggtatcaaacagctcaggctgtttttgggtgcaagagggagcacgtgactgtattatacatgggtagcttctgacctcagcattatctatatagtacctttgctcttgcaagagaagccttggtactaggcaagttaagagatgcctccctgaccctgcagagatgcggtggctaaaggtcccaaggcaaggggtgcctgggaaccttcctgtcttcatccttagcaacagccgagtggatagatgccctgctagatgagaattcagctgcccccgctcatgggcccctctgactcccaaagagctcctaagaggcaatgagtgtgttggcttgtgatctgggaactcccaagaacagcaggcccacctaccttcaaaantgaagccgccaggaccgccaaagaaatgccttgaaa

SEQ ID NO: 70176 - DNA, 647 bp, Homo Sapiens
aataaagttaaacagtaaaacaaaaattcacaagctgcctccctgtccacccccgcctccctcccctgccctcggtcttcggcattggttccctttgctccaccccactcacagagacacagggcatccaactgagaaaacgaaactgctctaagcacacggagacgtgatgaagggaggaggtgaactgtttccacattcaagattaaactgagtgaatctgcattttctgggttctgggtggttgcccttcattagccaaattgaaaaaagaaattccctggaccagatgcttcaaagctgaagccgccaggaccgccaaagaatgccttgaagatattgtttggatcaaaatcacccatattcatgccctcctcatctaggtcctgtccactgtcatagcgagtctttttcttgggatcagagaggatagtaaaggcctctccaacttccttgaacttcttctcctcctccttctgaacctcagcactggctccactatgccgatctggatggtgcatcaaggcccgtttccgataagctttcttgatctcgtcctcagaggcattcttgtccactcctagaatcttgtagtaatctttcctcttactcttcttcagctccagtgcgcattttttaggagctgt

SEQ ID NO: 70177 - DNA, 1035 bp, Homo Sapiens
  misc_feature (54)..(62): n is a, c, g, or t
  misc_feature (930)..(970): n is a, c, g, or t
atatcacacaaatttattaagttatccattaccaattatatgggcaaatcaagnnnnnnnnnccagtatgcatgctctatccctcgtggtaaagaaatttaagtggcataaatttggatacaattttgctcttctgtggcatatagattagcaagatttctcacacttaaaccacaaatatatgtgggtgtttagatacatacatgcatattaaatatcaccagttttttagattagctgcaagtcttttgaaacaagggaattcatgattcaaacacaagtttaatgacaaattatttacccatgtaatcaaacaaatggatatcccttataagtagttacatgatcacttcaggtattcttcagtaagtgatacatacaatcaatcatgattgcctcagacagcttctggcctttatgtataaaatcacaactagcacttaacgttactgagggacatttaataaatgcaatggctcctagttacaaagtagcagaatgaagcagctataagccctgtgcagttactatatgaacacaagaactagctcttggcagtagcaatgaactagactttctcctcaagcagaggtgtattaaaagctgctcagcaatgagaagtagtccctggatatattcataagtataaataaagttacagactcctttgttacaaaaatgtaattaaggtaaataataggacgttaacaaatgctttgtcaatctctcaaaggagaaagcacaggaaaaggaaaatagctggcctaacacccggctcaaattgtacagtcttctatctatatataaaactgtgtgaaataaaagtaaggatgttttatgttctgcttggcacttttgtactctattgttttgtttctgaatcaagtatattaaattaaagccaacctactacatatatagaaagctacnnnnnnnnnnnnnnnnnnnnnnnnnnnnnnnnnnnnnnnnnctttcttgttataaaagatgaagaaaaataaattaaaaagccaaccccttccctttctccaccac

SEQ ID NO: 70178 - DNA, 1392 bp, Homo Sapiens
  misc_feature (232)..(245): n is a, c, g, or t
  misc_feature (1062)..(1071): n is a, c, g, or t
tccaattgtgaaccattccatattgcatctttattgcaaaagtcaacatgcttcttagaaattcagattgtaattgataaaacaaacattacatatatgaatttaaatgtataaacagttagaaattcaacaatatctcctattatactattacacaagttcacaattttgtaaaaactataatacaggcatactatacatcaagaggaaccactattccttttcacatgannnnnnnnnnnnnngaaataatgatccatcaccaaggacccctttcaccttaacaagactgttttccaatttatcatcttagctggtaacaacatttcttcaatgttacataaagaaattgagggaaattttgcaatacttggggttacctttttatcttggacagtgatccactagtatatcaggctgacctagtcaactggtggctattattgctgatcagctacttaaaaagatgtcatacacattaagagggacagaacttgctttagatgctgtatgttatttctgtaaatgaagatgccaagaaaacatgtatggcagttattcacttttaagtgaaattctaacagttgaagatttgatggtggaagtaaatcccaaagggggcaggggatatatataaactattttatgctaacctgaagttttccagtattataattaactcacttcaaattcatctttgagtcaaacatgttttaaaattctttgaaagcacacttttaaagtatttttagtcctgtttaaggtgtactgaaaacttatagaaagggcctcaaaccttactgaaaaaactgtttttcactttaacacacttctatcttctgcccccaatactaaaaagtcaaattttcaactttttactgagagtgaaataagatgtccattttgaggtcaaaaaaatcatatgaaaaggaatctcattctgttgaactgtctactgaaatttttcttagagttccatttatttactgtaattttcagtttccaaatacaaaaatacaacaattcttattgaaatctatacgctggtagttttagtacacnnnnnnnnnncccaaacaaattatttacaaaattatacagtttaagaaaaaactttgtacaaaaaatatataaatcctttgttccctctatcacgtttaaactgtcaggactcaaaatattcaccacaatgaatctttcaaaatatatactgactgagccacagacatcaagaaaaatttcattagagatgatggaggagtaaggagcaagattgtgtattctagatacaccattctgatgttttccttcttttataagcttattttaccttcagtgttactagaaatataacaataacctagaaaaaggaagtcctacagccgcggccgc

SEQ ID NO: 70179 - DNA, 1403 bp, Homo Sapiens
  misc_feature (61)..(103): n is a, c, g, or t
  misc_feature (107)..(141): n is a, c, g, or t
tcccccaacaccccaccaccaacatgagacgactcactatagggcgctagggtcgttatannnnnnnnnnnnnnnnnnnnnnnnnnnnnnnnnnnnnnnnnnnccgnnnnnnnnnnnnnnnnnnnnnnnnnnnnnnnnnnncagtcgacggtaccggacatatgcccgggaattcggccattacggccgggggaaaaagacaaagaattcttaaggcatcttttctctgcttataataccttttccttgtgtgtaattatacttatgtttcaataacagctgaagggttttatttacaatgtgcagtctttgattattttgtggtcctttcctgggatttttaaaaggtcctttgtcaaggaaaaaaattctgttgtgatataaatcacagtaacagaaattcttacttctcttgctatctaagaatagtgaaaaataacaattttaaatttgaatttttttcctacaaatgacagtttcaattttggtttgtaaaactaaattttaattttatcatcatgaactagtgtctaaatacctatgtttttttcagaaagcaaggaagtaaactcaaacaaaagtgcgtgtaattaaatactattaatcataggcagatactatttagtttatgtataagtaaaattcctgatgaaggcagaagagatggtggtctattaaatatgaattgaatggagggtcctaatgccttatttcaaaacaattcctcagggggaccagctttggcttcatctttctcttgtgtggcttcacatttaaaccagtatctttattgaattagaaaacaagtgggacatattttcctgagagcagcacaggaatcttcttcttggcagctgcagtctgtcaggatgagatatcagattaggttggataggtggggaaatctgaagtgggtacattttttaaattttgctgtgtgggtcacacaaggtctacattacaaaagacagaattcagggatggaaaggagaatgaacaaatgtgggagttcatagttttccttgaatccaacttttaattaccagagtaagttgccaaaatgtgattgttgaagtacaaaaggaactatgaaaaccagaacaaattttaacaaaaggacaaccacagagggatatagtgaatatcgtatcattgtaatcaaagaagtaaggaggtaagattgccacgtgcctgctggtactgtgatgcatttcaagtggcagttttatcacgtttgaatctaccattcatagccagatgtgtatcagatgtttcactgacagtttttaacaataaattcttttcactgtattttatatcacttataataaatcggtgtataattttaaaatgcatgtgaatatctttattatatcaactgtttgaataaaacaaaattacat

SEQ ID NO: 70180 - DNA, 1052 bp, Homo Sapiens
  misc_feature (77)..(111): n is a, c, g, or t
aatgatagatcatatagggcgctagctcgccgcagcgaacgacgagcgcagcgagtagtgagcgaggaagcggcggnnnnnnnnnnnnnnnnnnnnnnnnnnnnnnnnnnncagtcgacggtaccggacatatgcccgggaattcggccattacggccgggggttactgtggagaagggctcctactatcctggttctggaattgctcaatttcacatagattataataatgtatccagtgctgagggttggcatgtaaatgtgaccttgaatattcgtccatccacgggcactggtgttatgcttgccttggtttctggtaacaacacagtgccctttgctgtgtccttggtggactccacctctgaaaaatcacaggatattctgttatctgttgaaaatactgtaatatatcggatacaggccctaagtctatgttccgatcaacaatctcatctggaatttagagtcaacagaaacaatctggagttgtcgacaccacttaaaatagaaaccatctcccatgaagaccttcaaagacaacttgccgtccttggacaaagcaatgaaagcaaaagtggccacatacctgggtggccttccagatgttccattcagtggccacaccagtgaatgccttttataatggctgcatggaagtgaatattaatggtgtacagttggatctggatgaagccatttctaaaacataatgatattagagctcactccatgtccatcagttggaaaaaagacaaagaattcttaaggcatctttctcgtgcttataataccttttccttgtgtgtaattatacttatgtttcaataacagctgaagggttttatttacaatgtgcagtctttgattattttgtggtcctttcctgggatttttaaaaggtcctttgtcaaggaaaaaaattctgttgtgatataaatcacagtaaagaaattcttacttctcttgctatctaagaatagtgaaaaataacaattttaaatttgaatttttttcctacaaatgacagtttcaatttttgtttgtaaaac

SEQ ID NO: 70181 - DNA, 1041 bp, Homo Sapiens
  misc_feature (27)..(27): n is a, c, g, or t
  misc_feature (34)..(34): n is a, c, g, or t
  misc_feature (102)..(102): n is a, c, g, or t
  misc_feature (161)..(161): n is a, c, g, or t
  misc_feature (170)..(170): n is a, c, g, or t
  misc_feature (175)..(175): n is a, c, g, or t
  misc_feature (211)..(211): n is a, c, g, or t
  misc_feature (235)..(235): n is a, c, g, or t
  misc_feature (362)..(362): n is a, c, g, or t
tgctcggccagatcgccgaggattctntagtccntgaaagacatttcatgttgtataacgcagtgcataattatccaatagtacgtaaatagcactactagngaagaaaatataatgatctgtagtcacagttgtcatacctgtacatagactcagtaggnaattagtcncaganggagaaagttaaaagtgtccagccagtctgtctcangatcccaatcgtctttttttcccntccttgtactcagagttaccactagtggcatgccaaggaaagctaacaaattcagaaactcgattctgtggagcaggattctttggtactaatcacgatagtgggtccagctttggagttaaccatntgatttgtgatggttttcttttctcctccccaccccaggatgaagtgtcctcttgctagcaccaataaaagatttctaattaacacaattaaaaacacattgccctctcataaagagcaagaccatgaacaaaaagagggcgataaggaaccagccaagagccaggcccagaaagaagaaaacccaaagaaacacagaagccatccttacaagcacagcttccgcgctcgaggttccgccagttactccccgccacgaaagcggagcagccaggacaagtacgaaaagcggtccaaccggcggtgaggctggaaccagggccagccagccctgcgggcctccgtgctccttcggggtgcggtgtgcggagaaggcctgagctggcagggcaaacacctgagagtgactttgacattaggtcctttgttgtttttaaagaggctgctggccacaggcaaaaaaaatgacctagcaactcttgaggaaacaagtgcaaaggaggatgtcttggcaagtttaagctacttctgcagtgtagtagacttacatattgttgtttatcttgtttggaagtgtgtttcaaaataaacatgtctagaatttaaagttttcagagattgttaaaactggttccaattttttggtcatttctcagaaaaataaaatacttataaatccc

SEQ ID NO: 70182 - DNA, 638 bp, Homo Sapiens
ggggccttccgtcggtcggtccttgcttcctgcttcgcctccgcgcctcgcgctatgggacagagcccccgatccgccagcaccacctgaggatccagaaaccgccccagcgatggaagaggatcaggagctggagaggaaagcaatagaagaactgcttaaggaggcaaaacgtgggaaaactagagctgaaacaatgggacccatgggttggatgaagtgtcctcttgctagcaccaataaaagatttctaattaacacaattaaaaacacattgccctctcataaagagcaagaccatgaacaaaaagagggcgataaggaaccagcgaagagccaggcccagaaagaagaaaacccgaagaaacacagaagccatccttacaagcacagcttccgcgctcgaggttccgccagttactccccgccacgaaagcggagcagccaggacaagtacgaaaagcggtccaaccggcggtgaggctggaaccagggccagccagccctgcgggcctccgtgctccttcggggtgcggtgtgcggagaaggcctgagctggcagggcaaacacctgagagtgactttgacattaggtcctttgttgtttttaaagaggctgctggccacaggcaaaaaac

SEQ ID NO: 70183 - DNA, 1450 bp, Homo Sapiens
  misc_feature (1437)..(1437): n is a, c, g, or t
gggccttccgtcctccgcgccttccgtcggtcggtccttgcttcctgcttcgcctccgcgcctcgcgctatgggacagagcccccgatccgccagcaccacctgaggatccagaaaccgccccagcgatggaagaggatcaggagctggagagaaaaatatctggattgaagacctcaatggctgaaggcgagaggaagacagccctggaaatggtccaggcagctggaacagatagacactgtgtgacatttgtattgcacgaggaagaccataccctaggaaattctctacgttacatgatcatgaagaacccggaagtggaattttgtggttacactacgacccatccttcagagagcaaaattaatttacgcattcagactcgaggtacccttccagctgttgagccatttcagagaggcctgaatgagctcatgaatgtctgccaacatgtgcttgacaagtttgaggccagcataaaggactataaggatcaaaaagcaagcagaaatgaatccacattctagtcctttatgcagtatacaaggagaactgtcctgtaggatattctcttcctgatggtgcagaacccagaattagaagtttgtggttacagcatactctgtccttcagaaaggcgtgattctagctgttgaccccttgcagctgttggaatctctgcaagaacctctgtattcttctaataaattccctcttttatttaggagacataagaagaaccctcggaagaagggacaaccagcagcgagccagtgtgaatcaccacgccgcaaaccaacaacgggacatacttggaacccgcgacaaagacccaacgcattggctggcccccgccgcagccccatgaagaacctttcaaagcacgtctccgcgcggcgcgcccgcgcgccagggaaaaggtccaccgggcagcgcgtgtgctgacgggagcccccaccaggcgggcgcttctcggcgcagagcaaccggaatggcgccaggggcgtgctacccccgcatagagagaaaatcgcctcgctggcgctggcaaaccacgagccggtaacggatgcctcgctccgaccccaagtcatacatagcgacggcgctcgcgctcacggtacgcccacccttgctgacgctcatatcatatcacccgcacgccaggaaggtgatgccacccgtgaactggcgtgctcgcaccgtttgcagcttcaacgccccgccgcggtcttgggccccccctttcccgcctgtccctgagctgcacgatcgccaaacccctaggcgttctccaccgcggcgtcctcaaagaccccgggaagcacaatcggcccttaaatgcacccgctgtagcggccccgcgcccggagatacccacgagtcgtgcggcgacatcgcaggacacataagaggcggcgcgcggaagagcccngccatcggatgtc

SEQ ID NO: 70184 - DNA, 444 bp, Homo Sapiens
  misc_feature (328)..(328): n is a, c, g, or t
ttttttggttcatttaagaaatttaattgatcacagtaagacattcaggctacaaaaaccttctatacagtggtttaaaaagtgacacccatctcccagaagccactcatacatacaacggggacatcattctcccaaaaagcgttgcacacagtccagttcgtgcaaataatctttgtacataaagaagaggcatttcagaggcaataaccccctacacagggccccgagaatagtcactgaacaaatacagcaaccagggtttgcaaaaataaataggattttatatatacgtgtgtatacatatatataagtggataacagtttncaaccaatatacaaagtgtaaacatatcaaaaaatctccactatctgtacatggacgcatttacgtgctccgaaaccagaatggcttatcactgttccttgcactgtgggggacac

SEQ ID NO: 70185 - DNA, 835 bp, Homo Sapiens
  misc_feature (279)..(308): n is a, c, g, or t
  misc_feature (619)..(728): n is a, c, g, or t
tttttcatttaagaaatttaattgatcacagtaagacattcaggctacaaaaaccttctatacagtggtttaaaaagtgacacccatctcccagaagccactcatacatacaacggggacatcattctcccaaaaagcgttgcacacagtccagttcgtgcaaataatctttgtacataaagaagaggcatttcagaggcaataaccccctacacagggccccgagaatagtcactgaacaaatacagcaaccagggtttgcaaaaataaatagatttnnnnnnnnnnnnnnnnnnnnnnnnnnnnnnagtgataacagtttcaaccaatatacaaagtgcaaacataacaaaaaatccccactatctgtacagggacgcatttacgtgctccgaaaccagaaaggcttatcacggttccctgcactgggggggacacagtgttttgtccctggggacaattgccaatcccttgtgacatcttcacgcgggagtctgacggaggctgtcactgtctctccggacatcagtgcaacagtaacacggcgatttcagaaagaacctgaagtcccgtcaaacgatccagactggaggatttatttatttttttatagttgtannnnnnnnnnnnnnnnnnnnnnnnnnnnnnnnnnnnnnnnnnnnnnnnnnnnnnnnnnnnnnnnnnnnnnnnnnnnnnnnnnnnnnnnnnnnnnnnnnnnnnnnnnnnnnacattgatgagtctttaggggagggctgcagaggcttttattctaggtggttgacaaggttgcaggtgaaattcttgtcaacctacttctgcattttattaaaatcc

SEQ ID NO: 70186 - DNA, 1054 bp, Homo Sapiens
  misc_feature (762)..(762): n is a, c, g, or t
  misc_feature (856)..(856): n is a, c, g, or t
  misc_feature (873)..(873): n is a, c, g, or t
  misc_feature (877)..(879): n is a, c, g, or t
  misc_feature (889)..(889): n is a, c, g, or t
  misc_feature (892)..(892): n is a, c, g, or t
  misc_feature (900)..(900): n is a, c, g, or t
  misc_feature (935)..(935): n is a, c, g, or t
  misc_feature (940)..(940): n is a, c, g, or t
  misc_feature (943)..(943): n is a, c, g, or t
  misc_feature (947)..(947): n is a, c, g, or t
  misc_feature (1038)..(1038): n is a, c, g, or t
gagtatgaatgcatttatgatcaaaattaacacaccaaaaaaatcaaaccacatttcacagcagaacctgcaaaaacgtttgtattcatcttttttgaaccataaaaaagaatgatttagtcttgtctaatacgacttttaagcaacaaaaataatttaatcatgaagtatcagcttgattatgaatatattctattatctgtatcagttggtaaattaactgtgttacccaaaaaggctgaccagctctaactagtatgaacaggatattgaattcattaatgaatatataactattttgagcatacaaataatctctggttttacacccactacatttcagaatcctgtaaactgtgaggcatacaatatgtttaatgtggcagaaaatcatatgaaatgattattttattctgttcagtccttttcccattaagcatgcaaacaccgtcataaccatctttggtttcacttctacgaggtcatcaggtaatgcatatatccgggcaccgatctttcgagcaactgaaatggcgtatttagcattgttcagcttgtcctcatcagataagttttctctcctgatcatttcttgacgaactgcatttggtgcaatggcatctattaaatctaggacaggtaaacttgtgcttatagatttatccttgaagctggaaatagaagtctttttgtttgcacttttaagagtctgattgacccatttaattataatttcatcatttactttttcaccctctccangatccgataaacattcaatgtgtaccttctcatcagctgccataccaatgccagggtaagtgttgaattccttcatttaggtcctgcccagcantgccaacaaggagattnggcnnntgtctcccangtncactgcanagtacagtttcaatctctcatgttcctccagggangatangangttngtgaatggctcagtgatggactcggtatctcaaagtgaaatactaagatcgcagtcatgtcaatatatgtagggtgatcaaagatatcagntcgatgtcctctctgc

SEQ ID NO: 70187 - DNA, 698 bp, Homo Sapiens
  misc_feature (65)..(65): n is a, c, g, or t
caacaccaagtctctgattccctgactgacctggcattaaagtaacttgacctgaacaatccatntgaaaggagtggctaagaattctctctgttcagtcatctagacaaatcgaattacttgatgtttgccttgaaagaatcaacttctaacctcaaccatccaggaaattgacagtggctgcagtattgactccagtgacataaagttaaccacagtggccttttaacaaatgttgccttttataatgttatctttatgagtttcttgatatgtaagatgaaaaagcatttagaataatcttttaatttgtgtatatttgggatgatatttaggagctatcaatcaaattttacatctcacaatgtactgtttacatggatattggctgctttttttaaggaaaaccacattgagatgtgacaagtgttaggacttgtcacagatttctaactctgccgcataaactataaatctgtaaggtggtacacagcgtgtcttgttagcaaaatttatactttgatatgatcacatgtagaagtagcttcaagaatttcttgtagtcataaatgtttaataatatatgatgtaaaattatattatggagcctaatgatgataacaaagaaaacaatatactgatcttagaaaatgtagacatggttaactgggaaataaaatatagagtggcacttcaag

SEQ ID NO: 70188 - DNA, 879 bp, Homo Sapiens
  misc_feature (89)..(150): n is a, c, g, or t
  misc_feature (154)..(307): n is a, c, g, or t
aaaagattattagtaaaaaaggggagataggtaggagtagaagacagtatcaagaatccagagcccagcacctgtagtcctaactattnnnnnnnnnnnnnnnnnnnnnnnnnnnnnnnnnnnnnnnnnnnnnnnnnnnnnnnnnnnnnncttnnnnnnnnnnnnnnnnnnnnnnnnnnnnnnnnnnnnnnnnnnnnnnnnnnnnnnnnnnnnnnnnnnnnnnnnnnnnnnnnnnnnnnnnnnnnnnnnnnnnnnnnnnnnnnnnnnnnnnnnnnnnnnnnnnnnnnnnnnnnnnnnnnnnnnnnnnttgtagctagggggagagtaggtgaaaagatgaacaacatgaccgggaagatttcctaatctcaccacagcctggctctaccttaagtctttaataaaagcttgactgaaggtaccaaggtgtgctgaagtggaagcaaagttctccaaagtccagcatggtagacatcagtggtggtaaccaaggacagaccccaaggcaaggtgaacctcaaaaatggaacctcaagtctatgcagtccagctgccctccccaccagaaagtccttgttccagcccaacatcagtgcctctgagtttgtttactagaaacaaaggaagaatttccttgtaaaaatatagacagagtagtccctggctttctcctcttgcaggaaggatggattctcccattccataccatctttcccccacactggccccagaaatacttaattcaactatgtgaaaataaagattgtttttggtttgagggcatagggatccatttatccttattctttatgaggcactaaattagctttgtatgttattaaatgtgtctcgtcaatgctgttggcattgtttcatttt

SEQ ID NO: 70189 - DNA, 612 bp, Homo Sapiens
aaatagtaatacaaagattgccaatagctaaaaaataagttcagaaccagacagattcacagctgaattctatcagacattcaaagaattggtaccaatcctattgacactattccaaaagatagaaaaagagagaatcctcccccaaatcattgtatgaagccagtttcaccataatatcaaaaccagggaaggacataacaaaaaagaaagttacagaccaatatccctgatgaacatagatgcaaaaatcctcaagaaaatactaatgaaccaaattcaacaacatatcaaaaagaaaatccaccatgatcaagtgggtttcatgccattaatgcagggatgatttaatatacacaagtaataaatgtgatagagcacatacacagatttaaaacaaaaatcacatgatcatctcaatagatgcagaaaaaagcatttgacaaaatccagcatccctttatgattaaaaccctcagcaaaatcggcataaaggggacataccttagagtaataaaagccatctacaacacaaacaaagggaaacgcatcccatgctcatggatgggtacatatggaaccaaaaaagagcccaaatagccaaagcaagac

SEQ ID NO: 70190 - DNA, 810 bp, Homo Sapiens
tttagtatttacctgttaagagattatttagtctttaaattttttaggttaattttcttgctgtgatatatatgaggaatttactactttatgtcctgctctctaaactacatcctgaactcgacgtcctgaggtataatacaacagagcactttttgaggcaattgaaaaaccaacctacactcttcggtgcttagagagatctgctgtctcccaaataagcttttgtatctgccagtgaatttaccgtactccaaatgattgctttcttttctggtgatatctgtgcttctcataattactgaaagctgcaatattttagtaataccttcgggatcactgtcccccatcttccgtgttagagcaaagtgaagagtttaaaggaggaagaagaaagaactgtcttacaccacttgagctcagacctctaaaccctgtatttcccttatgatgtcccctttttgagacactaatttttaaatacttactagctctgaaatatattgatttttatcacagtattctcagggtgaaattaaaccaactataggcctttttcttgggatgattttctagtcttaaggtttggggacattataaacttgagtacatttgttgtacacagttgatattccaaattgtatggatgggagggagaggtgtcttaagctgtaggcttttctttgtactgcatttatagagatttagctttaatattttttagagatgtaaaacattctgctttcttagtcttacctagtctgaaacatttttattcaataaagattttaattaaaatttgaacttttc

SEQ ID NO: 70191 - DNA, 1101 bp, Homo Sapiens
  misc_feature (138)..(233): n is a, c, g, or t
ataaatacaaatgttcaagctgtcagtgacgtagtatatcttaggttctggagactgacaagatttgtccatgggccctgacactcctaactgtattatcaccctgagcaagtttcctaacttttctgctcaactcannnnnnnnnnnnnnnnnnnnnnnnnnnnnnnnnnnnnnnnnnnnnnnnnnnnnnnnnnnnnnnnnnnnnnnnnnnnnnnnnnnnnnnnnnnnnnnncagctaatgtaaagaaagagcttgttaaatattagttaactcatattactgcagatgtgtgaaacaaatgtccccaatccccttaatgtcttccctctaatgaaaaaaagttacaacaatttaatacatgtttgagggttttcaaagatcaagattatacaagacaaaaatcaggaacgcacacaagcaaaacatttttagcagagaaaaggaaatgagtacgtaagccaaaatagtcaaactcccaaattatttttaaaacgttggctaaaacagcaatgaagtaccacttaataactaactgttaaatcagaaatattaaaattaacagcaagtactgactaatttgtatactatggtatactttaatattgacagtgtgaattggtaactgttttggcacagtctgtaatacatttgaaaggaaacaaaaaaactatatttgacattggactttctgtaactcaacatttacagcattatttcctctcccctccacagtggacagaactaattccagattcaatcctttccaatgtgtcccataatatcaattactgcatgttttctgacatctcatatgtatggagaatgaagggtgggaaatgtcaagcccagggccaggaagtacggccatatatcaggggaagtatgataataacactaaggaaataagactaaaaaatcaagaagagatgtggggccaaaataacacatggaagatcagattacatcatgtcagacctttcatgattcagtttggggtcactgttctagtgatgacgtaccaaaaactgtagacagtattctcatggtgttcgctagtgtcatctttcaagttctaaaggaatttcatccctcctcgtgc

SEQ ID NO: 70192 - DNA, 686 bp, Homo Sapiens
tgaaccgggaacatcaggctttaatagcagtagttcttcttacatgtctagccaaaaggattattcatattatttagataatagattaaaagatgaacgaataagtcaaggacctaaagaacctcaaggattccactttacaaattcaaaccctgctgtgtctgcttttcattcatttccaaacttgcagagtgagcaacttttctccagaaaccacactacagatagccataagcaaacagtagcaacagactctcatgaaggacttacagaaaatagagagccagattctgttgatgagaaaattactttcccttctgacattgatcctcaagttttctatgaactaccagaagcagtacaaaaggaactgctggcagagtggaagagaacaggatcagatttccacattggacataaataagcatattcagcaaaaaggtctgaaaagcaagggaataccattattttcggattagcggtttattaagctcttctatattaaacactaatagatattcaataacggagtaaactgttccagataaagcaagaatagttgcaagaagtaaattctggcacaaagcgtaaaaatataacagaagaaataatgtaaaatactatcttttatgtctaaagccattttatattacttttcaataaaaagaatatcatggtcaaaaaaa

SEQ ID NO: 70193 - DNA, 675 bp, Homo Sapiens
  misc_feature (347)..(361): n is a, c, g, or t
  misc_feature (427)..(473): n is a, c, g, or t
atgtaatgccactaaattgtacccataaaaatggttaaaatggtaaatttgttatgtatattttatcataatgtaaaaaatatatctagaatgggcaagaaggattctcctcattcctctcttgacttgagaatgatcagtcaataggccctgaagtctgaatttgtgaaaatttccttgggtgacaaacttgtttgattactctatttagtgtatcccaaagttattaccacataatcttttaaacaataaaacaaataccccttagaaagtcttctgcaaacccatttctgaaaatggtacattatagggtgggtatagatgcatagatatgggattatgtatgnnnnnnnnnnnnnnncacacacacacaaagggatagagagattacctctcttaacccccattttaattactatgtctaggnnnnnnnnnnnnnnnnnnnnnnnnnnnnnnnnnnnnnnnnnnnnnnncggaatattggaatattctgttcttgatccagatgaaatctgattgagcagtgtacttacaagttgtactgtgtatgtgtttcctatattgttatatttcaataagaagcttaaaatgtttaaaaataaatggttaaaaggttttatgttatgtatattttaccacaataaatgcaaaaaataaaaagtctgtgttttaaac

SEQ ID NO: 70194 - DNA, 469 bp, Homo Sapiens
  misc_feature (160)..(174): n is a, c, g, or t
acttgtttgattactctatttagtgtatcccaaagtttattaccacataatcttttaaacaataaaacaaataccccttagaaagtcttctgcaaacccatttctgaaaatggtacattatagggtgggtatagatgcatagatatgggattatgtatgnnnnnnnnnnnnnnncacacacacacaaagggatagagagattacctctcttaacccccattttaattactatgtctaggttttttaaataaaaatcttttctttttaacatgtttcttttcttttccggaatattggaatattctgttcttgatccagatgaaatctgattgagcagtgtacttacaagttgtactgtgtatgtgtttcctatattgttatatttcaataagaagcttaaaatgtttaaaaataaatggttaaaaggttttatgttatgtatattttaccacaataaatgcaaaaaata

SEQ ID NO: 70195 - DNA, 705 bp, Homo Sapiens
  misc_feature (33)..(33): n is a, c, g, or t
  misc_feature (45)..(45): n is a, c, g, or t
  misc_feature (156)..(219): n is a, c, g, or t
acttaactatcggctttcttactggtaaaatantatggtttattntaaatgcgtacatattgaccaatggcctctgaaaaagcacattttagatactgaaattgaaggaaagaaaatgcatcttcaaacattttttggaatctcaccacatatacnnnnnnnnnnnnnnnnnnnnnnnnnnnnnnnnnnnnnnnnnnnnnnnnnnnnnnnnnnnnnnnntaaatgtgacagttaaacacatctttaaaagcatagtcacagacaaaagcatacagtataaaaatttccttgaaaactcctacaatattatatttggaggcagcttcagactgttttattggtggtagctgcttgctgaggtcttttagttggtaataactccagagaagcagcctgtgtatattcctaacactttgttcactagcatttaagtttagaataagcccaagtaagacaatggaaatgtatatagaactcttagttcttacatgatttaattatatcgatacatgaatttaacttactttaatgtaggcaaactatcaattttttgtccattttcctgtttgttaaaataacatacctctcctacgtattattttcttgacccaaatgaaatattaacctaaggtcaagctgggagagagaaatgactgagatgaatgtctttactaaagtaccaataaatttgtcaaactcaaacca

SEQ ID NO: 70196 - DNA, 1050 bp, Homo Sapiens
  misc_feature (18)..(18): n is a, c, g, or t
  misc_feature (35)..(35): n is a, c, g, or t
  misc_feature (75)..(75): n is a, c, g, or t
  misc_feature (106)..(106): n is a, c, g, or t
  misc_feature (115)..(115): n is a, c, g, or t
  misc_feature (119)..(119): n is a, c, g, or t
  misc_feature (126)..(126): n is a, c, g, or t
  misc_feature (141)..(141): n is a, c, g, or t
  misc_feature (153)..(153): n is a, c, g, or t
  misc_feature (162)..(162): n is a, c, g, or t
  misc_feature (165)..(165): n is a, c, g, or t
  misc_feature (186)..(186): n is a, c, g, or t
  misc_feature (195)..(195): n is a, c, g, or t
  misc_feature (197)..(197): n is a, c, g, or t
  misc_feature (204)..(204): n is a, c, g, or t
  misc_feature (213)..(213): n is a, c, g, or t
  misc_feature (218)..(220): n is a, c, g, or t
  misc_feature (239)..(249): n is a, c, g, or t
ttactgtgatatgatagnatcacctaatgtctgtntctcatgtctcaagaaaccattgtacaaagtaatcatatntgatggctctctgttttgttatagctagtcntgtagcatnccanccagacntgagcaaatcgtaanggagctgttctntaaaacacnaanccaccaccaaaaatgtaaatnacatatgcntnaagtatntggctgttntattnnntaaaaaggtataacacccnnnnnnnnnnnttaacattgtatgaagatggaaaataagaagatgcactttctgtaactttgtctaaggatttaaattactaacttatgaactccaatttgaattgaacttaactatcggctttcttactggtaaaattatatggtttattttaaatgcgtacatattgaccaatggcctctgaaaaagcacattttagatactgaaattgaaggaaagaaaatgcatcttcaaacattttttggaatctcaccacatatactttgttagatttgtgtattgtagggtgtttgttttgtatttttgtattgtatatgaactttttttaaatgtgacagttaaacacatctttaaaagcatagtcacagacaaaagcatacagtataaaaatttccttgaaaactcctacaatattatatttggaggcagcttcagactgttttattggtggtagctgcttgctgaggtcttttagttggtaataactccagagaagcagcctgtgtatattcctaacactttgttcactagcatttaagtttagaataagcccaagtaagacaatggaaatgtatatagaactcttagttcttacatgatttaattatatcgatacatgaatttaacttactttaatgtaggcaaactatcaattttttgtccattttcctgtttgttaaaataacatacctctcctacgtattattttcttgacccaaatgaaatattaacctaaggtcaagctgggagagagaaatgactgagatgaatgtctttactaaagtaccaataaatttgtcaaactcaaaaaa

SEQ ID NO: 70197 - DNA, 1253 bp, Homo Sapiens
  misc_feature (23)..(23): n is a, c, g, or t
  misc_feature (966)..(1029): n is a, c, g, or t
agcttagtaacttataaacaggnttacaaaaagcaggctggtaccggtcggatatcccgggatatcgtcgacccacgcgtcgctcccggacaccctctctccagccgaccagctcaagtccacactgcagaccctcccagagatgtggcaaaggaagcacaggtgaaagtggccgaggtggagggcgagcaggtggacaacaaggccaagctggaggccacgctgcaggaggaggcggccatccagcaggagcaccgtgagaaggagctgcagaagcgctcggaggtggcgaaggattttgagcccgaacgtgtggtagctgctccccaaaggccggggaccgagccacagccagaaatgcctgacacagtcctgcagtcagagaccttgaaggacactgccccggtgctggagggcttgaaggaggaagagatcacgaaggaggaaatcgacatcctcagcgatgcctgctctaagctgcaggagcagaagaagtcactcaccaaggagaaggaggagctggagctgctgaaggaggatgtgcaggactacagcgaggacttgcaggagatcaagaaggaactttcaaagactggtgaagaaaaatacgtggaagaatctaaagccagcaagagattgacaaaaagggtgcagcaaatgatcgggcagatcgatggcttgatctcgcagctggagatggaccagcaggctggcaagctggccccggccaacggcatgcccacggggggagaacgtcatcagtgtcgctgagctcatcaacgccatgaagcaagtcaagcacattcccgaaagcaagctcaccagcctggccgcagcactggatgaaaacaaggatggcaaggtcaacatcgacgacctcgtcaaggtgattgagctggtggacaaagaagatgttcacatctccaccagccaggtggctgagattgtagcaacactggaaaaagnnnnnnnnnnnnnnnnnnnnnnnnnnnnnnnnnnnnnnnnnnnnnnnnnnnnnnnnnnnnnnnngagctagaaccactggcctgggcacctgtcctcctgctgtgccgtcaccctggcaagggccgtgagggcgattgctttgtggtgattctcagtggctcatctaatattttgtaaatccttcaggggtcctacggctgactccaccggacagcccgtcctgggccgtgttaagcaccttttgtagacatcgtatttttattaaaacatcaaatctgtgttcctgt

SEQ ID NO: 70198 - DNA, 334 bp, Homo Sapiens
ctgaactctcagttctaacgcagggattcaggaattgggctttcagactccttctgcagtgtcacagtccagactttttttaaatgaaggacaccccgcagtggctcacagtgggtcccagggctagcaggagcgtgctggggagccggctctgtctttgttcgcagtgggtcccggtgctggcaggagtgtgctggtgagccggctctgtctttgtaaatccttcaggggtcctacggctgactccaccggacagcccgtcctgggccgtgttaagcaccttttgtagaaatcgtatttttattaaaacatcaaatctgtgttcctgtaaaaa

SEQ ID NO: 70199 - DNA, 639 bp, Homo Sapiens
  misc_feature (563)..(563): n is a, c, g, or t
aattgatactttaattacaattattcaccaagtgcatttcccccatgaatgtctgttgctacagtagcatcaggtctgaaaaaatgtggttgctttggcatttcctcagcatcttgtgacattcacaataactttgaatattgttcctaatgaggaaatacattctgtgtaccttcatggaatttagcatgattcctatggctattgagaatagtcacaactactggaactaaactggataaataagtaaaaaacttacttatttttaatttgtaaaacatcctggttataatgttacagtgttagaaaaggtcctagatatttaatccaacaccagcatttcataggtaatgattcaggcctagctggtgggagtaattagaataggttcacaaatggacagatcaggactagaacccacatctctttctaagtcattagttataggtggcaaagatcacataccaaccaaagtctgtagcatggaaaaaaattaatgagaatattcataggtgagggttgtttatactactatcaagaaggataattgttggctaattcanatattacatccttgtattggacaacagtagcagcactaggtagtattgtactgattcccaaccctcactgtacttt

SEQ ID NO: 70200 - DNA, 693 bp, Homo Sapiens
atctggataaaactatgcatttctgaaatcagttttgacatctggttcttttttctaagtcgaaagcagaaaagttggagcttatctccttcttcacaggggatattgtgacattgtcctgtccccactacatccatttttcctctatcatcctgaatttcgtagattgtggtcttctgatttactgttttcttatgtagcataaataccccatatacaatatttcctgaagcttgtttgtgaagaatatcaatcttcagagtttcctttgctctgttgatgattttatttggaacctcaaacgtttggttaggaccagcttcagatacagtagattcttcattgacctctaggagactatcatattccaaataatctgatatgatgatgattttctttccattgaatttctccttcaagctggtgtttaaaaccttcacatggaagaactgtgtctgtgtagccactgtagcatgaaacattatttttttctccatttctggggtctcatattcaaatggctttgttgtactcagtaccttcactatcactgggcgtttttggagaacatttcttctgggagttacctgacatttggccactgttttcgggttctcagttgaagaagtgttgggtggagctgacaatgaggtcttgggagatggggaacggcccatggctgtggacatgccg

SEQ ID NO: 70201 - DNA, 840 bp, Homo Sapiens
  misc_feature (81)..(81): n is a, c, g, or t
cctctggagctgcctgttcagtgagatggaggaggtgggcacatttaaggtcagttcactaacctatggttcagagttctngatcatatggaagtctggaaaagagagcttatcacaggtttgtatgctggtgaaatggatagttttaattctcactgtctcaaaagagaatcagctctccagcagttctagaaaagctttgacaatccccaaggggcagtgttaccttactccttcactgcttcttagaaggtagaattaagtttctggaattgcacctacatgttttcttattaacattcagaattgggaatattaatttttccagtgagtagttttctgaaattggtaacttggagagtaaaataacgtattttgcttttcaattttgtgtttgtttacttttatgtaaaaatttgatatgtgaattacacagttctaataaaacctcatgccttttcattacatctaatttgaactctcaacttcatgttacagaatgctttaaagatgctttaatgaaaagtattaagaaaatatatagatttgtatgtcagtttatacttcagaaatccatatatttgtcatatttatttttttagaaacctcctaattggataactagatggtatttaaaatgaatgcccaaaaatatcttgtacctttgtccaaaagtttatctgttggaagccgccagccattcatgtagagagtttataagaaaataatttaaaattgtatgcattttatattactatggtatctgtgtaccatatttctaagtattcattattaaattggtacttcttaaaaccataacctggcttgccttttagtgtt

SEQ ID NO: 70202 - DNA, 760 bp, Homo Sapiens
  misc_feature (387)..(407): n is a, c, g, or t
ggtggaacaatttgatttgctgtggcctctatgcctaatgagctagtgtttctggcagctctctctacccaactttgcacttgtagttttgagtctttgtctctctggaatatgaacaggtttataaaacattccatggtgaacaattctgtcggctgcattatagccatgagtgaatagacagcattggctggtccaagctctgttattgagtatacaaggaactgatttttcttatgttagcactaagggcaaaaaccaatatttataatgtaagcactatccaggtaaaacactggcccaagatttggtaaagagatttcattgcaatgtaataactacagttttttacaaattggaacagctttggtgtgtcgcaatcaaggnnnnnnnnnnnnnnnnnnnnnccaataagccatctgattgtggtgactggggcccatgtccaagacaattcctggcatattctgtcaccctcccgtggggcgatcactgtgtggggaccccattccccagttaaagtgtgtctctgtaccttacaacagcgattcaggacccaagtgtgaacaacactcagcccgccctctggagcgtgtgctgtctttagggccctacccaaagtcactgtaacagttaagtgtgtcattaacctttctgtctctttgcgccataaaaaaatgctcaaagttttagatgtagccactgtatgttgtacaaacgttggcgacatgtaaaataaaagtcataaaatgctaaaaaa

SEQ ID NO: 70203 - DNA, 803 bp, Homo Sapiens
  misc_feature (670)..(670): n is a, c, g, or t
  misc_feature (725)..(727): n is a, c, g, or t
  misc_feature (729)..(734): n is a, c, g, or t
  misc_feature (736)..(738): n is a, c, g, or t
  misc_feature (740)..(744): n is a, c, g, or t
  misc_feature (746)..(755): n is a, c, g, or t
gggaaggcatagaagaattgtcctctaaaaatatcaatgatgtatcctggaatgtgaagatgtccctttatagttaaaaattgaattattttaatattgtaccattgttagaccttgaatgagtccatgtaaccgtgtgtgtctgtatatctatctgtagagaaagaaaaatgacaactgaaatgttacttttaaaaatcagaataaattgggcactgtctgtgttgcaccactactgtatcttttcgaaagaattaacagtatttgcctattgtaaaggttaattctgatgacgttttcacattcaccagactttttttcctgtattatttgcatccccaaatatttaatacaagtagattctgcatggcttgggcattcagagattaatagaatgatgactcaattttaattctaaagccatgaaaagttactttgagactgaacaattctgaattatttatgatacccaatgtccatgtttctttccctactgtaaaagaattgatcagtttcttcattaaagcagcaaaaacttattaaatcttgtaaataccatgtctctttttagatttctgtgtatgctgtgaatgaaatcattttgagatgaaattgtacaaaggcattttaaaaggctctgcatgcatcgtacccccaaacagtacatatntcgggaaagtcaaagattccctgggcaaataaataacctaaaaggcaaacacttnnnannnnnnannnannnnnannnnnnnnnnccttgtcgggccggcctcgggcccctgcaagaaagcttttcctagaac

SEQ ID NO: 70204 - DNA, 1096 bp, Homo Sapiens
  misc_feature (520)..(528): n is a, c, g, or t
  misc_feature (574)..(584): n is a, c, g, or t
  misc_feature (617)..(985): n is a, c, g, or t
  misc_feature (993)..(993): n is a, c, g, or t
  misc_feature (995)..(995): n is a, c, g, or t
  misc_feature (997)..(997): n is a, c, g, or t
gctgtggtcaaatctttatgatttatttgctgcttaatcattcattttgtcatctacaagagtagcagacgaaagcttggatttactactacagaaaaacaagtacatatagggaaaaaatatttacaaactgagaaagttctatccactaacttcttttctctatgaattgggaaaaggtcagggttatctgatacaagggcagaccgttttggttcagctcatagaccacagtcttcccagggaacatggattaagtcctgcagtggaccgtgggaagcaaggtcttgaaaggataaaatgtgcttttaggcagattactccggtaacccaacacaggatgggttggtaaagggagcaaggagagacaggaagacacgttaggagattgcagcagtaaacagcagtaatccaggcttgagttggtgcaagaagatcttgtgtttatacagtactttaggtatacaaattctcttcacagacactacttaaaatgattatgtgaggtaggtagagtcannnnnnnnnaatttggagatttaattaaaaaggtagctatgtgagaggtattttnnnnnnnnnnngcctacagccgcggccctcgtgccgaattcttnnnnnnnnnnnnnnnnnnnnnnnnnnnnnnnnnnnnnnnnnnnnnnnnnnnnnnnnnnnnnnnnnnnnnnnnnnnnnnnnnnnnnnnnnnnnnnnnnnnnnnnnnnnnnnnnnnnnnnnnnnnnnnnnnnnnnnnnnnnnnnnnnnnnnnnnnnnnnnnnnnnnnnnnnnnnnnnnnnnnnnnnnnnnnnnnnnnnnnnnnnnnnnnnnnnnnnnnnnnnnnnnnnnnnnnnnnnnnnnnnnnnnnnnnnnnnnnnnnnnnnnnnnnnnnnnnnnnnnnnnnnnnnnnnnnnnnnnnnnnnnnnnnnnnnnnnnnnnnnnnnnnnnnnnnnnnnnnnnnnnnnnnnnnnnnnnnnnnnnnnnnnnnnnnatacgcangnangacatgtagcaaaggcagcaaaggcacgaccgtaaaaggcgcgtgcggggttttcaaagtccgcccctgagagatcaaaatcgagtcagtaagaggggg

SEQ ID NO: 70205 - DNA, 2246 bp, Homo Sapiens
  misc_feature (56)..(57): n is a, c, g, or t
  misc_feature (62)..(535): n is a, c, g, or t
  misc_feature (857)..(880): n is a, c, g, or t
caggggaacgcctgttcttatagtctgtcggttcccacctctgactgaggtcgatnntgtgnnnnnnnnnnnnnnnnnnnnnnnnnnnnnnnnnnnnnnnnnnnnnnnnnnnnnnnnnnnnnnnnnnnnnnnnnnnnnnnnnnnnnnnnnnnnnnnnnnnnnnnnnnnnnnnnnnnnnnnnnnnnnnnnnnnnnnnnnnnnnnnnnnnnnnnnnnnnnnnnnnnnnnnnnnnnnnnnnnnnnnnnnnnnnnnnnnnnnnnnnnnnnnnnnnnnnnnnnnnnnnnnnnnnnnnnnnnnnnnnnnnnnnnnnnnnnnnnnnnnnnnnnnnnnnnnnnnnnnnnnnnnnnnnnnnnnnnnnnnnnnnnnnnnnnnnnnnnnnnnnnnnnnnnnnnnnnnnnnnnnnnnnnnnnnnnnnnnnnnnnnnnnnnnnnnnnnnnnnnnnnnnnnnnnnnnnnnnnnnnnnnnnnnnnnnnnnnnnnnnnnnnnnnnnnnnnnnnnnnnnnnnnnnnnnnnnnnnnnnnnnnnnnnnnnnnnnaagaattcggcacgaggcttgaggaaggacctatgatagaacaacttagcaaaatgttctttactactaagcaccgttggtatcctcatggacggtatcacagatgtcgtaagaatctgaatcctccaaaagacagatgatgcggaggttcctgggggaatcaaagagaaatgtgcctcatttgccatttgagaaaatgcagtctggtgtattcagtaatatatagtaaagtaataatgataaaatatcttttcatatattagaatgtgtacttttatataaagtaattctggatttgacattctcatttagagaaacctannnnnnnnnnnnnnnnnnnnnnnnagtgtttcatttatgtgcggtctccaatttaggacttttccatagtgccaaagccatacatattcagtagaacatcaataaattacatcagaaattcaacactttattataaaacgggcttcgtgttagataattttgctaaacagtaggctactgtaagtgttctgagcatatttaagacaggctagcattttcaatttacaatattttcaactgatagtaggtttattgggatgtaaccctatgataagttgagaaacatctctttttgtgtgtctactgtgatttaagtatttttaatcatcagccaagcattgttagtagtataaatatgattaataaaaatgtgcatggctttcctgaaggagattttttaattgcctttgagaataaactcataaggtctaccaagaaaataaatgttatgatgtttcagttggcttctaggaaataattaaattagtgatattttaatcaggttttactatctgctaggccccttccatcaattcttattaaattctcaaaataatcctttgaaaagggagtataattacattttacagtgactcgaaccttaaccaaacaagtgggagagccaggagccaaactatcaggctccaaagcttttttttagtgcatcacaatgacaaaggggtggttttctttcacccaagaatgtgctttcctggaaatttttctagatagaatattatgtaatttgttttgaaggttttttttcctgactgtcttaaagattatgctagctttagaacacatgcaaacagctgcagctctgtgattaaaatgttaaggtcactagaatagtgttaggaaaatgttaatagataattctgctgcctctattagcttatgtatgatccttaatagcattgcttccccttcagtttctatttaggaggtgaagaatcttttaataaggtagaaagttgctttatttaaatttgtactgtagaatgtttgtgatacagtatttgtaaaattgatatgaaaaataatttctcaaagtctattgtttgatctagttattttaataaaggaactctagaagtttcaagtggccagtgaagtgtgaggaatagagagtaaaggaaataattaataatggtgaccctctgttaagtggtttactttttccattaatataaatttcatttggaaagattaaaaaaacaagtttgattgaacttgataaatcagaaatatttaccagctttgtcgatggtgtattcttgaaaaatgtttggttttctttcaggttgacttatatccaaaattctacaaattcttagctatgttataaatgtagaaagaagtgaaaaatcaaaatatgattatgaagaaa

SEQ ID NO: 70206 - DNA, 813 bp, Homo Sapiens
cagtcgacggtaccggacatatgcccgggaattcggccattacggccgggggcgcagcgctgtttcgtgggaccaggattgaaacaagatggcgggttcgtggtgagaagccgtcaagcaggagtagaaattggtatgcttagaagcagattctaaaagcagtttctcttcagaacatcttttttcataccacttgataagcatcttgaaacaccatggctgtagctgcagtaaaatgggtgatgtcaaagagaactatcttgaaacatttatttccagtccaaaatggagctttatattgtgtttgtcataaatctacgtattctcctctaccagatgactataattgcaacgtagagcttgctctgacttctgatggcaggacaatagtatgctaccacccttctgtggacattccatatgaacacacaaaacctatccctcggccagatcctgtgcataataatgaagaaacacatgatcaagtgctgaaaaccagattggaagaaaaagttgaacaccttgaggaaggacctatgatagaacaacttagcaaaatgttctttactactaagcaccgttggtatcctcatggacggtatcacagatgtcgtaagaatctgaatcctccaaaagacagatgatgcggaggttcctgggggaatcaaagagaaatgtgcctcatttgccatttgagaaaatgcagtctggtgtattcagtaatatatagtaaagtaataatgataaaatatcttttcatatattagaatgtgtacttttatataaagtaattctggatttgacattctcaaa

SEQ ID NO: 70207 - DNA, 192 bp, Homo Sapiens
cttttcccctgtctaaattgtgtgtgggcttccccagttttaaactcctatctttttctttagtgataccttacttgataatggacttgggaataggtttaacccagtttgcattctccaaatgtttccagtgatatgttttcctgggaaaagcaaatctgcctgtaataaatatttttaatctaaataacc

SEQ ID NO: 70208 - DNA, 572 bp, Homo Sapiens
  misc_feature (447)..(456): n is a, c, g, or t
aaggaaacaaacttcgccactctctcttctccttcctaaccctttgtctagagcaccacaccgctcacaaactctttccaaatgctcagttggctcccaaagttggagcctggcatgggcagggagcccacaaaactctaaccaaactggaggctggcatgggagaagtgcttctggttcactcttcctaccctctccctcctaaccctctccttgcctgacaggggagcccctgtggcctggactctaggggatgccgccaccagaaacccctctgccaatccctaccttgcaccctgggaactgcagtaacttattctcaaaggctttaaacacagagatcctctcagcggccgtgggcctgccccttgtcctagccctgccacgtgagggtccagcctccagggacaggcactgcccaccaacggcaaatccaaagttctttcnnnnnnnnnngctgaaacacaaccaaaaaagcaagagcgagagagagtacgtgcacacgcgcacaaaagagagaaacggacaccagaggaatgaactaaagaaaaacgtaaacttggaaaatacag

SEQ ID NO: 70209 - DNA, 718 bp, Homo Sapiens
gccatagagatacagattcctcagaggaacttcatcacccgtgagctgctgcatctggtgaccctcaggtacagcgacagcgtcggcagggtcagcttccccagcctggtctgcttcctgatgcggcttgaagccatggcaaagaccttccgcaacctctctaaggatggaaaaggactctacctgacagaaatggagtggatgagcctggtcatgtacaactgaagcaaagaggaaagcagacccatggctcaggacaagctcccagtgatcactcaagaatctggctctcattctaagaggctgtgctgcccagtatggtggttgtgataaatctaaaccagccctgcatgaaacagagtccaagctgtctcccaacagcctgggttcggtccttggctggcccaggcccagttaagcctgtggccaccaagcagctcatctgagcactttgggatgtattcagcctacgttgccctggaaaaggaagcaggagatgtctccctgtgggaaaggagaagagaagttgtctctgagtcccctgtcaccagttggattcatttcttggaagagccagaatgagccactttgaccaccctcgggtgctatgggtgacacaagagctgtccactgggtgtttgcagaataattacactatcttatgtctggatcctgatgatttcacagctaaatggcaaaaataaaacatgtttcccat

SEQ ID NO: 70210 - DNA, 1099 bp, Homo Sapiens
  misc_feature (1020)..(1032): n is a, c, g, or t
cccagatcaaagtggatgacctctcctcctccccaacctcgtcccctgagcggagacttccacgctagagattcaaccaagccgggcatcaccaacttctgacatagaatcagttgagcgaaaaatttataaagcttacaagtggctccgctactcttatatctcctactcaaataacaaagatggagagacctccttggtgactggggaggcagatgaagggagagcaggaaccagccacaaagacaacccagccccttcttccagtaaggaagcctgtctaaacatagcaatggcccagaggaaccaggacctgccacctgaaggctgcagcaaggacacttttaaagaagagactcctaggaactcccagcaatggcccaggccatgagcacagcagccatgcttgggcagaggtgccagagggtacctctcaggacactggcaatagcggctctgtagagcacccttttgaaaccaagaagctcaatggaaaggccctgagcagtcgggctgaggagccgccttctcctcctgtccccaaggcatctggctccactctcaacagcgggtctggcaactgtcccaggacccagtctgatgacagtgaggagaggagcctcgaaaccatctgtgccaaccacaacaatggacgcttacaccctcgtccccctcaccctcacaataacgggcagaacttgggggagctggaggtggtggcctactcttccccaggacactcagacactgaccgtgataactcgtccctgacagggacactcctacacaaagattgttgcgggtctgaaatggcctgtgagacccccaatgctggaacaagagaggaccccactgacaccccagccacagatagtagcagggctgttcatggccacagtggcctcaaaaggcaacgaattgaattggaagatacagattcagagaattcctcctcagagaagaaattaaaaacatgataaatacaaagggaaaacaaaaagctacaaaagtagccttacnnnnnnnnnnnnnttgtttagtgaatacagaggaaaggaaaaacaagtattaaaggcacatgaaaccagggcctgaaaaa

SEQ ID NO: 70211 - DNA, 687 bp, Homo Sapiens
  misc_feature (622)..(622): n is a, c, g, or t
aaagaaaagagaatatcataatcttacacaatttctttcaaatggataaacttagacaatttatcaatgcttccttacatttttacaccacgctgaactccaacaggtttttgttttaaggtaaaccaggtttttggtccttccctgtggagaagttactttcaagtcagtgaaagttcttggcccatgattaaaagtctttgccaattagtactcaacaacttcaattcatttttttctggttcaagatgagtaggagcctaataaggctgtgataaaagggcaaaaggcactgagagccaaaagcggattaatgagctcctccatttatttgtcttcctaacagctgaactgttacaactattgacactcttcaaaaggttccgctctgaaccctgtccaggcactgcaggctccaatggacatcttcaaatccagagaatggaggggcaagagcttcccctgtgtgatgccaaaaccaacaaagccccatggatcaggtaatgaaacttcagcttttccccctttgagaattatttactggcagctgacaaggggcaaattcagctcgaattgtgcagtcaaggccctgtcaagcttttaggaggcacccttggtcttngaagcaccttcaatgactggcatttcactcaaaagccctcggcactggtccttaacagcttatga

SEQ ID NO: 70212 - DNA, 2381 bp, Homo Sapiens
cgagttgcgcacggagccccagctgcggttgtccgctctggggatcacaggccgcggagacccgggagccacccgccgggccccttcagacgacccgcttccgcaaaccggccgtgggactccggcgccgggcggacgaagcggcgccgggcggacgaagcggctccgggaagactcggtcttccccgcccgcctgaggtcgccggggcggggcttcagtgacaggcccgcgcgctaccgcggaaacaggaagttggctgggtgcgcgccggctccggctgcagttcccgggtccctcggccaccgaagccaccctgccctggtgaaagggctcccgcaccgcccggtgctccccatctgcctggcgttgtgcgcagagctggaaagcatggctgttataaatgaattctgattttggggagcagatgccaacttagagcctcgtaccaatctctctgtctttaaaagatgaggtgacttggtgattttcctggaaaattataggtgcccagcaaagacctgaatgccatcaccctccccagggctctgcagttttctcgtggtgaacccttgatggatttgttgttgcttgagaaatggcgatgatcgaattggggtttggaagacagaattttcatccattaaagaggaagagttcattgctgttgaaactcatagctgttgtctttgctgtgcttctattttgtgaatttttaatctattacttagcgatctttcagtgtaattggcctgaagtgaaaaccacagcctctgatggtgaacagaccacacgtgagcctgtgctcaaagccatgtttttggctgacacccatttgcttggggaattcctaggccactggctggacaaattacgaagggaatggcagatggagagagcgttccagacagctctgtggttgctgcagccggaagtcgtcttcatcctgggggatatctttgatgaagggaagtggagcacccctgaggcctgggcggatgatgtggagcggtttcagaaaattgttcagacacccaagtcatgtacagctgaaggtagttgctggaaaccatgacattggcttccattatgagatgaacacatacaaagtagaacgctttgagaaagtgttcagctctgaaagactgttttcttggaaaggcattaactttgtgatggtcaacagcgtggcgctgaacggggatggctgtggcatctgctctgaaacagaagcagagctcattgaagtttctcacagactgaactgctcccgagaggcacgtggctccagccggtgtggacctgggcctctgctgcccacgtctgcccctgtcctcctgcagcattatcctctgtatcggagaagtgatgctaactgttctggggaagacgctgctcctccagaggaaagggacatcccatttaaggagaactatgacgtgctttcacgggaggcatcacaaaagctgctgtggtggctccagccgcgcctggttctcagtggccacacgcacagcgcctgcgaggtgcaccacgggggccgagtccccgagctcagcgtcccatctctaagttcggaggaacagatacaacacccagtttcatcatagggtagcaacatccaccaaagaagaactatcacgtgctttcacgggagacatcacaaaagctgctgtggttgctcaactgaccgtggactcgtggccacacgcacagcgcctgcgaggtgaatcactgtggccgagtacccctcacgtcctctttagtgggaggaacatgaaccaaccccagtttcagacatgggtagcatcacgcccacagactacaccctctccaagtgctacctcccacgtgaggatgtggttttgatcatctactgtggagtggtgggcttccttgtggtcctcacactcactcactttgggcttctagcctcaccttttctttctggtttgaacttgctcggaaagcgtaagacaagatgaagagcaggcgccattataaatatcaaagcccaagaaatggaactttgggcagagatcatgttagaatcaagtggatgatgagaccaattacaggccgtctctctgcacagcacagaaattctcaatcactgaaatgagtaactgcaaaataaatagttgattgtactgttctcatgctataaaagtggacaggtactctacaacaaatctgttttctcatttttatcaaatatatgtatcatcaaaggttgcatctgtacagtatgtaaatgctattaatgtcgtcactcacatgcacgacagtccttgttcccccaggaagggcctggtggccccagcacacacttgggattatgtgtatacataaataaatattgggctgtttccctcttcctgtg

SEQ ID NO: 70213 - DNA, 480 bp, Homo Sapiens
ttgtgagtgctattgtacatggcaaagtttcaaagagctcttggccatccctcaccaaactttggcaaaagatggtgttagtccccttctccagggcacatgagaaaaacaggcctaacatcaggtctcagcggttcctctcacaggccttggcttggaaggctggagcttcggaccaaggcccagccctgtcacctcctcttcatgtgatgtggacccctgggagcatcagtgtcctcatctgtccaatgacagcccttttctcacagagttattgtgaagattcaacaatttcttggcatagtgcctggcacatggtgtgtgcttagcgcaaatggcagctctcatcatgaatgatagactctttcaccctgctggtcccaggtcggcacacacatcctcataatggcatttctcctttctgtgcacagcactttattgttacaaagtactcttccaaaaagttaccctgtgtgtaaa

SEQ ID NO: 70214 - DNA, 700 bp, Homo Sapiens
  misc_feature (57)..(57): n is a, c, g, or t
  misc_feature (61)..(61): n is a, c, g, or t
ctaacagaatgttcagctgtacaattcgattattcacaagaaagggtaaactgtttntgtntgtatttccattcaggacatttatctctgtgcaaagaccggagtagaagctgatgagtggatcaagatattacgctggaaattgtcacaaataagaaaacagctcaaccaaggggaaggcacgatccgatctcggtcgttcatctttaaatagatctttcttgccaaggaatgctctggcccaggagcaaggtggaatgtttccctgacgctgtgatctgcagcaggcttcaaatgaaaaccgactaaggattttctttcaaaaacaaatcagaagcagatgctgattgggacccatataccacgttgctgactcacgttgctgcccttccatgatgttgccatctccttgagaacactgaagcaatcaccattctgatagaaagtgcttaaaccaccactcttaggtctgctcactcttagaacacacaatggaagaggaagggtttttgttttcactcattgtggtccccaagcctattgacactagttgcctagagtcccactgtgagtcatggtcagcctgtctgacatccaggttgtgctattaaccaagaaggaaacagatacttggaggcttagatgacttctgcaggatttatattcagatagaaaacatcaaatattttcaggggagagg

SEQ ID NO: 70215 - DNA, 1395 bp, Homo Sapiens
  misc_feature (306)..(318): n is a, c, g, or t
ttcattatggttctcggtgtactttattctcctgctgtctagctaagcagcccacacaggacagaaatgggtagcactgaggaatgatcagattttttttctatccccaatatttctgccccctccctaagccctgacccaaccctatcttaataatcacgaatggttagtacatcattctgtctctcaaagaacaactgaaatggaaacaaggcattagaggaccaggcctcttcttaatagggcttaggagctggtatgagctctttattcacaatggagcgtctctccttcaaatacctggannnnnnnnnnnnngtacactggttcatagatcggcacttgactttgaacctggcaccaaaaggcacaatatctgataccctgtacaagagctattagagatgctgccatatggatgggcaaaactgagccaatcccacttaggaatggaaggcttggacatggaagggaggatataaacgaggagttggagaaaaacgcaagcccagtttttgctagagtggaaatgaaagtgggaatgagggtcttgtttttagtcctctaaggaccaggaagcaattttaaaacttccttggtttttctgaaagcagcatattcaaaatgccagcaaaaactcctaacaactgcaaaaccaaaagaggatcaaagctcaccaacatcccttcttattgctgaaaggctctaaaattcaggatgccctgttcccttgtaaaagggaaaataattaagtctgatttatggtaatcataccacatcacacttctaaaaaaatattcaagtgtgtgaccaggggacgtttgacaccattttattaaccttcaacttcagtggaaaaataaaaccttttccaagtgccattttcatcacaagacttctagttagtgtgtgtgtgtattcacacacacacacttgttattttcgtttttgttattgttgcttgcttttgaagtgcagcaagagaccaataccgcattgtagtcaatcaaataaagcacagaagtccaagcagtttccacaatggttattttatcacgattgtttgaacatttgaattatcctgtcttgcaatcccaaatagttacctgaagtttgctgttttgtgtgtatgtgtttacttgtattgtatatttatgtgttctaaactctttggcgacaattttctgggcggcgttcagactgccactataccagtcaggagagggcgttttctttgtgctgccattactgatcatttaaattttggtttgtatgggttgtgatttttttgctttttgaagttctgacgcgaacgcgtgggtcgacgatatcccgggaatatccggaccggtaacagcctgcttttttaccacgctgttcatagttacagtgctc

SEQ ID NO: 70216 - DNA, 2070 bp, Homo Sapiens
  misc_feature (86)..(120): n is a, c, g, or t
  misc_feature (1566)..(1689): n is a, c, g, or t
  misc_feature (1697)..(1714): n is a, c, g, or t
  misc_feature (1720)..(1739): n is a, c, g, or t
  misc_feature (1754)..(1833): n is a, c, g, or t
  misc_feature (1839)..(1899): n is a, c, g, or t
  misc_feature (1935)..(1945): n is a, c, g, or t
  misc_feature (1957)..(1970): n is a, c, g, or t
aaaggtcgtatagactcatatagggcgctagctcgctatagccgaacgacgagcgcagcgagtcagtgattcgaggaagcggccgnnnnnnnnnnnnnnnnnnnnnnnnnnnnnnnnnnncagtcgacggtaccggacatatgcccgggaattcggccattacggccgggggggagacgcagaggcggacaagatggcggcggcagctgtacagggcgggagaagcggtggtagcggaggctgtagtggggctggtggtgcttccaactgcgggacaggaagtggccgtagcggcttgttggataagtggaagatagatgataagcctgtaaaaattgacaagtgggatggatcagctgtgaaaaactctttggatgattctgccaaaaaggtacttctggaaaaatacaaatatgtggagaattttggtctaattgatggtcgcctcaccatctgtacaatctcctgtttctttgccatagtggctttgatttgggattatatgcacccctttccagagtccaaacccgttttggctttgtgtgtcatatcctattttgtgatgatggggattctgaccatttatacctcatataaggagaagagcatctttctcgtggcccacaggaaagatcctacaggaatggatcctgatgatatttggcagctgtcctccagtcttaaaaggtttgatgacaaatacaccttgaagctgaccttcatcagtgggagaacaaagcagcagcgggaagccgagttcacaaagtccattgctaagttttttgaccacagtgggacactggtcatggatgcatatgagcctgaaatatccaggctccatgacagtcttgccatagaaagaaaaataaagtagccaattctaaaagtagccctctttctcctggatcttgctgaattagtggcttggggggtgggggagataaaaagaacttaaaatgggtaaagtaagaaatgttaaaaagtccctgttttgtcctgaaattttagtctattctgggtaaataggattttctgacacagatatgagaagttgtagctctgatgtctagctgtagtctccttgatctgctgattgcattattttaatttgcttttctgggaaagcagttttgctaaaagctgtacagactttttcttttgtacctagcagtactttatatagtatagctttgggccatgtagcattttaagactcaattttaaaaaattattaatctgttgctgactcttaattcctatttcaatatgtgtttccttgaagaattcaggatacaacttcttgtgtatgacagctttccttcacacactatttttgtgggtgtgtatatatctgatttgggaagaatttaaaaaacacatagctttttaatttgtttgaaacagactttctgcctgttacatttttgcttttaaccaattaaagaagccaatggcattttagttttatattgtgttttccactagtatatccctgttgatttgtttgtgccttttattaactgccattttctaaaatttttttcaataaaaggaaggaagatgtgnnnnnnnnnnnnnnnnnnnnnnnnnnnnnnnnnnnnnnnnnnnnnnnnnnnnnnnnnnnnnnnnnnnnnnnnnnnnnnnnnnnnnnnnnnnnnnnnnnnnnnnnnnnnnnnnnnnnnnnnnnnnccctttgnnnnnnnnnnnnnnnnnnaaaaannnnnnnnnnnnnnnnnnnngggcccgggcccccnnnnnnnnnnnnnnnnnnnnnnnnnnnnnnnnnnnnnnnnnnnnnnnnnnnnnnnnnnnnnnnnnnnnnnnnnnnnnnnncccccnnnnnnnnnnnnnnnnnnnnnnnnnnnnnnnnnnnnnnnnnnnnnnnnnnnnnnnnnnnnnaaaagggggccccagggggctctcaaattaaattannnnnnnnnnngtggcctttttnnnnnnnnnnnnnnaattttattaaacttttcgcgcgaggggggaacccctcccaaagggggggtgaagacccttaatccccccggcggaaaaaaccccttttggcccctttgg

SEQ ID NO: 70217 - DNA, 1013 bp, Homo Sapiens
ggggggacttgaggttagacgtcccggccgtcggttgcggcctacactgtctgccgtcgcgtcgcagttactaaggcgtggggaagatagcggcaggcaccgcagtggagcggctccgagatccccggggggctcgcaggcgcgcatccctcctgactgggacgtcgcctccgcagacccctcggaggctgaagcgacgccggaggcaggccaaggacactggttagtggttcagaaaggtaacctcaatgaagaagcccaagggtttggttggagcacaagctgaacgtcgggaaagcctgaaggcgacttcttttgagttcaaggggaaagaaagagtctcggcgggaaaatcaggtgggacctttcctggacatatcctggaccaggcttttctgctgaagcaccactgtgtgaggaagccatcagatctgtgcaccattaattggaagatagatgataagcctgtaaaaattgacaagtgggatggatcagctgtgaaaaactctttggatgattctgccaaaaaggtacttctggaaaaatacaaatatgtggagaattttggtctaattgatggtcgcctcaccatctgtacaatctcctgtttctttgccatagtggctttgatttgggattatatgcacccctttccagagtccaaacccgttttggctttgtgtgtcatatcctattttgtgatgatggggattctgaccatttatacctcatataaggagaagagcatctttctcgtggcccacaggaaaagatcctacaggaatggatcctgatgatatttggcagctgtcctcccagtcttaaaaggtttgatgaccaaatacacctttgaagctgaactttcatcagtggggagaaacaaagcagcaagcgggaaagcccgagttccacaaagtccattggctagtttttggaccacagggtccaggcgtcctgacagtcttggccttgaaggaaaattaagtagccattctaagtagccttctttttcg

SEQ ID NO: 70218 - DNA, 3648 bp, Homo Sapiens
  misc_feature (2934)..(3057): n is a, c, g, or t
  misc_feature (3117)..(3181): n is a, c, g, or t
  misc_feature (3194)..(3207): n is a, c, g, or t
ggtccggaattcccgggatatcgtcgacccacgcgtccgtgcggagtggttccaagtttccagtattcaatatgtcatacaatccagcagaaaatgcagtcctgctttgtacaagagctagcaatctagagaatagtacctatgacctgtacaccatccctaaagatgctgactcccagaatcctgatgcgcctgaagggaaacgatcctcaggcctgacagccgtttgggtcgctcgaaatcggtttgctgtcctagatcggatgcattcgcttctgatcaagaatctgaagaatgagatcaccaaaaaggtacaggtgcccaactgtgatgagatcttctatgctggcacaggcaatctcctgcttcgagatgcggactctatcacactctttgacgtacagcagaagcggactctggcatctgtgaagatttctaaagtgaaatacgttatctggtcagcagacatgtcacatgtagcactactagccaaacacgccattgtgatctgtaaccgcaaactggatgctttatgtaacattcatgagaacattcgtgtcaagagtggggcctgggatgagagtggggtatttatctataccacaagcaaccacatcaaatatgctgtcaccactggggaccacgggatcattcgaactctggatttacccatctatgtcacacgggtgaagggcaacaatgtatactgcctagacagggagtgtcgtccccgggtactcaccattgatcccactgagttcaaattcaagctggccctgatcaacagaaaatatgatgaggtactgcacatggtgaggaatgccaaactagttggccagtctattattgcttatctccagaagaagggctatcctgaagtggcactgcattttgtcaaggatgagaaaactcgctttagtctggcactggagtgtggaaacattgagattgctctggaagcagccaaagcactggatgacaagaactgctgggaaaagctgggagaagtggccctgctgcaggggaaccaccagattgtggaaatgtgctatcagcgtaccaaaaactttgacaaactttccttcctgtatcttatcactggcaacttagaaaaacttcgcaagatgatgaagattgctgagatcagaaaggacatgagtggccactatcagaatgccctatacctgggtgatgtgtcagagcgtgtgcggatcctgaagaactgtggacagaagtccctggcctatctcacagctgctacccatggcttagatgaagaagctgagagcctaaaggagacatttgacccagagaaggagacaatcccagacattgaccctaatgccaagctgctccagccacctgcacctatcatgccattggataccaattggcctttattgactgtatccaaaggattttttgaaggcaccattgccagcaaagggaagggaggagcactggctgctgacattgacattgacactgttggtacagagggctggggagaggatgcagagctgcagttggatgaagatgggtttgtggaggctacagaaggtttgggggatgatgctcttggcaagggacaggaagaaggaggtggctgggatgtagaagaagatctggagctccctcctgagctggatatatcccctggggcagctggtggggctgaagatggtttctttgtgcccccaaccaagggaacaagtccaactcagatctggtgtaataactctcagcttccagttgatcacatcctggcaggctctttcgaaacagccatgcggctccttcatgaccaagtaggggtaatccagtttggcccctacaagcaactgttcctacagacatacgcccgaggccgcacaacctatcaggctctgccctgcctaccctccatgtatggctatcctaatcgcaactggaaggatgcagggctgaagaatggtgtaccagctgtgggcctgaagcttaatgacctcatccaacggttgcagctgtgctaccagctcaccacagttggcaaatttgaggaggctgtggaaaaattccgttccatccttctcagtgtgccacttcttgttgtggacaataaacaagagattgcagaggcccagcagctcatcaccatttgccgtgagtacattgtgggtttgtccgtggagacagaaaggaagaagctgcccaaagagactctagaacagcagaagcgcatctgtgagatggcagcctatttcacccactcaaacctgcagcctgtgcacatgatcctggtgctgcgtacagccctcaatctgttcttcaagctcaagaacttcaagacagctgccacctttgctcggcgcctactagaactcgggcccaagcctgaggtggcccaacagacccgaaaaatcctgtctgcctgtgagaagaatcccacagatgcctaccagctcaattatgacatgcacaacccctttgacatttgtgctgcatcatatcggcccatctaccgtggaaagccagtagaaaagtgtccactcagtggggcctgctattcccctgagttcaaaggtcaaatctgcagggtcaccacagtgacagagattggcaaagatgtgattggtttaaggatcagtcctctgcagtttcgctaaggccccctttgtgtgcatgggtcagtcaccatatgttccccccagagaatgtgtctatatcctccttctaacagcaccttccccctgcagctactcttcagatctggctctctgtaccctaaaacctagtatctttttctcttctatggaaaatccgaaggtctaaacttgacttttttgaggtcttctcaacttgactacagttgtgctcataattgtccttgcctttccagcttaattattttaaggaacaaatgaaaactctgggctgggtggagtggctcatacnnnnnnnnnnnnnnnnnnnnnnnnnnnnnnnnnnnnnnnnnnnnnnnnnnnnnnnnnnnnnnnnnnnnnnnnnnnnnnnnnnnnnnnnnnnnnnnnnnnnnnnnnnnnnnnnnnnnnnnnnnnngtagcatgcgcctatagtcccagctgctcaggaggttgaggcatgagaatcgcttgaacnnnnnnnnnnnnnnnnnnnnnnnnnnnnnnnnnnnnnnnnnnnnnnnnnnnnnnnnnnnnnnnnnagactttgtttcnnnnnnnnnnnnnnggaaaactctgtgatggacatttgtttagtaaatcccttcagtatttatccctcctttccccacagcagctttctttcctgtcaactagaaaggagcaggatgtaataaatacattttggtgtgactaggccacaccaactcttaatcatctcccattttccttagacatttaaatttcaaggcaggtaccctctgtgtactcagaaatttgaagaagttatttggttttccaaaatgcacactgcgggttattgatttgttctttacaactattgttctcatatttctcacactaaataaatctctatgagagcttcttgacttggccatttatttcttggacactctcatgttcttgttcacccatgcaggcaccccaccaaagtacatatcttccttccagtaataatttttaattacaaaataaacatccactattg

SEQ ID NO: 70219 - DNA, 377 bp, Homo Sapiens
  misc_feature (78)..(112): n is a, c, g, or t
aagattataaatcactataggcgctactcgtctgcacgaacgacgagcgcagcgaagtagtgagcgaggaagcggcgnnnnnnnnnnnnnnnnnnnnnnnnnnnnnnnnnnncagtcgacggtaccggacatatgcccgggaattcggccattacggccgggtgtctatatcctccttctaacagcaccttccccctgcagctactcttcagatctggctctctgtaccctaaaacctagtatctttttctcttctatggaaaatccgaaggtctaaacttgacttttttgaggtcttctcaacttgactacagttgtgctcataattgtccttgcctttccagcttaattattttaaggaacaaatgaaggctctg

SEQ ID NO: 70220 - DNA, 1687 bp, Homo Sapiens
  misc_feature (49)..(62): n is a, c, g, or t
  misc_feature (811)..(886): n is a, c, g, or t
  misc_feature (913)..(913): n is a, c, g, or t
  misc_feature (932)..(932): n is a, c, g, or t
  misc_feature (947)..(962): n is a, c, g, or t
  misc_feature (988)..(997): n is a, c, g, or t
  misc_feature (1139)..(1145): n is a, c, g, or t
  misc_feature (1147)..(1147): n is a, c, g, or t
  misc_feature (1149)..(1149): n is a, c, g, or t
  misc_feature (1153)..(1153): n is a, c, g, or t
  misc_feature (1156)..(1157): n is a, c, g, or t
  misc_feature (1159)..(1159): n is a, c, g, or t
  misc_feature (1163)..(1163): n is a, c, g, or t
  misc_feature (1174)..(1174): n is a, c, g, or t
  misc_feature (1178)..(1179): n is a, c, g, or t
  misc_feature (1554)..(1554): n is a, c, g, or t
ggaccagttcatcttccccagctggatgcacccagctggcgacagctcnnnnnnnnnnnnnngacaccgatcatgtgcttcttggatctggtgactgttctctccctgttttcctttctttttgggtgtttgaggagcatggcttagcttgagacacacacagacactgtgtacttcagtgaagggcttaatatacaatttccaaacctgacgactcttcttcttgtaatggctgcccttttcctacctgaggccgtcttagagaaaggggccagtctcctctaatgctcagatttcccatagttggcttttgctgtgtctcctgcctcaggcagtgtcatttctgggagcaggtggttgtagtccaggcccctccccagcagggtctgcccaggctccttcgagcccctttccccgcctcctctcagcctgtccggatgacagtgttcgcctcctgtttagactgtacactcttcaggggtaggggtgccgtcagttcttcaatcagctggcacacacttgtatagtgaaatgtttacatgtgggaaaactccgccttagacaaactaccaaagtacaatcgtgtctctctctagccggaatgctacagagagaaatggaaccttagatttgcaacaaaagtctgtaaactggtctgtttgccaaagtgaacactggatgactaaggagctgaagaaggcccccagaagcggatttgtggtgggttattttattttgcctgtggccaatcttctgtgaaatacaatgtgctgttggtgcaacagatgattcaataaatgtctacagcagnnnnnnnnnnnnnnnnnnnnnnnnnnnnnnnnnnnnnnnnnnnnnnnnnnnnnnnnnnnnnnnnnnnnnnnnnnnncacaccaaaccaccacaaacttttacncataactaaccacccaacncaaaaaattcgtcgnnnnnnnnnnnnnnnnaaaaatttttcaaaaatattcgattnnnnnnnnnncccccaaaaaaaagggaacgcggccaaccctgggttcccaagaaaacccgggtaaagacaaaggggcggggatcccccccaaaaaaaccccgggacccggtcgaaaacaggggtcgggttggtaccggggagtaacccaatnnnnnnnangncggngcnngngggnggaccgccgcngcgnngggccggtgcgatcggggggggcgcgcccgcggcgggcccttgccggctgctcgccttcgacgcgcccccgcgcacgcgcggctccatgacgcccgggctggtccgtggcatctccgaggagccgagctgccatgaccgcgctctagccggcccggacggccctgcgcgcgccgcccgggctggtatatcgccggggcgacggctgagtcctgcctgaagggcgccaatcgtgcttcgcacgttggtgggtttgtatttgctgcgattgacgagactgagattggatgagtggaagccacacgatcatccgtccgatggagtgctcatgagcatgagatcagctgcgacatcgacgccacggggcgcgcctctgnttgagcggcacggcgtgtaggcgcaccgccgtgcgcactggacaggcgcgggtgagaggcaccagctgcgcgcgccttacgtacgggactctcacagcgtgcgggacggttgcgggatgcgtcggaacgaggg

SEQ ID NO: 70221 - DNA, 153 bp, Homo Sapiens
ctagagcggccgcctactactactatacggctgcgagaagacgacagaaggggatttgtggtgggttattttattttgcctgtggccaatcttctgtgaaatacaatgtgctgttggtgcaacagatgattcaataaatgtctacagcataag

SEQ ID NO: 70222 - DNA, 1339 bp, Homo Sapiens
  misc_feature (72)..(94): n is a, c, g, or t
  misc_feature (680)..(680): n is a, c, g, or t
  misc_feature (1232)..(1266): n is a, c, g, or t
ggtaacgacggccagtgccatgccggattaacctcactaaagggaaaaagcttgcggccgcggctgtaggcnnnnnnnnnnnnnnnnnnnnnnngagtatttgctgtattttatttgttcacatttagcctatttgaggttaacactacttcatttgacagtttaaaaatcatcctgtaaatagaataaaaaacaacagcagcaatagctaaaaaaaggacacaatgtataataaaataaaggaatgtgttgaaagaaatattccaaagaagcaaaggaaatgagaccatgattatgaattcaacaatcagaagaaaaaatcgtccaacatctgtaaaaagcaaaatcataacagtaataaaaaagaagcaagaattcaaagtgcaggtgcgctagctttcatttccacatccattcaggaaatagagcatactattcttttatataaagtgacaagttctgtttttaaaacattcagttacattatcttgcagattttttttcagtttacattatctctacattgatttgatggaaagatggtcatatgcgatatgtggtataaatttcttcaatctatggagaatacggaaatggtaaagttgactgttttacttatgtttttgcagtaagaagctaaacatccagtatcagaagcatcagtacttttactctttcanaaacaaaagcaaagcaaaagcaaaaacctgtcatgagccctctgtctttgctgctactttcagattctctgtgacaaaagactgttacttttcactgaattctaatgagttgacgtaaataatcagaaccatttcttaaatgcaaaattggtctggtatctgtctaaattggtcaatacaagtgttattctggaatcatgtaaaaatcacttactttcataactgtttagaaccccaaatgttttccctttgaaggggaacatctgtggaatatgattttgaatagaggacttctatgaaatatatttcaaatcttaaaaatatttttaatacttcctaaagtggtataggatttaccctcgctgactatgccttccatttaagaacagtcttgcatttgtggcttttcattttccttacagctctaattttatttaaaaagcctgaatacacacaatgactgctgccttacttagcattaaacagtactattttttaaacccccggccgtaatggccgaattcccgggcatatgtccgtaccgtcgactgnnnnnnnnnnnnnnnnnnnnnnnnnnnnnnnnnnncgccgcttcctcgctcactactcctgcgctcgtcgttcgctgcgacggaggtagccccatatatttatacatc

SEQ ID NO: 70223 - DNA, 1061 bp, Homo Sapiens
  misc_feature (1)..(1): n is a, c, g, or t
ncagtcgacggtaccggacatatgcccgggaattcggccattacggccggggtgactcatattcacgataggatacaaagtgtgatttgttggaaacatgtcccaaatttctaaaattctgcttctctgccaaaagcaatgtctttcttggttgatatttgagttttaaaagggtcaaatctttctaattttttgtatctttagagggcagcactagaagaaatcagcaggtctaatcccaccagtaagaaaactaccacttcttgatttttacagatttaaaaaaatcttttcagtgacctttctttttaatgtaaatacaaatttaaacctaggcttaatataggcgtttcccctttcacccaagtgatgtcacagttcgatgcaaaatcaatgatccagaatgatcgtgggtaaaaataactcaaagtgtttcttaagggtgagttggcatgcaaaaaattacattgattacagtgtgttttggagctggctctgtttgtgtgcatatgataatgcagagttgagccagagcctggaaatgtcattctagatctcactaactactggaatcagtgttttaatctcttggtggaaactttcagttgcttaactctctattggaagatttttttaatgttctacatcatttatgttgtattacaatgtatgtagaaatagtaacctgtgaactatgcttttccataactttttaaaaatatatatatctaaatgaatgcaatgtgcataaatattttttaaacataacagtgaactattgcaccttttgctaatgcctctatttacttgctttggcataaagaatgagccaatgaacctctgtgtcctgtggaaaaatgtataaatgttatctgatattgctcttagatgtaatgctaattaatgttaaatcacaaataaacagtattttaaatatacggacttgtatcatgaggtttccattcacaggtggttacttagcctattcatggtctgttgagttttatacttcagtgaaacttggtaagttattgatgcttctgaataaagaatgtcctgat

SEQ ID NO: 70224 - DNA, 1014 bp, Homo Sapiens
cgggagccggcagggagcggagctgcggagccgcctggtctcccgcgtccatcggtccattcctgcgtcgttctgtccttccgaacgcacacttcaggagcagccgcgagggtggcatggcagcgagcacagacatggctgggctggaggagagcttccgcaagtttgccatccatggtgaccccaaggccagtgggcaagagatgaatggcaagaactgggccaagctgtgcaaggactgcaaggtggctgacggaaagtccgtgacagggaccgatgtggacatcgtcttctccaaagtcaaggggaagtctgctcgggtcatcaactatgaggagttcaagaaggccctggaagagctggcgaccaagagattcaaggggaagagcaaggaggaggccttcgatgccatctgccagctggtggcaggcaaagagccagccaatgtgggcgtcactaaagcaaaaacagggggtgctgtagaccggctgacggacaccagcagatacacgggctcccacaaggagcgcttcgatgagagcggcaagggcaagggcattgcgggacggcaggacatcctggacgacagtggctacgtgagcgcctacaagaatgcaggcacctacgatgccaaggtgaagaagtgaggcttgggaagaccgccctgccaagtgcggctgcccctgccagaggctcaggcctgggtctaaggggcacgtggagcaagagatcctggtcccctccctgctggacctgccacccagagcttcctgcctagtcccactgggctggcccaccaggcctctgacccaggctgctctgcggccccttcctcctcctcttcctgctccaacttctgtccacctggggacagtctgtgcctgtagcctcatgaccccaacccagccccaggcatggctaacccctgactgcttgcctcatatttaagctgctgctctggccaagtgcctaattttaacccagacctcaataaagacaccttttgtaccaaaa

SEQ ID NO: 70225 - DNA, 828 bp, Homo Sapiens
ggtctggagataattcagaaatacagatgataattgttttcaaattcttgaaggaaatgggagagagaataggctaattctgtattgcttcagaaaccaaatggaaacaattaaattccattagagaaacggttggaaaatatgaggaggatttagttcagtacgaggaagctgtttctaatactttttgttggttaaaaatacattccgctgctgtggaaagcctgtagctgccaggagtgttacagagggcattcctcccttgagttgacatttgtgccaaaccggcttttagggcttctccagcttttaagatgcgataatgataagatgatcatcgggaaaacatccctcagatgaaacgttcacaggctggctctgaaaactggcattcagatgattgcggctcccccatactgtaggaatattgtttatggcttaaggttgcctcgctcctcatctgtaatcagtgaaagtttatccagaggttaattaccggttttctggtgggtatctgggaactgaggatgggagattaactgttgtatatgaccatagtaaagcaaaagactgttagagaatgagtaaacgttcgttttcctccctacagaatttacagttactctctgtccattccactcactactgtcttcatcacacacacagaggcaaacgtctgattcagatagccaggtgtgccatgcatgcactccaccatattgtgatctcttcgaggcttgtttctgtcccctgtcctccacagtcctggattgttaatgaatagttcatacatgtttgttaaataaatataccttctttaaaattaaa

SEQ ID NO: 70226 - DNA, 812 bp, Homo Sapiens
  misc_feature (710)..(723): n is a, c, g, or t
cctcctcggtctcccaggtctcgctcgcggtccaggtcttcatctatgaccaggagtcctccccgggtatccaagaggaaatccaagtcaaggtcgcgatccaagaggccccccaagtctcctgaagaggaaggacagatgtcctcttaagaaaatgatgcatcaggaagcaacgtgatggaggacttgggggaaaaggatcacatactcagtctatggaagcaacgtccctggaagaagaggctgcctattgaaaaggttgtgtcacacttttctacctttttgccagtttgaagctttgcatcaggtggcaaaattcattctatgtgccgttttgttgttattcacattttattgtaacttaggaggtgaacgacctaagattacgttattgggtttggatatttgaggcaaaaatttatttttatttctatagtgatgactgttttggtttgaaatgaacagattggtaacctaatttgtggcctcctgacttttaaggaaacgtgtgcagccattacacacagcctaacgctggcaagacattgcttcaacattgccttcattccttaaaaacctacaaaaggtggtgtaaattaatatggataattttatttacctccaggtctaaaaggtagtgtgacccaaatttgtataaagatttttcatgtgaaaggactggggttttagcaaacacaggtctaatctcnnnnnnnnnnnnnngcaccaggcccggctgcgtagcagttgagtgatgctggttagctattaaggtggcctgttgcagtgcagagtgctgagctgcttcctgt

SEQ ID NO: 70227 - DNA, 1151 bp, Homo Sapiens
  misc_feature (74)..(108): n is a, c, g, or t
tgtataatcatatagggcgctactcttattagcgaacgacgagcgcagcgagtatatgagcgaggaagcggcgnnnnnnnnnnnnnnnnnnnnnnnnnnnnnnnnnnncagtcgacggtaccggacatatgcccgggaattcggccattacggccgggtccatcgaagaagagtccttggaacaagcaactggctattgaaaaggttattttgtaacatttgtctaactttttacttgtttaagctttgcctcagttggcaaacttcattttatgtgccattttgttgctgttattcaaatttcttgtaatttagtgaggtgaacgacttcagatttcattattggatttggatatttgaggtaaaatttcattttgttatatagtgctgactttttttgtttgaaattaaacagattggtaacctaatttgtggcctcctgacttttaaggaaaacgtgtgcagccattacacacagcctaaagctgtcaagagattgactcggcattgccttcattccttaaaattaaaaacctacaaaagttggtgtaaatttgtatatgttatttaccttcagatctaaatggtaatctgaacccaaatttgtataaagacttttcaggtgaaaagacttgattttttgaaaggattgtttatcaaacacaattctaatctcttctcttatgtatttttgtgcactaggcgcagttgtgtagcagttgagtaatgctggttagctgttaaggtggcgtgttgcagtgcagagtgcttggctgtttcctgttttctcccgattgctcctgtgtaaagatgccttgtcgtgcagaaacaaatggctgtccagtttattaaaatgcctgacaactgcacttccagtcacccgggccttgcatataaataacggagcatacagtgagcacatctagctgatgataaatacacctttttttccctcttccccctaaaaatggtaaatctgatcatatctacatgtatgaacttaacatggaaaatgttaaggaagcaaatggttgtaactttgtaagtacttataacatggtgtatctttttgcttatgaatattctgtattataaccattgtttctgtagtttaattaaaacattttcttggtgttagcttttctcagaaa

SEQ ID NO: 70228 - DNA, 1758 bp, Homo Sapiens
aactatcggctaggtacgagccctgggtgatgaattcggcacgaggctcacgtgcgctagcctgcggagcccgtccgtgctgttctgcggcaaggcctttcccagtgtccccacgcggaaggcaactgcctgagaggcgcggcgtcgcaccgcccagagctgaggaagccggcgccagttcgcggggctccgggccgccactcagagctatgagctacggccgcccccctcccgatgtggagggtatgacctccctcaaggtggacaacctgacctaccgcacctcgcccgacacgctgaggcgcgtcttcgagaagtacgggcgcgtcggcgacgtgtacatcccgcgggatcgctacaccaaggagtcccgcggcttcgccttcgttcgctttcacgacaagcgcgacgctgaggacgctatggatgccatggacggggccgtgctggacggccgcgagctgcgggtgcaaatggcgcgctacggccgccccccggactcacaccacagccgccggggaccgccaccccgcaggtacgggggcggtggctacggacgccggagccgcagccctaggcggcgtcgccgcagccgatcccggagtcggagccgttccaggtctcgcagccgatctcgctacagccgctcgaagtctcggtcccgcactcgttctcgatctcggtcgacctccaagtccagatccgcacgaaggtccaagtccaagtcctcgtcggtctccagatctcgttcgcggtccaggtcccggtctcggtccaggagtcctcccccagtgtccaagagggaatccaaatccaggtcgcgatcgaagagtccccccaagtctcctgaagaggaaggagcggtgtcctcttaagaaaatgatgtatcggcaagcagtgtaaacggaggacttggggaaaaaggaccacatagtccatcgaagaagagtccttggaacaagcaactggctattgaaaaggttattttgtaacatttgtctaactttttacttgtttaagctttgcctcagttggcaaacttcattttatgtgccattttgttgctgttattcaaatttcttgtaatttagtgaggtgaacgacttcagatttcattattggatttggatatttgaggtaaaatttcattttgttatatagtgctgactttttttgtttgaaattaaacagattggtaacctaatttgtggcctcctgacttttaaggaaaacgtgtgcagccattacacacagcctaaagctgtcaagagattgactcggcattgccttcattccttaaaattaaaaacctacaaaagttggtgtaaatttgtatatgttatttaccttcagatctaaatggtaatctgaaaccaaatttgtataaagacttttcaggtgaaaagacttgatttttttgaacaggattgtttatcaaacacacattctaaatctcttctcttatggatttttgggcactaagcgcagttgtgtagcagttgagtaatggctggttaagctgctaaggtggcgtgttgcagtgcaaagtgctgggctggtcctgtttcatcccgatggctcctggtgtaaaagatgccttgtcgtgcagaaacaatgggctgtccagttattaaatgccctgacaactgcgcttccagtcaccgggcctgcatataatacggagcatacaggagcactctagcgatgataaacacctatttccgtctccctaaaggtaaccgacatattagtgttgaa

SEQ ID NO: 70229 - DNA, 1169 bp, Homo Sapiens
  misc_feature (1067)..(1067): n is a, c, g, or t
  misc_feature (1092)..(1092): n is a, c, g, or t
cacaccacagccgccggggaccgccaccccgcaggtacgggggcggtggctacggacgccggagccgcagccctagccggcgtcgccgcagccgatcccggagtcggagccgttccaggtctcgcagccgatctcgctacagccgctcgaagtctcggtcccgcactcgttctcgatctcggtcgacctccaagtccagatccgcacgaaggtccaagtccaagtcctcgtcggtctccagatctcgttcgcggtccaggtcccggtctcggtccaggagtcctcccccagtgtccaagagggaatccaaatccagctcgcgatcgaagagtccccccaagtctcctgaagaggaaggagcggtgtcctcttaagaaaatgctgcggtctcctgtttgataaaagaatattggccagtattgcagattttaactgatttggctgatcctccagggaccagtttctgtgggcgtgtattggagcagatgtatcggcaagcagtgtaaacggaggacttggggaaaaaggaccacatagtccatcgaagaagagtccttggaacaagcaactggctattgaaaaggttattttgtaacatttgtctaactttttacttgtttaagctttgcctcagttggcaaacttcattttatgtgccattttgttgctgttattcaaatttcttgtaatttagtgaggtgaacgacttcagatttcattattggatttggatatttgaggtaaaatttcattttgttatatagtgctgactttttttgtttgaaattaaacagattggtaacctaatttgtggcctcctgacttttaaggaaaacgtgtgcagccattacacacagcctaaagctgtcaagagattgactcggcattgccttcattccttaaaattaaaaacctacaaaagttggtgtaaatttgtatatgttatttaccttcagatctaaatggtaatctgaacccaaatttgtataaagacttttcaggtgaaaagacttgattttttgaaaggattgtttatcaaacacaattctaatctccttctctaatgnattttttggggcactaaggcgcaanttgtgttaccagttgaagaaatgcctgctttacctggttaagggtggcctgttttgcaattggcaaaaatggctttg

SEQ ID NO: 70230 - DNA, 568 bp, Homo Sapiens
aacattcatgagtcctcccaatctgtttaatttcaaacaaaaaaagtcagcactatataacaaaatgaaattttacctcaaatatccaaatccaataatgaaatctgaagtcgttcacctcactaaattacaagaaatttgaataacagcaacaaaatggcacataaaatgaagtttgccaactgaggcaaagcttaaacaagtaaaaagttagacaaatgttacaaaataaccttttcaatagccagttgcttgttccaaggactcttcttcgatggactatgtggtcctttttccccaagtcctccgtttacactgcttgccgatacatctaggtttgaaaagaaagaagttcagcttaccttccattaaagtgcacatggtttcagtttcaggcacgtacttactaaggctctggtcaaaccagtagggtacagaaatgttccacccagccatgtttttaaaaggcccaattaggaaaatttcacaaaggctaccatcagcatgtacaagtttgaatttacgtattcctggccaaataaccaaggtgaagaaaggtaaggggaag

SEQ ID NO: 70231 - DNA, 531 bp, Homo Sapiens
gtgaaaggactggggttttagcaaacacaggtctaatctcttttgtgtttttgtgcaccaggcccggctgcgtagcagttgagtgatgctggttagctattaaggtggcctgttgcagtgcagagtgctgagctgcttcctgttttcttctgattgctcctggggaaaacacgccttgtcctgaagaacaaatggctgtccagtttattaaaatgcctgtcaactgcacttccagtcacccaggccttgcagataaataatggagcatgcagtgagcacatctagctgacggataatcacaccttttcccccgtcttttctgaaaaattgtaaatctgatcatatcaacatgtatgaacttaaaatatggagaatgttatggaagaaatagtttataagtttgttaagtacttataacatggtttatctttttgattattaattttttacgctaaccattgtttctgtagttaaaattgttttcttggtgttatcttttctcagaataaaattagaaacttttgatggaaa

SEQ ID NO: 70232 - DNA, 191 bp, Homo Sapiens
actatggttcatttcagttgtaattcacattttattgtaacgttaggtcgttcacctcctaagttacaataaaatgtgaataacaacaaaacggcacatagaatgaattttgccacctgatgcaaagcttcaaactggcaaaaaggtagaaaagtgtgacacaccttttcaatagcagccttcaggtccgg

SEQ ID NO: 70233 - DNA, 561 bp, Homo Sapiens
cctggtagggtcagcatcagttaaaatctgcaatactggccaatattcttttatcaaacaggagaccgcagctttaaagggggaaaatgcagacgttggataaagacagcaagaaatagtcattttcattaataggtctcaaacagtttacgaaacagccattattatctaagcttcatacacatcctttctgcaaacccctctcttcagtattacttcccaaaggtgagtaacctccgagcagcactcctaatgataggagtcattcttacattaacacgactcaaaaagacctaccccaaatcccatttatgaattagggttatgtgtctcggattcccagacattaccattttcttaagaggacacgcgctccttcctcttcaggagacttgggggaactcttcgatcgcgacctgaatttggattccctcttggacactgggggaggactcctggaccgagaccgggacctggaccgcgaacgagatctggagaccgacgaggacttggacttggaacttcgtgcggatctggacttggaggtcgaccgagatcgag

SEQ ID NO: 70234 - DNA, 1235 bp, Homo Sapiens
cagcgcaagccaagagaaacagatgtctgccaattccaagcacaggcgtttactgaagcatgtgaaagggaactaagaagacttaaagttcaagagaatattggacctctaagaatacatgagaaggaggaggaaacagaaaaaatatacagaggagaagctgttcgtaaaggaactccagaatgtagtcagccctggaagatttactctagaaaaaccacaacgcagagtctaagaggtgtcctcccaaagccaaataaagcagttccaatgaaagtaagtgaacacagtctcctgccccttatgctggagcagtttccgtttctttatgtttctggcccaacactaagcaaaatgtggaaacagcaaattgcacaggttgaacagcttaagaaagaagcatgtagagaaaatcgatcaaagaagaaactccaagatgaaatagaagaagccctaagaaggcatgacctccttactacccttgtcaagaaagaatatgaacataacaagagactgcaagacttcaaggactgcattcgtaggcaaaggttgacccaatcaaagataaaagaaaatcgacagcaaatcgttcgtgctcgaaaatattatgatgattatagagttcagttgtgtgcaaaaatgatgagaatgaggacccgggaagaaatgatatttaagaaactgtttgaagaaggtttaaacattcaaaagcaaagattacgagacctaagaaactatgccaaagaaaagcgagatgaacaaaggagacgccaccaggatgaactggactccatggagaactactataaggaccagttttcattgctggcagaagccatatcacaggaacatcaagaacttaaagccagagagaaatctcaggcccagacattacataaggtgaagagggagctgagatctaagatggagaaggaaattcagcagctgcaggacatgataacacagaatgatgatgatgttttcttccgggaactggaagctgagcgcttcagatctcggcttcagctggcttcctttcagtacagtaaaagtccctccctatgaggccagacttgataatagtaggtgaaggttctggaggcctttaccaggacagagctagaatcgagccagtaaacagtctaagccagaaaaataattttcaaatgctttacctgtattttcattccagtactttttatgattttttaaataaaaattgttttctaaaagct

SEQ ID NO: 70235 - DNA, 1486 bp, Homo Sapiens
  misc_feature (1391)..(1391): n is a, c, g, or t
  misc_feature (1409)..(1409): n is a, c, g, or t
  misc_feature (1413)..(1413): n is a, c, g, or t
  misc_feature (1421)..(1421): n is a, c, g, or t
gcacgagggaacacaaagaattggttcagaaacttcaacattttcaagagttaggagaagaaaaggacaacagggttaaagaagctgaagaaaaaatcttaacacttgaaaaccaagtttattccatgaaagctgaacttgaaactaagaagaaagaattagaacatgtgaatttaagtgtgaaaagcaaagaggaggagttaaaggcattggaagataggcttgagtcagaaagtgctgcaaaattagcagagttgaagagaaaagctgaacaaaaaattgctgccattaagaagcagttgttatctcaaatggaagagaaagaagaacagtataaaaaaggtacagaaagccatttgagtgagctaaatacaaaattgcaggaaagagaaagggaagttcacatcttggaagaaaaacttaagtcagtggaaagttcacagtcagaaacattaattgtacccagatcagcaaaaaatgtggcagcatatactgaacaagaagaagcagattcccaaggctgtgtgcagaagacatatgaagaaaaaatcagtgttttacaaagaaacttaactgaaaaagaaaagctattgcagagggtagggcaggaaaaagaagagacagtttcttctcattttgaaatgcgatgccaataccaggagcgcttaataaagctagaacatgctgaggcaaagcaacatgaagatcaaagtaagataggtcatcttcaagaggagcttgaagaaaaaaacaagaaatattccttgatagtagcccagcatgtggaaaaagaaggaggtaaaaataacatacaggcaaagcaaaacttggaaaatgtgtttgacgacgtccagaaaaccctccaggagaaggaactaacctgtcagattttggagcaaaagataaaagagctggattcctgcttagtaagacagaaagaagtacatagagttgaaatggaagagttgacctcaaaatatgaaaaattacaggctttacaacagatggatggaagaaataaacccacagaacttttggaagaaaacactgaagaaaagtccaaatcacatttggtccaacccaaattgcttagtaacatggaagcccagcacagtgatctggagtttaaattagccggggcagaacgggagaaacagaaactgggcaaggagattgttagattgcagaaagaccttcgaatgttgagaaaggagcatcagcaagaattggaaatactaaagaaagaatatgatcaagaaagggaaaagagaaatcaaacaggaggcaggaagatcttgaactgaagcacaattccacattaaaaccagctggatgagggagttttaatacacagctgggcacaaaagggaacagagctgggaaatggcccntaaaagaaaacttatcantaangggcccangaaggtggggaagcctgaaactttttaagaaagcccattcaagaaggaagacaaaattcaggtta

SEQ ID NO: 70236 - DNA, 578 bp, Homo Sapiens
atgtcaaaataagttaaaacttccctcctgttcacctcttgggtctctatcctgtgtaacctctggtgtagtatttgcccataggcaaccagagccacttcctctgaacccaacatctcctggggaccttcgcagcaagaggaaagcactgagacaatagcttgctaagcaggggcccagtggtgtctcagagaaaccatgggtgtcctcgccacttcccagggagggtgaggtgagctcgggaacataacgatgttttgacttacaataggcatgaaatcgcaactagaaaaattagggcagtttttaaaaatgtcatagttatctattgcatgaactggagtaattccacctggtggtgaaaggattgttatttcacacatgaaaaattcatccagttttactaaaatgtaattttttctgtcatttgaaagtactgacaactatttgtaactaatcttccttaagaactgtatttgagggtatcaaatcaagcttgtaatttaaaatctgtaccaacaaagtgtctcagagagtttatttgaaccattgcgtgctgagaaaaaactgctttaaag

SEQ ID NO: 70237 - DNA, 601 bp, Homo Sapiens
  misc_feature (76)..(150): n is a, c, g, or t
tatagtagaaagtacttcaaaggaatgtgagttatatgagatgatatatgtaaccatttggtaaatatttgctgtnnnnnnnnnnnnnnnnnnnnnnnnnnnnnnnnnnnnnnnnnnnnnnnnnnnnnnnnnnnnnnnnnnnnnnnnnnnatcatgtaaacttacaaagcatcaaataagagaaatgtttactagatataagctgaaagaaatgcatgttgcacatacagtcttctaagtttatgatttgtttttaaggttatattaaggaagatcttgatccttgtcctcgtccaaaaagacgtcagccttacaacgcaatattttctccaaaaggcaaggagcagaagacatagacgttgaaacagaaacagaaggatgaaggacagttttttccttcttagttatttatagttaaagttggtactaaacattgatttttttgatcttctgtaaatggatttataaatcagttttctattgaaaatgtttgtgatattttgcttttgcacctttaaaacaataaggcgctttcattttgcactctaacttaagagtttttactttatgtagtgatacctaatacaattttgaaaatccc

SEQ ID NO: 70238 - DNA, 654 bp, Homo Sapiens
  misc_feature (47)..(47): n is a, c, g, or t
caagacaaagtcaagcagaaagcgtttgtggagccgtattttaaggntgatgaaagagagactagcttgcaaaattttcctcatattgaggtggttcggaaaaaagaggagagaagaaaactgcttgggcacacgtgtaaggaatgtgaaatttattatgcagatatgccagcagaagaaagagaaaagaaattggcttcctgctcaagacaccgattccgctacattccacccaacacaccagagaatttttgggaagttggttttccttccactcagacttgtatggaaagaggttatattaaggaagatcttgatccttgtcctcgtccaaaaagacgtcagccttacaacgcaatattttctccaaaaggcaaggagcagaagacatagacgttgaaacagaaacagaaggatgaaggacagttttttccttcttagttatttatagttaaagttggtactaaacattgatttttttgatcttctgtaaatggatttataaatcagttttctattgaaaatgtttgtgatattttgcttttgcacctttaaaacaataaggcgctttcattttgcactctaacttaagagtttttactttatgtagtgatacctaatacaattttgaaaatacaatagttgtagtctgtg

SEQ ID NO: 70239 - DNA, 1065 bp, Homo Sapiens
  misc_feature (34)..(34): n is a, c, g, or t
  misc_feature (73)..(135): n is a, c, g, or t
  misc_feature (140)..(142): n is a, c, g, or t
  misc_feature (155)..(156): n is a, c, g, or t
  misc_feature (161)..(161): n is a, c, g, or t
  misc_feature (166)..(166): n is a, c, g, or t
  misc_feature (174)..(174): n is a, c, g, or t
  misc_feature (195)..(195): n is a, c, g, or t
  misc_feature (1002)..(1024): n is a, c, g, or t
taatttgagtagctcactcataggcacccaggcnttacacttatgctccggctcgtatgtgtgtggaatgtgnnnnnnnnnnnnnnnnnnnnnnnnnnnnnnnnnnnnnnnnnnnnnnnnnnnnnnnnnnnnnnnattgnnncctcgagccaganntcgcnacganggtctgtnaagacacaaaatccctttttnttctcaattgacttaactgcatgatttctgttttatctacctctaaagcaaatctgcagtgttccaaagactttggtatggattaagcgctgtccagtaacaaaatgaaatctcaaaacagagctcagctgcaaaaaagcatattttctgtgtttctggactgcactgttgtccttgccctcacatagacactcagacaccctcacaaacacagtagtctatagttaggattaaaataggatctgaacattcaaaagaaagctttggaaaaaaagagctggctggcctaaaaacctaaatatatgatgaagattgtaggactgtcttcccaagccccatgttcatggtggggcaatggttatttggttattttactcaattggttactctcatttgaaatgagggagggacatacagaataggaacaggtgtttgctctcctaagagccttcatgcacacccctgaaccacgaggaaacagtacagtcgctagtcaagtggtttttaaagtaaagtatattcataaggtaacagttattctgttgttataaaactatacccactgcaaaagtagtagtcaagtgtctaggtctttgatattgctcttttggttaacactaagcttaagtagactatacagttgtatgaatttgtaaaagtatatgaacacctagtgagatttcaaacttgtaattgtggttaaatagtcattgtattttcttgtgaactgtgttttatgattttacctcaaatcagaaaacaaaatgatgtgctttggtcagttaataaaaatggttttacccactnnnnnnnnnnnnnnnnnnnnnnngtctacagccgcggccgcaagcttattccctttagtgaggg

SEQ ID NO: 70240 - DNA, 1656 bp, Homo Sapiens
  misc_feature (1132)..(1140): n is a, c, g, or t
  misc_feature (1456)..(1456): n is a, c, g, or t
  misc_feature (1600)..(1600): n is a, c, g, or t
acgcactatgaatatagaccagtggttaagaaagcaggctggtacaggtccggaattcccgggatatcgtcgacccacgcgctcggaaagtggctgagttccggatccctgcctagcgcggcccaactctttactccagagatcatggctgccgaggatgtggtggcgactggcgccgacccaagcgatctggagagcggcgggctgctgcatgagattttcacgtcgccgctcaacctgctgctgcttggcctctgcatcttcctgctctacaagatcgtgcgcggggaccagccggcggccagcggcgacagcgacgacgacgagccgccccctctgccccgcctcaagcggcgcgacttcacccccgccgagctgcggcgcttcgacggcgtccaggacccgcgcatactcatggccatcaacggcaaggtgttcgatgtgaccaaaggccgcaaattctacgggcccgaggggccgtatggggtctttgctggaagagatgcatccaggggccttgccacatttttgcctggataaggaagcactgaaggatgagtacgatgacctttctgacctcactgctgcccagcaggagactctgagtgactgggagtctcagttcactttcaagtatcatcacgtgggcaaactgctgaaggagggggaggagcccactgtgtactcagatgaggaagaaccaaaagatgagagtgcccggaaaaatgattaaagcattcagtggaagtatatctatttgtgtattttgcaaaatcatttgtaacagtccactctgtctttaaaacatagtgattacaatatttagaaagttttgagcacttgctataagttttttaattaacatcactagtgacactaataaaattaacttcttagaatgcatgatgtgtttgtgtgtcacaaatccagaaagtgaactgcagtgctgtaatacacatgttaatactgtttttcttctatctgtagttagtacaggatgaatttaaatgtgtttttcctgagagacaaggaagacttgggtatttcccaaaacaggtaaaaatcttaaatgtgcaccaagagcaaaggatcaactttaagtcatgatgttctgtaaagacaacaaatcccnnnnnnnnnctcaattgacttaactgcatgatttctgttttatctacctctaaagcaaatctgcagtgttccaaagactttggtatggattaagcgctgtccagtaacaaaatgaaatctcaaaacagagctcagctgcaaaaaagcatattttctgtgtttctggactgcactgttgtccttgccctcacatagacactcagacaccctcacaaacacagtagtctatagttaggattaaaataggatctgaacattcaaaagaaagctttggaaaaaaagagctggctggcctaaaaacctaaatatatgatgaagattgtangactgtctttccaagccccatgttcatggtgggggcaatggttatttggttattttactcaattggggtactctcatttgaaatgagggagggacctaccgaataaggaccggtggtttgctcctcctaagacccttcatgcancacccctgaaacaccgagggaaacagtaccggtcgcctagtccaagggggtttttc

SEQ ID NO: 70241 - DNA, 865 bp, Homo Sapiens
  misc_feature (119)..(119): n is a, c, g, or t
  misc_feature (395)..(408): n is a, c, g, or t
tgtctcaggggaaaggaatgctgcatcaatagatccagcaaagtagaaagcgctgggggttacagtgggacgagtgatcgaatcagattcacagttaatagaaggatctctatagttgnatttggcttgtatggatctattcatggccctacagattatcaagtgaatatacagatcattgaatatgagaaaaagcaaaccctgggacagaatgataccggctttagttgtgatgggacagctaacacattcagggtcatgttcaaggaacccatagagatcctgcccaatgtgtgctacacagcatgtgcaacactcaaaggtccagattcccactatggcacaaaaggattgaagaaagtagtgcatgagacacctgctgcaagcaagactgnnnnnnnnnnnnnnagttcccctggcaataataatggcacttcaatagaagatggacaaattccagaaatcatattttatacataatttagcattataatacatcttggctaaataataccatacaatctagtgtcaaaaacataaatggccacaaaaaagtagtttgagtgttatgaatatttaaaattgtaagataagaaacagtttcttagagcagatagaaaaatgcttatttaaatctttgcatgatttaaaaacagattttccattttcttacaactttaagagaaaagaactgggtttaatggtttaaaaaaaagcacagctttttcaccttcatcttgtataatttcatagattggctgacttagggtctttcaatagtttgggaattgaaagattcttgttatatatagctagtttgggtttgtttttgttttaactattttgaaggttaggtgagatgggc

SEQ ID NO: 70242 - DNA, 1671 bp, Homo Sapiens
  misc_feature (1596)..(1627): n is a, c, g, or t
ggtccggaattcccgggatatcgtcgacccacgcgtccgcacaaaaaagtagtttgagtgttatgaatatttaaaattgtaagataagaaactgtttcttatagcagatagaaaaatgcttatttaaatctttgcatgatttaaaaacagattttccattttcttacaactttaagagaaaagaactgggtttaatggtttaaaaaaaagcacagctttttcaccttcatcttgtataatttcatagattggctgacttagggtctttcaatagtttgggaattgaaagattcttgttatatatagctagtttgggtttgtttttgttttaactattttgaaggttaggtgagatgggcaaataggcttaactattttgaaggttggatgaaaagagatgggtcagtattcctacagaattcttattaactcaaataactaaatttcagaaaattaagaagctgactttatatttggtggtttgaagtatcttgttgttagcatttgtaataatgctaaaaaaggcctaataaaatgcccaagaaaatattcagtgcatttatagagaaggatattttgtagtagtatagtaatgtgttatgtagtacagttttaaagctataaatggaattttgtgtaaattcacaaaaatgtgatataaacaggatctaagactggattccctgtcactaaactgcaccactatacctgtctctctgtgtgggggacactgctgatgattcccaagattgagatgatgacggtgatgacgactgggtgaacagccatcacttcaacattgtgataatccttcacagcaagaaaccgaataaaatactaacatttctaacaactgctctgacattgtaaagagatccaacagaatcactcctgctgaaaaatacgctttctgccacctacacatttctatttaggaagtaaaattgcttcatggtcatgaccccattagtcagtgttacagctgtgttggggataggaagtatatctggcagattgacatttatacacttttttataaagcagattttaaaatatagtaacatccatttttttcccttgaaagtgattctcttataaaaaatgaaagtggagtttaaggtatatcaaatcgttgtggaaggtgattaaaaatcaaaattcttttaaatatcaacttaattttttctaagtaagatacaaaaaattttcatctaaagtaatatttcactttatattgtaaagaaggtaggtatattggtggctgaggtctcttgaaattgctaaagggaaatttttctatggtaatgctcttacggatataaacctcagttaaatggaattatctatgggatgtgtggttctggttaactaaaaattaaccagtaaacactctgtagtaaccattacagaaaatacttctgccttaaaaaatatgatatgccagagatgagttagtgtttcttgacgttggagaccttttaaatgcctcatctgttgtactgaacaattgaaactgcatgcagccataaaagggacaagaaacagaactgtttactaactttgggacatcccctggagtttttaaaaataaataannnnnnnnnnnnnnnnnnnnnnnnnnnnnnnngaccgcgtatgcggccgcaagcttattccctttagttgagggtt

SEQ ID NO: 70243 - DNA, 465 bp, Homo Sapiens
tctgccaaacattcaactgcttactgaaacaaagggctacttcttaagaagagctatttctttcagaacagagctgtggggagaagtacttcttttcggaaggcagtggaatattttagctcccagcttcttttcccccctctttataaatggctcagctgtcagtgactctcagcttctaaaacacacattctgcaacattcaagaggaaaccatctggaacatagtgcatgactcttactttgagtgttgcacatgctgtgtagcacacattgggcaggatctctatgggttccttgaacatgaccctgaatgtgttagctgtcccatcacaaataaagccggtatcattctgtcccagggtttgctttttctcatattcaatgatctgtaatttttaagagacaagttacatttaagttaaaccaaataaagcaaactatagaaaataatataaagccctta

SEQ ID NO: 70244 - DNA, 1200 bp, Homo Sapiens
  misc_feature (812)..(831): n is a, c, g, or t
attcgagctcggttcccctgaacctcaatgtggaaaggaacttgatgaaggagccctgggcacttaatattagtcacagagagaaacgacagcaggcgtaaacgtgataagggtgctgactgattctggctcattggattcaactatccctgggatagaaaataccatcacagttaccaccgagcaacttacaaccgcatcatttcctgttggttccaagaagaataaaggtgattctcatctaaatgttcaagttagcaactttaaatctggaaaaggagattctacacttcaggtttcttcaggattgaatgaaaacctcactgtcaatggaggaggctggaatgaaaagtctgtaaaactctcctcacagatcagtgcaggtgaggagaagtggaactccgtttcacctgcttctgcaggaaagaggaaaactgagccatctgcctggagtcaagacactggagatgctaatacaaatggaaaagactggggaaggagttggagtgaccgttcaatattttctggcattgggtctactgctgagccagtttctcagtctaccacttctgattatcagtgggatgttagccgtaatcaaccctatatcgatgatgaatggtctgggttaaatggtctgtcttctgctgatcccaactctgattggaatgcaccagcagaagagtggggcaattgggtagacgaagaaagagcttcacttctaaagtcccaggaaccaattcctgatgatcaaaaggtctcagatgatgataaagaaaagggagagggagctcttccaactgggaaatccnnnnnnnnnnnnnnnnnnnngaagaagcaaggtgaagataactctactgcacaggacacagaagaattagaaaaagagattagagaagaccttccagtgaatacctctaaaacccgtccaaaacaggaaaaagctttttccttgaagaccataagcactagtgatccagccgaagtactcgtcaaaaatagccagcctatcaagactcttccacctgctacttctaccgagccatctgtaatcttatcaaaaagtgattctgacaagagctcttcccaagtgccgccaatactacaagagacagataaatccaagtcaaataccaagcaaaatagtgtgcctccttcacagaccaagtctgaaactagctgggaatctcccaaacaaat

SEQ ID NO: 70245 - DNA, 1041 bp, Homo Sapiens
  misc_feature (73)..(73): n is a, c, g, or t
  misc_feature (83)..(83): n is a, c, g, or t
  misc_feature (90)..(90): n is a, c, g, or t
ctgtcccagtttaggatgtgagaaggatctgtgatccgtgaggatcttgctatgcatcgtctgtagagcaatntagagagtgntcagctnccagtgcccgtgggagttttaacgatcgtgtcgcagagagcacacccagcgtggggccgggacccttgcgcccgacgtcggaagcatacaggtatactatgcaagtgtatctgccacaacaaccactgtctttgtacctttttttgaacaagaatatatccatcctgcctaaccctgagttttggagcaccacagttgtcctgggagttggttgcatcttgtaggccatctgacttcctgtttttaaaacgggggtctggtcttgctaaacactacaggtaggttggtctttgaagtccactagtggagaatgtcaagacaagatacttattaccatgacatctgatgcatgtgcagcagtggggagttctagattgatctctgaatgtgatcgacgcccagcaaggacaagctttaaaatgtctgcggtctgcccttttgaagcaggactggctcactctgtcattgggagctgtcagctgcgactgcaggttctctaggaggcattccagaatagagtagcacactgtgtctgcagttctcgatgaccgaaagttatcaaaaatatttaaaatatttaaattgtgaacctattgataaagaatatttataaaaactgatctgtaggcctgtactaatctctacgcattagcaatattgactgtaaacccacattaaggaaaccactacgggtctggcagtgcgtgtcccgtggggtgtgcattttaaaactcgattcatagacacaggtaccatgttccatttccgtcatggtgaagcaaatgaattggcctggctaccactgtggtcgcgtgctacaggtttgacaaaaagatatcatgtttcgatttttttgtgtgtggacaacaatatggaagctaaaattgacatatttttatgtaaagtttttctattctttgatttttaataaactttggaaaccaaaaaaaa

SEQ ID NO: 70246 - DNA, 1023 bp, Homo Sapiens
cagtcgacggtaccggacatatgcccgggaattcggccattacggccggggtagcgggcatggaaggcagtgtacacctaatcactggagattcaagcataaattacaccgaaaaagaggggccacttctcagcgattcacatgtagctatatcaggctcaccatgccttctcctatgcctgagtacctgaatgtgcactacattggggagtctgcctccagactgctgtaacttatcaatgcactgggcactttcgattccttctttccaggcatctagggcaagacaaacagcatatcaactggtgaaagcttactggaatgaacttaattactctatggtcttgcccagatgctggcaagtgatgaatgtagacaactatattagcaacatatagtcaatagtcattcacaaatagtcttcaacgaagaaagaagaaaattgattgatggagcacatcttcaaactacaggagtaatagtaacaagcatggttaaagtctgcattggatggatacggaatatgcctaacctgaaaggcaagtagatactctgacagtccagaataatccaagactaaaaagagatggaaaacagataagagaaatttcaggaaaaggcgtaatgtggaattaccaagatgatataaacgagagaagtattcaagacgacaggctagaggggtaaatccaaggacatactagatcaggattagccagatttaaagaacttggatgtcaatggtacagcaataagatgaaagaaaacgtatgagatacaaaaggtactcagtaggggcacaaactacgcagatttgaaccagagtgtaatccacaacaatattaatggaaaaactgggcggagatggaggagtaactgaaagagtctgagaagtagaccaaggaaaaaaagacaatatgaaaaaactgatgacatagaagagagatgagaagaaaagacgatggaaacttagaccagaacaacacaaaacaacaacagtagaccatcacagatagggcagct

SEQ ID NO: 70247 - DNA, 880 bp, Homo Sapiens
  misc_feature (378)..(407): n is a, c, g, or t
  misc_feature (567)..(575): n is a, c, g, or t
gttaaaaaaatttacctgcccttcttttttcttaggaaggagtgataagaactttctaaaaactagagacaagcaaaccatccaaagtgtgaaatgttttaccattaaagttcaaagggcacgtaaaactgagaatgcaaaggcaagatggcagtgggaagaagaacgtgacttatgcgtcatttcctggtagctagcgtttagttaaccaaatggaaatacctcggctcagtgcagggttcagtagcagcagtttgtccatattcctgctccgatttgagctggaaattaaacaagcaccagttcatctcaaaagagccttatacaaacacacacgcacacatacccgcacccattcacatgtcatcaccacccccnnnnnnnnnnnnnnnnnnnnnnnnnnnnnnactaaaatacaaaaaagggagacaggtatatttacaaaaatccatggctggtacagtacataatttttaagacacactaaatgctacaatctttcaggtcctgagattattacaaacatcaactcaaagcttgtgttcaggtccagtttttaaaggaggnnnnnnnnntcccaaaatcttaagtcacacacttatgtgaaatacagtatatcccttcaagttagcaaaaacactacctccctataagcaaatgcaatacagtaattcttgtctttcacgtagaggaccatcaactctttaggctccatcagagattggttttgaaacatgttggcatatatgtcaagtgtggaggtggctaatgtatgaggaagatgtaactggagggaagttcctctgcagagtgaacattcactgtataaatacatcctgtttttccatgggataccaaaaaagcctacagccgcggccgc

SEQ ID NO: 70248 - DNA, 423 bp, Homo Sapiens
ggatttgattccagcctgtgaatttgggggaagcgggacaaacattcgttttgtagcaaaaggagtagagtaatatctgccaataactggaggaaagaattgttcttttaaaactattaaattgtttaatgggatttaaatgatttcaggaatgaaatggaaatcctggtaatgggtagaaacataggtaaattctccttttccacttaccaccacctgtgtgaacaacaatcatttctcattaatagtcaagaatttgaagagatcatgagtaaaaagtcttgatcagaaattgtgtatagctgtttccagcataaaaccttatataaaatgcatattcatagaagatgctcaagtatgtcatgaaaaatatgaagtttatttaaatatttatacaaattaaagatttactgtattctctaa

SEQ ID NO: 70249 - DNA, 617 bp, Homo Sapiens
  misc_feature (227)..(227): n is a, c, g, or t
gggtgggggtgaatagccagtcagccagccaccgatcccaaaggagcggatcaactctgaacctgccaaaaaagacagtccggtgcccgggaaatttacaaggtgaaaccgactagctcagcactcgtgggtggcgcggagaagtggggtggccggcgactctcagctcccgggcgcgggatcccgcagcggcagcaggtgggcttacccccgcccctgcggccccnccactccctggagtcgcagtgcctggtacctttctggcgccgcgctccgcgaactcgcgggcgagctgacgcccgatgcctctcccgccgccggtgatgaggacgttctcccgcgacaggtcccgcagcttggcgggcagcaccagtccgacggctgctttcaccaccagatagatcatctgtagagggaacatcaccagcgcgcccagccgtttccacaccatcctccgcgccgcggagccgggcagggggcgaaactccccgggccgagcaatacaggaattaaaaaacaccccgaacaataaatagtaaaccgaataaggaggagagaggcgtcccacctggccactcttgaaatcacctcttcccaaatgcaaagcaccgggtgag

SEQ ID NO: 70250 - DNA, 1208 bp, Homo Sapiens
  misc_feature (37)..(37): n is a, c, g, or t
  misc_feature (66)..(66): n is a, c, g, or t
  misc_feature (71)..(71): n is a, c, g, or t
  misc_feature (77)..(77): n is a, c, g, or t
  misc_feature (115)..(115): n is a, c, g, or t
  misc_feature (117)..(117): n is a, c, g, or t
  misc_feature (141)..(141): n is a, c, g, or t
  misc_feature (154)..(154): n is a, c, g, or t
  misc_feature (156)..(156): n is a, c, g, or t
  misc_feature (171)..(566): n is a, c, g, or t
  misc_feature (622)..(763): n is a, c, g, or t
  misc_feature (930)..(938): n is a, c, g, or t
tttccgtagcgcagtcggacagaggccacgagagctncagggaacgctggttcttatagtctgtcnggtcnccactntgactgagctcgatttgtgatctcgtcaggggcgagcntntgaaaacgccagcaacgcgccttntacgttcctgccntntgctgccatttgctnnnnnnnnnnnnnnnnnnnnnnnnnnnnnnnnnnnnnnnnnnnnnnnnnnnnnnnnnnnnnnnnnnnnnnnnnnnnnnnnnnnnnnnnnnnnnnnnnnnnnnnnnnnnnnnnnnnnnnnnnnnnnnnnnnnnnnnnnnnnnnnnnnnnnnnnnnnnnnnnnnnnnnnnnnnnnnnnnnnnnnnnnnnnnnnnnnnnnnnnnnnnnnnnnnnnnnnnnnnnnnnnnnnnnnnnnnnnnnnnnnnnnnnnnnnnnnnnnnnnnnnnnnnnnnnnnnnnnnnnnnnnnnnnnnnnnnnnnnnnnnnnnnnnnnnnnnnnnnnnnnnnnnnnnnnnnnnnnnnnnnnnnnnnnnnnnnnnnnnnnnnnnnnnnnnnnnnnnnnnnnnnnnnnnnnnnnnnaagaattcggcacgagggttaccattctgatgttggagcggccgcggctgtaggcnnnnnnnnnnnnnnnnnnnnnnnnnnnnnnnnnnnnnnnnnnnnnnnnnnnnnnnnnnnnnnnnnnnnnnnnnnnnnnnnnnnnnnnnnnnnnnnnnnnnnnnnnnnnnnnnnnnnnnnnnnnnnnnnnnnnnnnnnnnnnntgcccttgtattttcttatctgtacccagtgtaactacacgtttactggaactgtgtttttaagactgacagttgtttataatggattagtcgtaagtgccaaaaagtctcagttgatattatctttacaaatgacttgaccttaatgttataaaagtagttactgnnnnnnnnnaattggaggcagacttgatatttcagagttgcatagtaaaagcaatttgttaatttttgtgtactttcagataaactattacaataaagaaaggagcagaatgtagtatttggaagatgatttaaattcagcaacgcctaaaaatgtcttcctaagtatttttctcagccatgtcattctttaaattatgagatggttcttagaagagaaaatggtgtaattgtattaaacagacaattataactcaagataatataactttgaaccttc

SEQ ID NO: 70251 - DNA, 1195 bp, Homo Sapiens
  misc_feature (82)..(116): n is a, c, g, or t
aaagactgatagacatataggcgctagctcgtcaaagccgaacgaccgagcgcagcgaagtagtgagcgaggaagcggccgnnnnnnnnnnnnnnnnnnnnnnnnnnnnnnnnnnncagtcgacggtaccggacatatgcccgggaattcggccattacggccgggggtggaacaaacatttatcagatgcctattatgggcatatgtctctgctaagcaccatagttgtcaatgtgctgtgcaaatgctaagttccttttagcaattgttcagttggaagacgtattaatatttggggaaggaaaagaaagtagttgttttacaagggaggaaaaaagtgaatctggttacacatatggaagtaagcaaaatgaaaagcacttattgctttctgacagaattatagatgtaattttaagagttgctcctagcaagttaaaagtgcatataaaatatgcaactcttagttaaaggccttattatcagtcttacctatacaagtagtaaattttgtcattgctttagttacaaccatctgtaaataacttaaaagacttattatgtggggttcaaattgagtggaataaagtatagattaaaagtatacaatccttagcacgttatctcagggcttatgaaatgtaattaaatttattaagaaaatagatgaaaaattagggtacacagctggccaccaaatgcgaagtcaatctgctacttaaccctgaaaacaaaatcagttttgcatattaccactaacactaatacatatagagagcggaaccataactcattgaattttggagaggaataagcttagcgttaatattgacaatattaaggcaatattcttgtaggaatactatgtgcatgtttgatattttgccaaataacaataattaataattgttcaatgtttaagaataatattaacaaaataaaggagtttaatgcagtgatctttgtttttggcacatcaaaaattctcagtcattattcatgtttctttatgctgctggcttttgtgccctggaagatcataatagtgaccaaaatatacatgcagacttgttttttattattgttgtttaagcataatttaagaaaaaaaatttttacctggtgaacttgctatctgctctgtttctagttaaaatataataaatattatcttcctcgtgctgtaacaaacac

SEQ ID NO: 70252 - DNA, 1245 bp, Homo Sapiens
  misc_feature (143)..(155): n is a, c, g, or t
  misc_feature (1188)..(1189): n is a, c, g, or t
ctttgtctggagattaattttggaatgaaagtttttctctctatgccattcctggttcttttccaaagcctcatacaagaggattaggtcacaatgcatgcattaccttttaaaagaatgcgatattgataccgatgcttacnnnnnnnnnnnnnactacttgttttattcctt[453 bp omitted]cttccttggtatagtggaggatctgaggattggaatatagagtagagtgcttgcttaagcctgggagcccatctttatagctatttgatgtaagaaaagagacatggccatttctaaactatataaggtgagtgtgtctattcccagcagatataaaggaaaaaggaaacttttttgattcccaccttcccagcctcacctagccatcttccagcctcaaatatagagatgttagtgcaaggtcctgggctctaggtgatcatttcataagtcctttacagataaagaaaaagtagtgtttgtatgtttgtttttaagtaaccccaaaacaaatttatattgtattcagcaaaattggaattcaggtgtttaattttagaacatgaagtgcctgctgttttaagcattgacttgtataaaaagaattgcatgtctccagtaagcttatgggttttctcatttttaggtatatggcttttaatcatgtaaagtgaaacattagttttcttgcattttattacaggttctttgttgcaataaagatgctgctgaaattaaaannaaactgcccgccaatacttgcgcaaagatcgacgatgtcacgcacaggtgtggacc

SEQ ID NO: 70253 - DNA, 660 bp, Homo Sapiens
ttagcatttatcaacctgtatttgaagtcacggtctgacgcaagtttcctgggatttgctcaggaaaagtatatccagttagtgaggcagagggccctggagggagccctaggaaacaccattatctacaagtcccagacagcaaaaggtactccacaagaaacagaaggaacttccagtggtagcaaaagcaatgtgaggagtgggaagagagttccaagtggcaggatggtcaacattcgcattttccagcagaagtcacgtaagaatagacaagagtccattggatttggcaatcctgatgtcagggtaaagctaatgggtggagattaattcccattaagttctttcttgaccttagtatgtggggttgcaatttaaagattctgcattcaaagttcagatgagtagagtatgtggaaggagcttggtatggagccaacttgcaaatgttctcttccattagatggtaaattctttgaagcataaggaaggcacataaagatgagtaagacccagtcctaaccctcaaagtttataaacaatacgaataagacagctgttgtacaagatgggggcatacaatttataaaatattatgggggactcacaagaggaatacaccatatgcagtcagaaaagggtgcttacttctcagct

SEQ ID NO: 70254 - DNA, 1096 bp, Homo Sapiens
cagtcgacggtaccggacatatgcccgggaattcggccattacggccggggggggccgggcaatgtttgttccccgagttcggagcctaggagccccccgcggctgcggcgcaggtgccctcggcctgagtcgggatggagctgcctgctgtgaacctgaaggtgattctcctaggtcactggctgctgacaacctggggctgcattgtattctcaggctcctatgcctgggccaacttcaccatcctggccttgggcgtgtgggctgtggctcagcgggactccatcgacgccataagcatgtttctgggtggcttgctggccaccatcttcctggacatcgtgcacatcagcatcttctacccgcgggtcagcctcacggacacgggccgctttggcgtgggcatggccatcctcagcttgctgctcaagccgctctcctgctgcttcgtctaccacatgtaccgggagcgcgggggtgagctcctggtccacactggtttccttgggtcttctcaggaccgtagtgcctaccagacgattgactcagcagaggcgcccgcagatccctttgcagtcccagagggcaggagtcaagatgcccgagggtactgaagccagccacgctgcgcccggccctgccccgggccttcctcgtgcctgggaggtcgttctagggatgctcctgacctccgtctcttggacctaagatggaatgtgtccccagctcagggattgcctgaaccaagaggccaggagcccccatgggccgcccagtaccatgcacactcctgtcccgaactccctgaggcctcccctcccttcagggcacccactggttcccaggctggaaacagggtctctctttacttcctaccccatggtggcaccacagaggccctcagccgagtccctggcctgagtgttgcaagctcaagccctttaaggactgctgaatgccccctcaggcctccccccaagtttgcttgggcttttggtgggaagccctgaagagcttcaggtcctgctcagcccgaggagcagtctggcatgggagtgaggcccgtccttctcactgcctggtcacatggtgcct

SEQ ID NO: 70255 - DNA, 920 bp, Homo Sapiens
  misc_feature (712)..(712): n is a, c, g, or t
  misc_feature (718)..(718): n is a, c, g, or t
cagtcgacggtaccggacatatgcccgggaattcggccattacggccgggggttccccgagttcggagcctaggagccccccgcggctgcggcgcaggtgccctcggcctgagtcgggatggagctgcctgctgtgaacctgaaggtgattctcctaggtcactggctgctgacaacctggggctgcattgtattctcaggctcctatgcctgggccaacttcaccatcctggccttgggcgtgtgggctgtggctcagcgggactccatcgacgccataagcatgtttctgggtggcttgctggccaccatcttcctggacatcgtgcacatcagcatcttctacccgcgggtcagcctcacggacacgggccgctttggcgtgggcatggccatcctcagcttgctgctcaagccgctctcctgctgcttcgtctaccacatgtaccgggagcgcgggggtgagctcctggtccacactggtttccttgggtcttctcaggaccgtagtgcctaccagacgattgactcagcagaggcgcccgcagatcccctttgcagtcccagagggcaggagtcaagatgcccgagggtactgaagccagccacgctgcgcccggccctgccccgggccttcctcgttgcctgggaggtcgttctagggatgctcctgacctccgtctcttggacctaagatggaatgtgtccccangctcanggattgcctgaaccaagaggccaggagcccccatgggccgcccagtaccatgcacactcctgtcccgaactccctgaggcctccccctcccttcagggcacccactgggttcccaggcctggaacccagggtctcctctttaactttcctacccccatgggtgggcacccacagagggcccctcaacccgagttcctggccc

SEQ ID NO: 70256 - DNA, 1708 bp, Homo Sapiens
  misc_feature (74)..(108): n is a, c, g, or t
  misc_feature (1270)..(1503): n is a, c, g, or t
  misc_feature (1519)..(1527): n is a, c, g, or t
  misc_feature (1563)..(1575): n is a, c, g, or t
aacttgaataactataggcgtagctcgctgcagcgaacgacgagcgcagcgagtagtgagcgaggaagcggcgnnnnnnnnnnnnnnnnnnnnnnnnnnnnnnnnnnncaagtcgacggtaccggacatatgcccgggaattcggccattacggccgggggaagttgttccccgagttcggagcctaggagccccccgcggctgcggcgcaggtgccctcggcctgagtcgggatggagctgcctgctgtgaacctgaaggtgattctcctaggtcactggctgctgacaacctggggctgcattgtattctcaggctcctatgcctgggccaacttcaccatcctggccttgggcgtgtgggctgtggctcagcgggactccatcgacgccataagcatgtttctgggtggcttgctggccaccatcttcctggacatcgtgcacatcagcatcttctacccgcgggtcagcctcacggacacgggccgctttggcgtgggcatggccatcctcagcttgctgctcaagccgctctcctgctgcttcgtctaccacatgtaccgggagcgcgggggtttccttgggtcttctcaggaccgtagtgcctaccagacgattgactcagcagaggcgcccgcagatccctttgcagtcccagagggcaggagtcaagatgcccgagggtactgaagccagccacgctgcgcccggccctgccccgggccttcctcgtgcctgggaggtcgttctagggatgctcctgacctccgtctcttggacctaagatggaatgtgtccccagctcagggattgcctgaaccaagaggccaggagcccccatgggccgcccagtaccatgcacactcctgtcccgaactccctgaggcctcccctcccttcagggcacccactggttcccaggctggaaccagggtctctctttacctcctaccccatggtggcaccacagaggccctcagccgagtcctgcctgagtgttgcaagctcaggcctttaaggactgctgatgccccctcaggcctcccccaagtttgctgggctttggtggaagccctgagagcttcaggtcctgctcagcccgaggagcagtctggcatgggagtgaggccccgtccttctcactgcctggtcacatggtgcctagggatgcagggctggaggccagaggtgtcagcaacactgtgacccaccacaacctccagcctcccttttcagagcacagcattaaagtttggggaattctgtannnnnnnnnnnnnnnnnnnnnnnnnnnnnnnnnnnnnnnnnnnnnnnnnnnnnnnnnnnnnnnnnnnnnnnnnnnnnnnnnnnnnnnnnnnnnnnnnnnnnnnnnnnnnnnnnnnnnnnnnnnnnnnnnnnnnnnnnnnnnnnnnnnnnnnnnnnnnnnnnnnnnnnnnnnnnnnnnnnnnnnnnnnnnnnnnnnnnnnnnnnnnnnnnnnnnnnnnnnnnnnnnnnnnnnnnnggaccgggggtaaccnnnnnnnnnaaaaaaacccggcggggaatctggggtggttccccnnnnnnnnnnnnnccccgggggcaccccatttttttaaaaaacccccaaagggcgtttgagggttttattgtgttattccataaagggtccggccaccttgaaataaatttaaccccccccgcggacccctaaaagggaagggggg

SEQ ID NO: 70257 - DNA, 959 bp, Homo Sapiens
  misc_feature (687)..(687): n is a, c, g, or t
  misc_feature (747)..(765): n is a, c, g, or t
tttaactttaatcaccagcggctggtcaactgaaatggacataagaactatataaatgtcagagaaatatgtaaacctcattaatgtttccaaaaattcatttagagatagaaacaggtccaaatagatgcctgtctaaatgcactgcaattacgttacaattatttttccaaatacacagatatgctctgtcttttctcagctcattactgactcaaacaatttgcccttctgggatcaattgtttgctaataaataattgtttacagtcacaaaatgatattaggaggttttcttattagttttccttctgcaccctaataagattgaaaactagctgattcccaagagtctaaccttaacctcgctttgtttaacagcccaggaaatgatgaaccatctgcttcagaaaataatggacggccaagaggaaatattgtttaattgtagattaacctcctcatgaagcagtctgaagcagctttagaattagcaactataaccagcaaaagaaacaaatggctcacgagccttttcctctaccatttaaggtccagaaagaatgcaaagggatttttattacacttatttacaaacatttatttccacagtggaaacaaaaaatcatcaaggtcaaaactgattctcaaaactgcagtcacttgccctccaattttgtttgcccanaatacctttaatgcagcaaaccatcaaaccatctcatgcacttaagaaggtgtttatttnnnnnnnnnnnnnnnnnnncctcttttccattattttcaggttgttataatattaaaattaatattttccctggtttctttaatagtaataaatccaccattggggagtacgaattgttttattatcatcaacatggcacttaagtaaatgaaatcttgtcaagtacatggtgacctacaagttcaaaagaaaaaaagcctacagccgcggcc

SEQ ID NO: 70258 - DNA, 1332 bp, Homo Sapiens
  misc_feature (48)..(82): n is a, c, g, or t
taataaccggacgagcgcagcgaagtccagtgagcgaggaagcggcgnnnnnnnnnnnnnnnnnnnnnnnnnnnnnnnnnnncagtcgacggtaccggacatatgcccgggaattcggccattacggccgggatagatgaaaaatgtgtttactgctttcagtcgacctgataaaaagcaacgtatggtaaatattgaaaactccaggcatcgaaaacaagagcagaagcaccttcagccacagccttataaaagggaaggtaaatggcataaatatggtcgcactaatggaagacaaatggcaaatcttgaaatagaattggggcaattaccttttgatcctcaatactgattcacaattgagttaaattagacaactgtaagagaaaaatttatgctttgtataatgtttggtattgaaactaatgaaattaccaagatgacaatgtcttttcttttgtttctaagtatcagtttgataactttatattattcctcagaagcattagttaaaagtctactaacctgcattttcctgtagtttagcttcgttgaattttttttgacactggaaatgttcaactgtagttttattaaggaagccaggcatgcaacagattttgtgcatgaaatgagacttcctttcagtgtaagagcttaaagcaagctcagtcatacatgacaaagtgtaattaacactgatgtttgtgttaaatttgcagcagagcttgagaaaagtacattgttctggaatttcatcattaacattttataatcttacactcacttcttgtctttttgtgggttcaagagccctctgacttgtgaagaatttgctgccctcttaagagcttgctgacttgttttcttgtgaaattttttgcacatctgaatatcgtggaagaaacaataaaactacaccatgaggaaaactaaaggtctttatttaaaatctggcattgtattaacatgtaattttatactatgtggtattttatacatttcctcagtagtgatatttggtaaagcagttcatacagcttttttctaagttccatgaatcttacccagtgtttaccgaagtatttaagcagcatctgaatatttccacccagcaatgttaatttatctaggaaagttcagaatttcatcttcatgttgaatttcccttttaacttccgttcatagacatatatgtgacttccaattcgaccctctggcaagtgagtgtggaagaaaacagcagttcttttataattgcttgaaattaggaaagcgcttatttcctagaagcaaataaatgtttaagtaaataaaggctacattttgctg

SEQ ID NO: 70259 - DNA, 735 bp, Homo Sapiens
  misc_feature (109)..(109): n is a, c, g, or t
acaagaagtgagtgtaagattataaaatgttaatgatgaaattccagaacaatgtacttttctcaagctctgctgcaaattaacacaaacatcagtgttaataccactntgtcatgtatgactgagcttgctttaagctcttacactgaaaggaagtctcatttcatgcacaaaatctgttgcatgcctggcttccttaataaaactacagttgaacatttccagtgtcaaaaaaaattcaacgaagctaaactacaggaaaatgcaggttagtagacttttaactaatgcttctgaggaataatataaagttatcaaactgatacttagaaacaaaagaaaagacattgtcatcttggtaatttcattagtttcaataccaaacattatacaaagcataaatttttctcttacagttgtctaatttaactcaattgtgaatcagtattgaggatcaaaaggtaattgccccaattctatttcaagatttgccatttgtcttccattagtgcgaccatatttatgccatttaccttcccttttataaggctgtggctgaaggtgcttctgctcttgttttcgatgcctggagttttcaatatttaccatacgttgctttttatcacatcgacttataatctataaaagattcttgttcctgttgacactgggaaagataatccttcatatcattcaattcatcttcatgtatctttctgatgttggagcggccgc

SEQ ID NO: 70260 - DNA, 683 bp, Homo Sapiens
ctcgccctttaaactggtttagttcatcaacgaggtactcttgatgtcatgagtcatattcaaaaagttttgttacaacaatcgcaataaatcttcagcttcaatatttataatgatgccgtgccactctactccttataacagccatgttcactgcccacttcccatgagatttctccagtgcccgccagacctgactggaaaaagtcattatcttgatgaagcagatgtattttacctaaatcccttaaactggttacatagagagtttcatgatgatgcatcattgcctactcacttgatcaccttcagcattttggaagaggaaataagcgctttcctaatttcaagcaattataaaagaactgctgttttcttcaacactcacttgccagagggtcgaattggaagtcacatatatgtctatgaacggaagttaaaagggaaattcaacatgaagatgaaattctgaactttcctagataaattaacattgctgggtggaaatattcagatgctgcttaaatacttcggtaaacactgggtaagattcatggaacttagaaaaaagctgtatgaactgctttaccaaatatcactactgaggaaatgtataaaataccacatagtataaaattacatgttaatacaatgccagattttaaataaagacctttagtttt

SEQ ID NO: 70261 - DNA, 505 bp, Homo Sapiens
  misc_feature (72)..(93): n is a, c, g, or t
gctcaagccatcctcccgcctcaacctctagagtagctggaactacaggcctgcaccaccaggcccagctannnnnnnnnnnnnnnnnnnnnngtagagacagggtctcgctatgttaaccaggtttgtctcaaactcctgggctcaagtcatcctccagtctcagcctctcaaagtgctgagatgacaggtatgagaattttttgagaggaagtggcctttatttttttaaagaagactcataaggatttttgacaatcactgatttattgggtcactagtctgtgctaagtactctgccaggcatttaacatacattatttcacttgttttcatgattaaattcaggcaggttcaatcacagaaaccatgcagtggacaaaagagagaaaaagttcaccatgaggagattctaaaaacctgccttttgacttgtctatttttatctcttatttctcactttgcttctcctcccgcttggacccttttatactaataatcttat

SEQ ID NO: 70262 - DNA, 699 bp, Homo Sapiens
  misc_feature (262)..(341): n is a, c, g, or t
  misc_feature (504)..(516): n is a, c, g, or t
  misc_feature (544)..(552): n is a, c, g, or t
ctaacattcctttccatcattcttttaaatgacataaaataagtgtgcaatgttcctgatgatgtaccccacaagctgcattcaaactcaaatctgtgggaatgagtgactcgacaaaatgtaattcggatcagatcctcatcccctgactgtgtgaaaaaagtactctccttctagtgaaggattgtcacagagtttcactggatgaaactatgacccagtattcttactgtattttacatatgcctgtaaattatttgcnnnnnnnnnnnnnnnnnnnnnnnnnnnnnnnnnnnnnnnnnnnnnnnnnnnnnnnnnnnnnnnnnnnnnnnnnnnnnnnntgataacatggcaaccaccaaactcccttaaaaacaaacattggtgacatggccaattaagtatcagtgagcctcctatctgggacttatctgttcctattgtttcaaaaccatttcatgtacactactgaggtaagtaagtttataacttgaaatgtgaacnnnnnnnnnnnnnagtgttaagaacaaactatataaatgtnnnnnnnnngttttagagttctgttttcaaacattgctagtggtttagttaactttagctgctttatatttgaaaagcttttatttagatcttgctccatttacagtacattcttaggatgtatgtagtaaataaagctttctttaaagcaatcgc

SEQ ID NO: 70263 - DNA, 657 bp, Homo Sapiens
  misc_feature (202)..(302): n is a, c, g, or t
  misc_feature (461)..(473): n is a, c, g, or t
  misc_feature (501)..(510): n is a, c, g, or t
gatgtaccccacaagctgcattcaaactcaaatctgtgggaatgagtgactcgacaaaatgtaattcggatcagatcctcatcccctgactgtgtgaaaaaagtactctccttctagtgaaggattgtcacagagtttcactggatgaaactatgtcccagtattcttactgtattttacatatgcctgtaaattatttgcnnnnnnnnnnnnnnnnnnnnnnnnnnnnnnnnnnnnnnnnnnnnnnnnnnnnnnnnnnnnnnnnnnnnnnnnnnnnnnnnnnnnnnnnnnnnnnnnnnnnntgataacatggcaaccaccaaactcccttaaaaacaaacattggtgacatggccaattaagtatcagtgagcctcctatctgggacttatctgttcctattgtttcaaaaccatttcatgtacactactgaggtaagtttataacttgaaatgtgaacnnnnnnnnnnnnnagtgttaagaacaaactatataaatgtnnnnnnnnnngttttagagttctgttttcaaacattgctagtggtttagttaactttagctgctttatatttgaaaagcttttatttagatcttgctccatttacagtacattcttaggatgtatgtagtaaataaagctttctttaaagcaatcgc

SEQ ID NO: 70264 - DNA, 1456 bp, Homo Sapiens
  misc_feature (165)..(284): n is a, c, g, or t
gtcacatttcaagttataacttacctcagtaggtgtacatgaaatggttttgaaacaataggaacagataagtcccagataggaggctcactgatacttaattggccatgtcaccaatgtttgtttttaagggagtttggtggttgccaatgttattcatttttnnnnnnnnnnnnnnnnnnnnnnnnnnnnnnnnnnnnnnnnnnnnnnnnnnnnnnnnnnnnnnnnnnnnnnnnnnnnnnnnnnnnnnnnnnnnnnnnnnnnnnnnnnnnnnnnnnnnnnnngcaaataatttacaggcatatgtaaaatacagtaagaatactgggtcatagtttcatccagtgaaactctgtgacaatccttcactagaaggagagtacttttttcacacagtcaggggatgaggatctgatccgaattacattttgtcgagtcactcattcccacagatttgagtttgaatgcagcttgtggggtacatcatcaggaacattgcacaattattttatgtcatttaaaagaatgatggaaaggaatgttagcggtgcttaaaggcctcagtaggcactcaataattttatagaatagttaaataaatattgcttacacataaaaactcatctcatttcaagatgagggggaaaaaggcatttgggaatctcttaatttaaaacaaaacaaaagtacttgctaagggcatgatcctcttatgaatccacaagaattcagccatcaacaaaaatcccgtgagtggaaaattgtatggatctctaacatgacataaaaacgcaactgcgttttacttgctaccttattgcacacctcacttccttgattgagcctttaaaaaacaattccaagttgatattttttcttaaaaagtagatgacaatcttaacattttactgtattttacattcactctgctaaacaaaagcctttaaacaggcacataacactgcaacaatacattaacttcctaataaaacaaacctttttaataacattgaaataaaatggtttcattttgcattaaactacataccatgaacttctccaacataaaaggactaaaaacaagcattagaagatatttacaaactatctttaaacttctacaggtctctcctcctcctcctggatgtgcacaccccaatccagttcacccatcaagtgcacagcaaaggaagagaggcccatttaataaacataatgtttccaacacccttgaggaccatggacagttttgcaagaaacatggtaaggcaactagaagcataactttctgctgaaaagagtctctgggggtcttgtctacgataacatacattctttgtccctacaaactcatacttcaaaaatgaataaaagccttagaaatggccttaaaatgtttacttggggcaattaaatagctatgcaaaggtgtcttatgcaactcgattaaaacctt

SEQ ID NO: 70265 - DNA, 956 bp, Homo Sapiens
  misc_feature (122)..(150): n is a, c, g, or t
  misc_feature (687)..(718): n is a, c, g, or t
  misc_feature (823)..(823): n is a, c, g, or t
  misc_feature (854)..(854): n is a, c, g, or t
  misc_feature (868)..(868): n is a, c, g, or t
  misc_feature (919)..(919): n is a, c, g, or t
gcagcggccgcggggcgccgagggcagctgcggcggcgcggacgagccgggacggcggcgaccggagcctgagaggcgggccgcagcgggaagcagcgggcccgaggccgcgtccatgggcnnnnnnnnnnnnnnnnnnnnnnnnnnnnnaccatgtcggcagccaaggagaacccgtgcaggaaattccaggccaacatcttcaacaagagcaagtgtcagaactgcttcaagccccgcgagtcgcatctgctcaacgacgaggacctgacgcaggcaaaacccatttatggcggttggctgctcctggctccagatgggaccgactttgacaacccagtgcaccggtctcggaaatggcagcgacggttcttcatcctttacgagcacggcctcttgcgctacgccctggatgagatgcccacgacccttcctcagggcaccatcaacatgaaccagtgcacagatgtggtggatggggagggccgcacgggccagaagttctccctgtgtattctgacgcctgagaaggagcatttcatccgggcggagaccaaggagatcgtcagtgggtggctggagatgctcatggtctatccccggaccaacaagcagaatcagaagaagaaacggaaagtggagccccccacaccacaggagcctgggcctgccaaggtggctgttacnnnnnnnnnnnnnnnnnnnnnnnnnnnnnnnntccccagtgctgagaaagtcccaccaccaagtccacactctggcaggaagaaatgaggaccaaggaccagccagatggcagcagcctgagtccagctcagagtcncagccagagccagcctcctgctgccagctcnctgcgggaacctgngctagagagcaaagaagaggagagcgcatgagtagcgacgcatggactgtnggcgcaagtccgggtggagagcggtactctctctgga

SEQ ID NO: 70266 - DNA, 501 bp, Homo Sapiens
  misc_feature (53)..(86): n is a, c, g, or t
gcggccgcgctgagcccctagcccgccgggagcgccaggcctttcaggcctgnnnnnnnnnnnnnnnnnnnnnnnnnnnnnnnnnnaccatgtcggcagccaaggagaacccgtgcaggaaattccaggccaacatcttcaacaagagcaagtgtcagaactgcttcaagccccgcgagtcgcatctgctcaacgacgaggacctgacgcaggcaaaacccatttatggcggttggctgctcctggctccagatgggaccgactttgacaacccagtgcaccggtctcggaaatggcagcgacggttcttcatcctttacgagcacggcctcttgcgctacgccctggatgagatgatgtcttcccagtgactctccttggggcctggggaaaccacaagggagcttggattcattcacccattgctgccttgctgtgtgcctcagaggggctcagaggtggaaaataaatatgaaaaagcatccttgtcttctagaatct

SEQ ID NO: 70267 - DNA, 959 bp, Homo Sapiens
  misc_feature (77)..(111): n is a, c, g, or t
tgtaatagactcactatagggctcactctccgcagcgaacgaccgagcgcagcgagtcaggagcgaggaagcggcgnnnnnnnnnnnnnnnnnnnnnnnnnnnnnnnnnnncagtcgacggtaccggacatatgcccgggaattcggccattacggccgggggatgcttggcaagatggcggggagcggcgtccgccaagctacttctaccgccagcaccttcgtgaagcccattttcagtcgggacatgaacgaggccaagcggagggtgcgcgagctctaccgcgcctggtatcgggaggtgccgaacactgtgcaccaattccagctggacatcactgtgaaaatgggacgggataaagtccgagaaatgtttatgaagaatgcccatgtcacagaccccagggtggttgatcttctggtcattaagggaaagatcgaactggaagaaacaattaaagtatggaaacaccggacacatgttatgcggttcttccatgaaacagaagcgccaaggccaaaggattttcctatccaagttctatgttggccacgatccatgaagtcattcagtggaaaagattgcaccgttgatactattttagagcacaaataaactcactatacaatgggcacaaaaaagtcaacacagcacgcaaaacaaacattgtgtggggccgcgctgtggggccctggaaaaaagttcttgaaagcccatttcgttggggggcgcgcggggccccagaatagtggttctgtccaacgctggggccaacagacgcgggtccccgagggaaacgcggcggcgcaggaaacaaggcgggcggggtgatcccaccgaattaaaaaaagccgcggggggaacacacgcagcggttgtctgaaacactccacgaggggacgtcccgagggcacacacaggggttcttcacaagagggtgctccaagaaagcataata

SEQ ID NO: 70268 - DNA, 788 bp, Homo Sapiens
cagtcgacggtaccggacatatgcccgggaattcggccattacggccgggggtggagtggatgctttggcaagatggcggggagcggcgtccgccaagttacttctaccgccagcaccttcgtgaagcccattttcagtcgggacatgaacgaggccaagcggagggtgcgcgagctctaccgcgcctggtatcgggaggtgccgaacactgtgcaccaattccagctggacatcactgtgaaaatgggacgggataaagtccgagaaatgtttatgaagaatgcccatgtcacagaccccagggtggttgatcttctggtcattaagggaaagatcgaactggaagaaacaattaaagtatggaagcagcggacacatgttatgcggttcttccatgaaacagaagcgccaaggccaaaggatttcctatccaagttctatgttggccacgatccatgaagtcattcagtggaaagatgcacggttgatactatgtttagagcacaaaataaacctcacctataccaatgggcaaacaaaccaaaacacaccagccagaacaaccccacctggtcgggcgcccgcccggcgccccagaaaaagggttcgagaccactgttggggccgcgggcccacaagagtatagggaccacggggcccacgcggcccagggaacccgggccaggcaaacgggcggggttccccacccaataaaacggcccgggcacccacgtcgtgaaacctccaaggggtccgggccacggctcacagagtcagaacggattgg

SEQ ID NO: 70269 - DNA, 1306 bp, Homo Sapiens
ggggggaaaagacattcgcccgcggtccgcacgcgctgcttgcaaaggggtggggttgtggagtggatgctttggcaagatggcggggagcggcgtccgccaagctacttctaccgccagcaccttcgtgaagcccattttcagtcgggacatgaacgaggccaagcggagggtgcgcgagctctaccgcgcctggtatcgggaggtgccgaacactgtgcaccaattccagctggacatcactgtgaaaatgggacgggataaagtccgagaaatgtttatgaagaatgcccatgtcacagaccccagggtggttgatcttctggtcattaagggaaagatcgaactggaagaaacaattaaagtatggaagcagcggacacatgttatgcggttcttccatgaaacagaagcgccaaggccaaaggatttcctatccaagttctatgttggccacgatccatgaagtcattcagtggaaagatgcacgttgatactattttagagcacaaataaactcactatacaatggtcactttgtgatagaattccattgatgaaccaattttctgcagcctctttttgcctgagcaagtgggaccttggtatacacatcacctgttctttcccttttcttgaaatgtggtgtttgctgtaaattggattgaattatttttctcagagccttgcatgtcagtaaacaggaaggaaggaggccatctgttcaaaaattgtgacattgggcatgaggctggacgacttgttaatgtagttgtttctatagcccctatgattagacactttagtgtcagggcacagattatctaaaattagccagctcttcctgtcagggatcagggcagcactaacaggcgcaaaagtagagctgtcaagatgggctagttttccttgggttctgaagaaaatggatgtgcaaaggcttggctccgctacttgtaacaagctccagcccttaaaatgaaattaacttcctactcaggcaccctgcttaggtgcacagctgttcaatatacacagagaacagaaatattcctactgtctttggaaaccctggtgtacctctcagtggcagaataaacatcaacacaggttcaagaactgcacactcatcctaccaacgacacccgggcccctgtcggccggcccggccctccgaaaaacttttctagcacctttcggtttggccggccgggcccccataaggcaaagtgaaccatgggacctacctggtttccctaaggagaacccgggcccaatgacaaaagggccttggaattcccccccc

SEQ ID NO: 70270 - DNA, 1136 bp, Homo Sapiens
  misc_feature (415)..(467): n is a, c, g, or t
atggtggccagagtgtcttgctgtactaaggtctgaataatatccattataggaccatgatctgagattgggtcttttacttaactctgtcacatagcagactgtcgtggagaggcattttttaaaatactattgtttttgtttttaaagcgctatcacacacctccaagatcaagatcctgttctgagtcagatgatgatgacagcagtgaaactcctcctcactggaaagaggaaatgcagagattaagagcatatagaccacctagtggagaaaaatggagtaaaggagataagttaagtgacccctgttcaagccgatgggatgaaagaagcttgtctcagagatccagatcatggtcctataatggatattattcagaccttagtacagcaagacactctggccacattnnnnnnnnnnnnnnnnnnnnnnnnnnnnnnnnnnnnnnnnnnnnnnnnnnnnnagaacacttgcagaggacacaaacaaacaaagaggagagggattcttataccgtctgacatagaatcctcaaaatcttccactcgaagaatgaaatcctcttgtgatagagaaaggagttctcgttcttcctcattgtcatctcatcactcatcaaagagagactggtctaaatctgataaggatgtccagagctctttaacccattccagcagagactcatacagatcaaaatctcactcacagtcttattctagaggaagctcaagatcaaggactgcgtcaaagtcctcatcacattctcgaagtagatcaaagtccagatctagttccaagtctgggcaccgaaagagagcatcaaaatcaccaagaaaaacagcttctcagttaagtgaaaataaaccagttaaaacagaacctttaagagcaaccatggcacaaaatgaaaatgtagtagtacaaccagttgtagcagaaaatattcctgtaataccactgagtgacagtccccccccttcaagatggaagcctggacagaaaccttggaagccctcttatgagcgaattcaggaaatgaaagctaaaacaacccatttgctacccatccaaagcacttacagtttagcaaatattaaagagactggtagctcatcatcctaccataaaagag

SEQ ID NO: 70271 - DNA, 1179 bp, Homo Sapiens
  misc_feature (401)..(421): n is a, c, g, or t
atggtttgattatcatgaatgagtttattgtcccatttttgccattattactggtggatgaaatggaagaaaaggatatactagctgtagaagatgagaaatcgatggtgttcctaccttggtcaagaaatggaaccacacctccaagaaaagctgacagattttttgccaaaactgcttgattgttctatggagattaaaagtttccatgagccaccgaagttaccttcatattccacgcatgaactctgtgagcgatttgcccgaatcatgttgtccctcagtcgaactcctgctgatggaagataaactgcacactttccctgaacacactgtataaactctttttagttcttaacccttgccttcctgtcacagggtttgcttgctgctgctatagnnnnnnnnnnnnnnnnnnnnnaataactgcaaaagacaaaatgactatacagactttagtcagactgcagacaataaagctgaaaatcgcatggcgctcagacattttaaccggaactgatgtataatcacaaatctaattgattttattatggcaaaactatgcttttgccaccttcctgttgcagtattactttgcttttatcttttctttctcaacagctttccattcagtctggatccttccatgactacagccatttaagtgttcagcactgtgtacgatacataatatttggtagcttgtaaatgaaataaagaataaagttttatttatggctacctatgtgtttgtaagcaggtatattgtatattagtgtattagtaatactagataaatgaatttgtactggggattaagattggatagttaatagattactaaaaatctttaatttctgcctcatcaaattgttagcccacattgggacaacatgtttacgttcctttgaccactttcaaatttgtcctcactattttaaccaaagtctcctggacactctagtaatgggaccagggacagcctagttgtggattcagaccacgggttatcacactccagtaagatggaagaattctaacacgagtcaaatcacaacggaactgtatccttaagtaagattaaactacgctcaatgtctctcacacaataccagacggcattataacagaacacccaagtcttgcaacgggccatgcacataacccaattaattacca

SEQ ID NO: 70272 - DNA, 642 bp, Homo Sapiens
  misc_feature (24)..(24): n is a, c, g, or t
  misc_feature (60)..(60): n is a, c, g, or t
atgagagcaaaatgttaggtcctntgacaagcattttcctcctgttttaaaaaagggctntaagttgtttcctatgtaaggtaatctttcttttttagtattatctaagaaggatggtagattatgtcattttggaaactattgtgtcccttgtattttaaatatttcaggaaaatgcctacgattgttacaaagatgtgtgttttacttataacataagctctgattctccagtggccactgggccttctctgtgctctgtattcaactgcagtatgaattacagaatgctgtgcatgttcgttagtaccaataccatgtgtatgtggtagaagttgtaaccagtttctggatctgtatggtactataaaatacttattttataattctgtaaccgtatggcagtgttatgccaaaaatgtataaagagcaatagtttttgttgcttactgctgtattttaaaatattgtttctaaaataatagagttagagttccttttgagtaattatttttaagaactattgccaaatatacatcctgtaaaactaataaaagccactccatcttagataacattttagcattgtgctagagtacattatggtgattttgcacgattaaaatatttttaaagaactag

SEQ ID NO: 70273 - DNA, 768 bp, Homo Sapiens
  misc_feature (721)..(721): n is a, c, g, or t
aagatgtacatatgagtaggagattattgggaaaagggtgatgttacatttattggaagggcagttgaggaaggacattgaccatggcacccacagagggaataccttagcctgtacttgtacttagaggtacagggaagggagggacactgatgaaatttgtctttcagaaccgcttctggagtcttcctcccaagagcaaggcactggtgctgctctgtcaaactgttcaagtgccttcatgtaactgcttgctgtctctgctggcccctcccactggctccaaccatggcttggtccccactccccttaaccccagctcctgcacttcccatgcaaagcacctgccagcacctctggataactttcccaaccacattctcatactatttgctcaatcattccatggggcaagagaatgtcacccgactaggagtgtagacagacaggacaagttggacagacagccctcaggcagaatctttgaaaacagggactccattattggcactgaaaaccctaagtcttaccacccatggagaggccatattggacccaatcaacctgtgcccctagctgatgtcccatttggggatccccaacaactgtggacaatacttcctttctaggtgcaccatatgcatcccagggactgtaattgtgaattgtgtggaagccaggatgttacattgtctccctactgtaaacacagtgaccttcncctgggatgcatatggtgccccgtaaaaagtaagcacttgcggccgc

SEQ ID NO: 70274 - DNA, 1802 bp, Homo Sapiens
  misc_feature (47)..(47): n is a, c, g, or t
  misc_feature (66)..(66): n is a, c, g, or t
  misc_feature (80)..(80): n is a, c, g, or t
  misc_feature (107)..(107): n is a, c, g, or t
  misc_feature (138)..(138): n is a, c, g, or t
  misc_feature (274)..(274): n is a, c, g, or t
  misc_feature (289)..(289): n is a, c, g, or t
  misc_feature (301)..(301): n is a, c, g, or t
cttgaatacgagttcctcagtcatgtgagcactcccgaagccctacntgtccgtcatcgcacctcngagacgccgcgccntactgtatgacctcagggatcgggatnaaagtacccagccagcatccttgctataagntgatggcgcaaaggcagattgatgcaaagtgcacagccctctggagccgtgaggagtccacgtgttgagctgagccagatagtatgctgtcgcttcatccctcatgagaatgtgtccacaccatcgatgtcagtcnaatggagccacgtgntggaagcccctncaaagtgcgcgttggggagcctggacaagcggggaaccctgccctggtgcccgcctatgccacggggactcgaagggggcaccacaggtatccagtcggaattctttattaacaccacccgagcaggtccagggacattatccgtcaccatcgaaggcccatccaaggttaaaatggattgccaggaaacacctgaagggtacaaagtcatgtacacccccatggctcctggtaactacctgatcagcgtcaaatacggtgggcccaaccacatcgtgggcagtcccttcaaggccaaggtgacaggccagcgtctagttagccctggctcagccaacgagacctcatccatcctggtggagtcagtgaccaggtcgtctacagagacctgctatagcgccattcccaaggcatcctcggacgccagcaaggtgacctctaagggggcagggctctcaaaggcctttgtgggccagaagagttccttcctggtggactgcagcaaagctggctccaacatgctgctgatcggggtccatgggcccaccaccccctgcgaggaggtctccatgaagcatgtaggcaaccagcaatacaacgtcacatacgtcgtcaaggagaggggcgattatgtgctggctgtgaagtggggggaggaacacatccctggcagcccttttcatgtcacagtgccttaaaacagttttctcaaatcctggagagagttcttgtggttgcttttgttgcttgtttgtaattcattttatacaaagccctccagcctgtttgtggggctgaaaccccatccctaaaatattgctgttgtaaaatgccttcagaaataagtcctagactggactcttgagggacatattggagaatcttaagaaatgcaagcttgttcagggggctgagaagatcctgagtacactaggtgcaaaccagaactcttggtggaacagaccagccactgcagcagacagaccaggaacacaatgagactgacatttcaaaaaaacaaaactggctagcctgagctgctggttcactcttcagcatttatgaaacaaggctaggggaagatgggcagagaaaaaggggacacctagtttggttgtcatttggcaaaggagatgacttaaaatccgcttaatctcttccagtgtccgtgttaatgtatttggctattagatcactagcactgctttaccgctcctcatcgccaacacccccatgctctgtggccttcttacacttctcagagggcagagtggcagccgggcaccctacagaaactcagagggcagagtggcagccaggcccacatgtctctcaagtacctgtcccctcgctctggtgattatttcttgcagaatcaccacacgagaccatcccggcagtcatggttttgctttagttttccaagtccgtttcagtcccttccttggtctgaagaaattctgcagtggcgagcagtttcccacttgccaagatccctttt

SEQ ID NO: 70275 - DNA, 701 bp, Homo Sapiens
tgttaccaaaaacatcacctctagcatcaccagtattagaggcaccgcctgcccagtgacacatgtttaacggccgcggtaccctaaccgtgcaaaggtagcataatcacttgttccttaaatagggacctgtatgaatggctccacggagggttcagctgtctcttacttttaacacagcaagacgagatgaccctatggagctttaatttattaatgcaaacagtacctaacaaacccacaggtcctaaactaccaaacctgcattaaaaatttcggttggggcgacctcggagcagaacccaacctccgagcagtacatgctaagacttcaccagtcaaagcgaactactatactcaattgatccaataacttgaccaacggaacaagttaccctagggataacagcgcaatcctattctagagtccatatcaacaatagggtttacgacctcgatgttggatcaggacatcccaatggtgcagccgctattaaaggttcgtttgttcaacgattaaagtcctacgtgatctgagttcagaccggagtaatccaggtcggtttctatctacttcaaattcctccctgtacgaaaggacaagagaaataaggcctacttcacaaagcgccttcccccgtaaatgatatcatctcgtctcttctcttgacatctcgtctctctcttaaggtagcgagctc

SEQ ID NO: 70276 - DNA, 819 bp, Homo Sapiens
cctctttgcccgttataccgccctctttgtgacggcggtctccttgggaccgactcacgcgttttttgtgcccccctagtagtaccaccgggcccgtatcaatccttcggtttttacattagccctcgggccagaataaccattttcaacacagggtccatctttgaccacttagccctattttagcggcacactattagcgaccacttgtgtccacataaatcaggctggtcccgctccggaattcccgggatgttcgtcagacccccgctttcccgagggttcactgtctcttacttttaaccactgcaattgaccttgccctgaagagtcggccatgacaccgccaggacgagtagaccctatggagctttaatttattgaatcgccccccagtactcttgccaacccacagcgtcctttgacgtacacaaacactgcccttctaaaatttcgggttggggcgacctcggagcagaacccaacctccgagcagtacatgctaagacctcaccagtcaaagcgaactactatactcaattgatccaataacttgaccaacggaacaagttaccctagggataacagcgcaatcctattctagagtccatatcaacaatagggtttacgacctcgatgttggatcaggacatcccgatggtgcagccgctattaaaggttcgtttgttcaacgattaaagtcctacgtgatctgagttcagaccggagtaatccaggtcggtttctatctacttcaaattcctccctgtacgaaaggacaagagaaataaggcctacttcacaagcgccttcccccgt

SEQ ID NO: 70277 - DNA, 1152 bp, Homo Sapiens
tacgaagaggaatggaacctctgacggtaaaggttttaagttttatgcgattaccgggctctgccatcttaacaaaccctgttcttgggtgggtgtgggtataatactaagttgagatgatatcatttacgggggaaggcgctttgtgaagtaggccttatttctcttgtcctttcgtacagggaggaatttgaagtagatagaaaccgacctggattactccggtctgaactcagatcacgtaggactttaatcgttgaacaaacgaacctttaatagcggctgcaccattgggatgtcctgatccaacatcgaggtcgtaaaccctattgttgatatggactctagaataggattgcgctgttatccctagggtaacttgttccgttggtcaagttattggatcaattgagtatagtagttcgctttgactggtgaagtcttagcatgtactgctcggaggttgggttctgctccgaggtcgccccaaccgaaatttttaatgcaggtttggtagtttaggacctgtgggtttgttaggtactgtttgcattaataaattaaagctccatagggtcttctcgtcttgctgtgtcatgcccgcctcttcacgggcaggtcaatttcactggttaaaagtaagagacagctgaaccctcgtggagccattcatacaggtccctaattaaggaacaagtgattatgctacctttgcacggttagggtaccgcggccgttaaacatgtgtcactgggcaggcggtgcctctaatactggtgatgctagaggtgatgtatatggtaaacaggcggggtaagatttgccgagttccttttacttaagagagcctttgccttatgagcatgcctgtgttgggtagaccagtgagggtaataatgactagtagggaagaatggtcagatattggggctggttaagtggtcagtacagatgtttaaatctgacgcagagataatgcggaggaagaatgttttcaatggttactttatgtaacataggttatatagaagggagaaaagaatgggccaatatgggggttaggaagatagtaaatatgtaggggagataaagagaggaagttaaaggtagagaggatataaaaagaggagaaagaaggggcaatatgaggaa

SEQ ID NO: 70278 - DNA, 427 bp, Homo Sapiens
gccgggcgtatatgaggggcccggtctagttgttaccagtgtgtctgcatctgcaaccttgggcaccatcggtgggagctgaaatgtgatgtttcatttaaaatccagagttggaaacgcacctgcctgggtctcagagcagagtgccatctgttgaatgcagtgccaagctcagctgaggactacaaatgagaaccagggcccgaaaccctattgttgatatggactcaagaataggattgcgctgtaatccctagggtatcttgttccgttggtcaagttattggatcaattgagtatagtagttcgctttgactggtgaagtcttagcatgtactgctcggaggttgggttctgctccgaggtcgccccaaccgaaatttttaatgcaggtttggtagtttaggacctgtgggtttgttaggta

SEQ ID NO: 70279 - DNA, 2061 bp, Homo Sapiens
  misc_feature (1250)..(1250): n is a, c, g, or t
  misc_feature (1283)..(1283): n is a, c, g, or t
  misc_feature (1639)..(1697): n is a, c, g, or t
  misc_feature (1971)..(1971): n is a, c, g, or t
  misc_feature (2013)..(2013): n is a, c, g, or t
gcgggttcggttgcgcgtggcgcacggggtgggagcggagcccaggccgggagcaggcgccgccgccacaggcgaccatggggaacgtgttggctgccagctcgccgcccgcagggccgccaccgccgcctgcgccggccctcgtggggctgccgccacctccgccctcgccgccgggcttcacgctgccgccgctgggaggcagcctgggcgccggcaccagtacgagtcgaagttcggaacggacccccggggctgcaaccgccagcgcctcaggggccgccgaggatggggcctgcggctgcctgcccaacccgggcacattcgaggagtgccaccggaagtgcaaggagctgtttcccattcagatggagggtgtcaagctcacagtcaacaaagggttgagtaaccatttccaggtcaaccacacagtagccctcagcacaatcggggagtccaactaccacttcggggtcacatatgtggggacaaagcagctgagtcccacagaggcgttccctgtactggtgggtgacatggacaacagtggcagtctcaacgctcaggtcattcaccagctgggccccggtctcaggtccaagatggccatccagacccagcagtcaaagtttgtgaactggcaggtggacggggagtatcggggctctgacttcacagcagccgtcaccctggggaacccagacgtcctcgtgggttcaggaatcctcgtagcccactacctccagagcatcacgccttgcctggccctgggtggagagctggtctaccaccggcggcctggagaggagggcactgtcatgtctctagctgggaaatacacattgaacaactggttggcaacggtaacgttgggccaggcgggcatgcacgcaacatactaccacaaagccagtgaccagctgcaggtgggtgtggagtttgaggccagcacaaggatgcaggacaccagcgtctccttcgggtaccagctggacctgcccaaggccaacctcctcttcaaaggctctgtggatagcaactggatcgtgggtgccacgctggagaagaagctcccacccctgcccctgacactggcccttggggccttcctgaatcaccgcaagaacaagtttcagtgtggctttggcctcaccatcggctgagccctcctggcccccgccttccacgcccttccgattccacctccacctccacctccccctgccacagaggggagacctgagcccccncctcccttcccgtcccctgggggtcgggggggnacattggaaaggagggaccccgccaccccagcagctgaggaggggattctggaactgaatggcgcttcgggattctgagtagcaggggcagcatgcccagtgggcctggggtcccgggagggattccggaattgaggggcacgcaggattctgagcaccaggggcagaggcggccagacaacctcagggaggagtgtcctggcgtccccatcctccaaagggcctgggcccgccccgagggggcagcgagaggagcttccccatccccggtcagtccaccctgccccgtccactttcccatctcctcggtataaatcatgtttataagttatggaagaaccgggacattttacagnnnnnnnnnnnnnnnnnnnnnnnnnnnnnnnnnnnnnnnnnnnnnnnnnnnnnnnnnnnggggcggccggttaagagtatccctcgaggggcccaagtttacgcgtacccagttttcttgtacaaggtgccccctatagtgagtcgtataataagctaggcactgcgccgtcgtttacaacgtcgtgactggaaaacactgctagctggggatcttggtgaaggacccttacttctgtgcgtgtgaccatactttgcgaccaaactaccctacagagatataaaagctctagggtaacattttacacacttttcacgctgtatacggggtgtnaaccctagatgcattatgctggcggctggagaagttgggctnaacggagttatgatttgatgaccctattatacccgactcgtgcgttgg

SEQ ID NO: 70280 - DNA, 1286 bp, Homo Sapiens
  misc_feature (175)..(175): n is a, c, g, or t
ctccgatgaagcagcatgcacacccataggtaatagtccacatagaccccgagttacactatactcagaaatatatgtatgattgtggcgaagacactacaacagaaacagtgtgcatgataggaattaagagaacctataggaattgacctggagccaagaatcggaacgagancattatatagtggacgaccacactgtagcttttatattatatatattaagaaaaaaaagcgcaaaaacaagtacatagtgacgatggcttttatttggacaaatagcttttatattttcattaaaccatgcaaaaaatactacatctttctggcacataactgtctccttaaccactgaacagttcagccatttgaataaattgtacattgtaaagcttatagtagctgattgtattattgattgtattgtatactatattaaatgtgaatttgtaccccttcattttaaaaggtcattgtgttctactgcctattttagattactttggggttggggaagggtgttttggtaagcaggattttaagtcctctctctctcgattggttttatgaagatataaggttatgctcttactaccaagctcaggattcttgattttaaaggtacaaggatagttgtgggagttttatttttggttatatttgaactgtatgaatggtaggtctgaatattgagaatttccatggtcttatgtggaggtaaaatatacagataactgatcagtttgagtgactgcaacatgttctggttgcacaacagttaggcatgctatggtttatatttgtgaagtttggatgcctgtgaagaatgattaaatacatgtttctaatattttagtgttttgtatttaggttatttattctttgtatctaaaactgaacagctactgtgctatattgattttattggtagtattgagcagaccttgtttctgcatgaaactagttgcaaaacccactattttggaaataaaaatgtattttgacatatacaaataaaatgaataaaactattttaaatgtgtgaacttttaatgaagacattttaaattttgttctgagatatttaaattctgcatgggtattttttcactaattgctttacttggataccaatttgaataatttctgaaattgtaatattgtgataatttgcacagcattgtacatgcacatctgtaaatgcaatcttaattgccatatttatgcaatctgtgtaccaatttggacaaatgtttatatattttacataaagctgtctgtatgcag

SEQ ID NO: 70281 - DNA, 1299 bp, Homo Sapiens
atatccaagacagagacagaggcgccctgggtggtggaaggcagccgccctcccgaaggttggcccccacgtggggaggtggagttccggaattattctgtgcgctaccggccgggcctagacctggtgctgagagacctgagtctgcatgtgcacggtggcgagaaggtggggatcgtgggccgcactggggctggcaagtcttccatgaccctttgcctgttccgcatcctggaggcggcaaagggtgaaatccgcattgatggcctcaatgtggcagacatcggcctccatgacctgcgctctcagctgaccatcatcccgcaggaccccatcctgttctcggggaccctgcgcatgaacctggaccccttcggcagctactcagaggaggacatttggtgggctttggagctgtcccacctgcacacgtttgtgagctcccagccggcaggcctggacttccagtgctcagagggcggggagaatctcagcgtgggccagaggcagctcgtgtgcctggcccgagccctgctccgcaagagccgcatcctggttttagacgaggccacagctgccatcgacctggagactgacaacctcatccaggctaccatccgcacccagtgtgatacctgcactgtcctgaccatcgcacaccggcttaacactatcatggactacaccagggtcctggtcctggacaaaggagtagtagctgaatttgattctccagccaacctcattgcagctagaggcatcttctacgggatggccagagatgctggacttgcctaaaatatattcctgagatttcctcctggcctttcctggttttcatcaggaaggaaatgacaccaaatatgtccgcagaatggacttgatagcaaacactgggggcaccttaagattttgcacctgtaaagtgccttacagggtaactgtgctgaatgctttagatgaggaaatgatccccaagtggtgaatgacacgcctaaggtcacagctagtttgagccagttagactagtccccggtctcccgattcccaactgagtgttatttgcacactgcactgttttcaaataacgattttatgaaatgacctctgtcctccctctgatttttcatattttctaaagtttcgtttctgttttttaataaaaagctttttcctcctggaacagaagacagctgctgggtcaggccacccctaggaactcagtcctgtactctggggtgctgcctgaatccattaaaaatgggagtactgatgaaataaaactacatggtcaacagt

SEQ ID NO: 70282 - DNA, 674 bp, Homo Sapiens
cccaatgcgactccagaagatccgcttccagtacccaccctcaacccgagagcttttccggctcctgtgctctgcccatgaggccccggggccagccccctcccttctgctgctcgacggcctagaagagtacctagcggaagacccagagccccaggaagccgcctacctcattgccttacttctagacacagctgcccacttcagccaccggcttgggcctggccgggattgtgggctcatggtggccctccagacccaggaggaagcaggtagtggggacgtcctgcacctggcactgctccagcggtattttcctgcccagtgctggctgcagccagatgcaccaggtccaggagagcacggcctccgagcctgcctggagccaggcgggctgggccccagaacagagtggtgggtgactttccgatcagatggagaaatgatgatcgctccgtggcccacccaggctggtgaccccagctcaggcaagggttcaagctctggaggccagccctgagctttggtgggtgactacctctctgtgcttcagtttcccatggctggaatacttacctcagggacatatgcagatccaaagacctaaacaatgtaaagtgctttttctcttttaaaagtatagcattatcttgtatatattttacccaatcaaa

SEQ ID NO: 70283 - DNA, 515 bp, Homo Sapiens
  misc_feature (42)..(60): n is a, c, g, or t
gggaaattaacactaagaaaaagtcatcaatatttttcaacnnnnnnnnnnnnnnnnnnnactttggaaaggacaataactataaacctatatccagattttctttctgctgaagctgttgtcagaatcttcctttggacaaaacatcactagctgactataaaaacaaaagtgtcatcattgaagccctgaagaggcagggaattgagcttcagcaaaatacaggaaaagaactatccagtataaatgtcagaagacagatttcctaaacaagtaaaagagacatcaaaaattttaacataatcacaatgaaatcattttttaccacttttacagcggtgtttcaagcggactgtcactcagatctgcagagatgaatattactcaaaaaatttttttgttctcttgcatttttttcaactaccgcaaagctatacagatttttttgtacttgtggatcttttgtacttctcataacctaatgtcagactaagaaaaataaaatatctgagagt

SEQ ID NO: 70284 - DNA, 1026 bp, Homo Sapiens
gagctttgaggagatgttttccttcactttagtttcaaacccaagtgagtgtgtgcacttctgcttctttagggatgccctgtacatcccacaccccaccctcccttcccttcatacccctcctcaacgttcttttactttatactttaactacctgagagttatcagagctggggttgtggaatgatcgatcatctatagcaaataggctatgttgagtacgtaggctgtgggaagatgaagatggtttggaggtgtaaaacaatgtccttcgctgaggccaaagtttccatgtaagcgggatccgttttttggaatttggttgaagtcactttgatttctttaaaaaacatcttttcaatgaaatgtgttaccatttcatatccattgaagccgaaatctgcataaggaagcccactttatctaaatgatattagccaggatccttggtgtcctaggagaaacagacaagcaaaacaaagtgaaaaccgaatggattaacttttgcaaaccaagggagatttcttagcaaatgagtctaacaaatatgacatctgtctttggcacttttgttgatgtttatttcagaatgttgtgtgattcatttcaagcaacaacatggttgtattttgttgtgttaaaagtacttttcttgatttttgaatgtatttgtttcagcagaagtcattttattggatttttctaacccgtgttaacaccattgaatgtgtatttcttaagaaaataccaccctcttgtgcccttaaaagcattactttaactggtagggaacgccagaaacttttcagtccagctattcattagatagtaattgaagatatgtataaatattacaaagaataaaaatatattactgtctctttagtatggttttcagtgcaattaaaccgagagatgtcttgtttttttaaaaagaatagtatttaataggtttctgacttttgtggatcattttgcacatagctttatcaacttttaaacattaataaactgatttttttaaag

SEQ ID NO: 70285 - DNA, 676 bp, Homo Sapiens
  misc_feature (330)..(558): n is a, c, g, or t
atgaaatagactgggaagatcttgctagtgccataggtgatgttcctccatcttacgttcaaactaaattttctaggctgaaagctgtctatgttccattttggcagaaaaagacttttccagagatcatcgactacctttatgagacgactctacctttgctgaaggaaaagttagaaaaaatgatggagaaaaaaaggcactaaaatccagactcctgcagcacccaagcaagttttcccatttcgagacatcttttattatgaagacgatagtgaaggagaggacatagaaaaagaaagcgaaggccaggcgccatgcatggctcannnnnnnnnnnnnnnnnnnnnnnnnnnnnnnnnnnnnnnnnnnnnnnnnnnnnnnnnnnnnnnnnnnnnnnnnnnnnnnnnnnnnnnnnnnnnnnnnnnnnnnnnnnnnnnnnnnnnnnnnnnnnnnnnnnnnnnnnnnnnnnnnnnnnnnnnnnnnnnnnnnnnnnnnnnnnnnnnnnnnnnnnnnnnnnnnnnnnnnnnnnnnnnnnnnnnnnnnnnnnnnnnnnnntgagagagagagattactatttcttgtccctttttctcagtttgattatatttatatacatatgtcagtaaatctgttttcagtattgatgtttaataaagaatgtacaatggccaga

SEQ ID NO: 70286 - DNA, 430 bp, Homo Sapiens
tgagctactgcgcctggctaagggcgtgaattttttaaagtcagacaaaaattcaaatcctggtctgccatttgctggcagtatgctatttggcaggtcacttaagtgtctctagctttgtcaactgtaaaatacagataaataatgtataatctttaatagataatatggatacttattcctcagtggttgtgaggactcaaagaatgtaaagcatgaagtatatgatatgcacttaacatatgttagtaatagtgctgttcctattaggtgatagacatatatgcacttccgttaggtagggtagcacctcctatgtcaagaaactgtactccccgcaagggccctggaaccatatcctggactagggcatactccctggattcatagtgaggaataattgctttaaagggcatgggagtcaaggaaa

SEQ ID NO: 70287 - DNA, 901 bp, Homo Sapiens
  misc_feature (68)..(108): n is a, c, g, or t
accacggccactgtttgcgaaaattatcctcactatagggaataagcttgcggccgcatacgcggccnnnnnnnnnnnnnnnnnnnnnnnnnnnnnnnnnnnnnnnnngggggtgttatttctgtagcagccaagtcctgcggctccctggggctgagatctccctttgtggaactccgagagccgccctgacagtcccagccgccacccaaggagccccatccgcccacccaccctgggacccacgcggccactccagggatcattgttgtccttttgtgaggggctgaggcgactgtcccatggaggcatccaaggctttctgtgccaagaatcccaagtgactggggctggggaccacttctccaggcctctctccccgaccatgagagcccctggccctggcccctgcacaccagtgggcccagaataaccgccacccttgccatcctgcaacagctggactcaagtttccaggaagtggagatgtgtttctagaagtttcctgtggaacctggaggctcctgacgcctttgactccaggctgggcgattccgatgctgacccgtcctcctgggctccccacccccgctccccaagtgtcacacaggcactttgtacacatcctggttttctaagaagggaacttgccatcaagattcctgtaccaggcccacggccgtctcgggcagagccacctgggccccgggtgcagccggagaccccgccgagcccctcctcccagtattcccatccccgcatgcttctagggagcgcctcttttccgttcttgaggaatttctgttctggggcttgtccttcctttgcagctgttttgaatgtagttttccttttctatttatttgcacattaaagttaataattgaatattgacaaaaaa

SEQ ID NO: 70288 - DNA, 1363 bp, Homo Sapiens
  misc_feature (122)..(122): n is a, c, g, or t
  misc_feature (687)..(687): n is a, c, g, or t
  misc_feature (692)..(692): n is a, c, g, or t
  misc_feature (847)..(885): n is a, c, g, or t
gaaaaataacacagctactcctcactgcaaaaacatatccatgcgtagaatcaacaactccagtcatgggaccaggaggagctctgggacgcagacacattccttggatgttgatttttttnatgatctagtaaaggaataggtaaagtctttgatgtcagtgaagtggcaacatagccaaaaagttgggtaccttttaggaaatgatgttgtaagtctccttaatgtatcctgaggtaagtttcctactggcagcagattttgtaagaattacttttaagaatttcattctttttgtatggtcatggagctccaaccatttttaataggaaagtcttttgtaaattgttgtcgttttaatgtcatttctgtctttataacttgatcaagaatgattggaaggcaaacaggtttacaaatcaattctgtgacttttaaaaagttgacaatgttgtcagatttaaaccagtgtggctagtaaaaagcagctcactcaatgtgggtggctccctattcctttacgctccccctatccctaccccacaagcctttcgattataaaatactaccaatcttgttataagattactgtggagtagtcaagtactccccgggccttctgagctggtggaatattttatttcagactgaaaacagagagcactctccttgggaagggaaagcggnttgcntgagtgagagatggagcctcatggtgtacaactgagggtagttaactcatcacttctcccaagcactcgatcccagcttcacccactggtgttgctttgcttgaactgttcaagccttttatagccttaccataagtatttagatatggtgtccnnnnnnnnnnnnnnnnnnnnnnnnnnnnnnnnnnnnnnnaaagtaagtgcttaagtattaactttgggttgtcccctctgtatgtttcgaaggggttttggttctttttgcttctgttttcttaaacatgttttccactcccacttgggcattttggaagctggtcagctagcaggttttctgggatgtcgggagacctagatgaccttatcgggtgcaatactagctaaggtaaagctagaaacctacactgtcactttactgagatttctgagtatacttttcatattgccttaatgtagcagtaatgtgtttatgcatttgtttctttgcacagacattttgtcaaatattaaaactctacttttttatggcacatattagcatataagcctttattccaagaggtatttattttttcacttgtaaaaaaataatgtttccacgtaaagaactctgttatatcctagaggactctgtcttttatattcgggataataaagactttaaagcaaaa

SEQ ID NO: 70289 - DNA, 963 bp, Homo Sapiens
  misc_feature (670)..(670): n is a, c, g, or t
gaattcggcacgaggctgtgttcactagcaacctcaaacagacaccatggtgcacctgactcctgaggagaagtctgccgttactgccctgtggggcaaggtgaacgtggatgaagttggtggtgaggccctgggcaggctgctggtggtctacccttggacccagaggttctttgagtcctttggggatctgtccactcctgatgctgttatgggcaaccctaaggtgaaggctcatggcaagaaagtgctcggtgcctttagtgatggcctggctcacctggacaacctcaagggcacctttgccacactgagtgagctgcactgtgacaagctgcacgtggatcctgagaacttcaggctcctgggcaacgtgctggtctgtgtgctggcccatcactttggcaaagaattcaccccaccagtgcaggctgcctatcagaaagtggtggctggtgtggctaatgccctggcccacaagtatcactaagctcgctttcttgctgtccaatttctattaaaggttcctttgttccctaagtccaactactaaactgggggatattatgaagggccttgagcatctggattctgcctaataaaaaacatttattttcattggaaaaacacgacaacgcggacaacacagagaccacaacaactggttggngcagccattggcgccgcactaaagaaggcttctgtaaccccaattgggttggtgggcgcgggcccccagaatgtcgaagtggacaccgcgggccataaggaggtccccaaagagaaaaacgggggaccgcaacactcagcgcgtgtgggattctcgcccgaagtataaaaaaagccgccggggcgggaacgcacagcaccgttctgttgaaccacatccaggagggaggcacgggaggcacagcacgggggctctatcaaacggggcccaaggcagccgaaataaaataccga

SEQ ID NO: 70290 - DNA, 388 bp, Homo Sapiens
agaagtctgccgttactgccttgtggggcaaggtgaacgtgaatgaagttggtggtgaggccctgggcaggctgctggtggtctacccttggacccagaggttctttgagtcctttggggatctgtccactcctgatgctgttatgggcaaccctaaggtgaaggctcatggcaaagaattcaccccaccagtgcaggctgcctatcagaaagtggtggctggtgtggctaatgccctggcccacaagtatcactaagctcgctttcttgctgtccaatttctattaaaggttcctttgttccctaagtccaactactaaactgggggatattatgaagggccttgagcatctggattctgcctaataaaaaacatttattttcattg

SEQ ID NO: 70291 - DNA, 3198 bp, Homo Sapiens
  misc_feature (197)..(197): n is a, c, g, or t
ccccaaaacgtcctaagtagcgaggcctgggtggcgattccggcacgaggggcagcctcagcacctgcagttgaagaccaggtacctgaagctgaacctgagccagcagaagagtacactggagcaaagtgaagttgaatcaacagagtatgtaaatagacagttcatggcagaaacacagttcaccagtggtgaanaacggagcaggtagatgagtggacagttgaaacggttgaggtggtaaattcactccagcagcaacctcaggctgcatccccttcagtaccagagccccactctttgactccagtggctcaggcagatccccttgtgagaagacagcgagtacaagaccttatggcacaaatgcagggtccctataatttcatacaggattcgatgctggattttgaaaatcagacacttgatcctgccattgtatctgcacagcctatgaatccaacacaaaacatggacatgccccagctggtttgccctccagttcattctgaatctagacttgctcagcctaatcaagttcctgtacaaccagaagcgacacaggttcctttggtatcatccacaagtgaggggtacacagcatctcaacccttgtaccagccttctcatgctacagagcaacgaccacagaaggaaccaattgatcagattcaggcaacaatctctttaaatacagaccagactacagcatcatcatcccttcctgctgcgtctcagcctcaagtatttcaggctgggacaagcaaacctttacatagcagtggaatcaatgtaaatgcagctccattccaatccatgcaaacggtgttcaatatgaatgccccagttcctcctgttaatgaaccagaaactttaaaacagcaaaatcagtaccaggccagttataaccagagcttttctagtcagcctcaccaagtagaacaaacagagcttcagcaagaacagcttcaaacagtggttggcacttaccatggttccccagaccagtcccatcaagtgactggtaaccaccagcagcctcctcagcagaacactggatttccacgtagcaatcagccctattacaatagtcgtggtgtgtctcgtggaggctcccgtggtgctagaggcttgatgaatggataccggggccctgccaatggattcagaggaggatatgatggttaccgcccttcattctctaacactccaaacagtggttatacacagtctcagttcagtgctccccgggattactctggctatcaacgggatggatatcagcagaatttcaagcgaggctctgggcagagtggaccacggggagccccacgaggtcgtggagggcccccaagacccaacagagggatgccgcaaatgaacactcagcaagtgaattaatctgattcacaggattatgtttaatcgccaaaaacacactggccagtgtaccataatatgttaccagaagagttattatctatttgttctccctttcaggaaacttattgtaaagggactgttttcatcccataaagacaggactacaattgtcagctttctattacctggatatggaaggaaactatttttactctgcatgttctgtcctaagcgtcatcttgagccttgcacatgatactcagattcctcacccttgcttaggagtaaaacaatatactttacagggtgataataatctccatagttatttgaagtggcttgaaaaaggcaagattgacttttatgacattggataaaatctacaaatcagccctcgagttattcaatgataactgacaaactaaattatttccctagaaaggaagatgaaaggagtggagtgtggtttggcagaacaactgcatttcacagcttttccagttaaattggagcactgaacgttcagatgcataccaaattatgcatgggtcctaatcacacatataaggctggctaccagctttgacacagcactgttcatctggccaaacaactgtggttaaaaacacatgtaaaatgctttttaacagctgatactgtataagacaaagccaagatgcaaaattaggctttgattggcactttttgaaaaatatgcaacaaatatgggatgtaatccggatggccgcttctgtacttaatgtgaaatatttagatacctttttgaacacttaacagtttctttgagacaatgacttttgtaaggattggtactatctatcattccttatgacatgtacattgtctgtcactaatccttggattttgctgtattgtcacctaaattggtacaggtactgatgaaaatctctagtggataatcataacactctcggtcacatgtttttccttcagcttgaaagcttttttttaaaaggaaaagataccaaatgcctgctgctaccacccttttcaattgctatcttttgaaaggcaccagtatgtgttttagattgatttccctgtttcagggaaatcacggacagtagtttcagttctgatggtataagcaaaacaaataaaacgtttataaaagttgtatcttgaaacactggtgttcaacagctagcagcttatgtgattcaccccatgccacgttagtgtcacaaattttatggtttatctccagcaacatttctctagtacttgcacttattatcttttgtctaatttaaccttaactgaattctccgtttctcctggaggcatttatattcagtgataattccttcccttagatgcatagggagagtctctaaatttgatggaaatggacacttgagtagtgacttagccttatgtactctgttggaatttgtgctagcagtttgagcactagttctgtgtgcctatgaagttaatgctgcttattgtctcattctgacttcatggagaattaatcccacctttaagcaaaggctactaagttaatggtattttctgtgcagaaattaaattttattttcagcatttagcccaggaattcttccagtaggtgctcagctatttaaaaacaaaactattctcaaacattcatcattagacaactggagtttttgctggttttgtaacctaccaaaatggataggctgttgaacattccacattcaaaagttttgtagggtggtgggaaatgggggatcttcaatgtttattttaaaataaaataaaataagttcttgacttttaaaaaaa

SEQ ID NO: 70292 - DNA, 459 bp, Homo Sapiens
gcgccggcttctcagcaccccgcaaccggcaccggcgctgtccagaccgaggccatgaagcagattctcggggtgatcgacaagaaacttcggaacctgactcggacgcggcactgtaccccaggcctctttattactcttccgctgtgggtccggctttttggcctttaggagtgggacatgtgagggtgggggcctgtcgtcaggacttcactgtatggtgcccttctttccgtctctgaggcccgatttctctgacgagggcccaaaatgaagaggtccctgcgcggggggctccgggttcaaccgaccgcctcgtggagttggggcggcctgcgtcctgcagccttggggtctgtccgctcggttaccatgcactcgagacctgtcgagcgtcccctcttcttccgtaggagagaagtgtgtttagaatcttaaggtagaactgcctttccggca

SEQ ID NO: 70293 - DNA, 1307 bp, Homo Sapiens
ggagcggctctcggtgcagcgggacagggcgaagtcgctctgcccacggagcgcgcgacactgcccggaagggaccgccacccttgccccctcagctgcccactcgtgatttctcagcggcctccgcgcgcgcacgatgccctcggccaccagccacagcgggagcggcagcaagtcgtccggaccgccaccgccgtcgggctcctccgggagtgaggcggccgcgggagccggggccgccgcgccggcttctcagcaccccgcaaccggcaccggcgctgtccagaccgaggccatgaagcagattctcggggtgatcgacaagaaacttcggaacctggagaagaaaaagggtaagcttgatgattaccaggaacgaatgaacaaaggggaaaggcttaatcaagatcagctggatgccgtttctaagtaccaggaagtcacaaataatttggagtttgcaaaagaattacagaggagtttcatggcactaagtcaagatattcagaaaacaataaagaagacagcacgtcgggagcagcttatgagagaagaagctgaacagaaacgtttaaaaactgtacttgagctacagtatgttttggacaaattgggagatgatgaagtgcggactgacctgaaacaaggtttgaatggagtgccaatattgtccgaagaggagttgtcattgttggatgaattctataagctagtagaccctgaacgggacatgagcttgaggttgaatgaacagtatgaacatgcctccattcacctgtgggacctgctggaagggaaggaaaaacctgtatgtggaaccacctataaagttctaaaggaaattgttgagcgtgtttttcagtcaaactactttgacagcacccacaaccaccagaatgggctgtgtgaggaagaagaggcagcctcagcacctgcagttgaagaccaggtacctgaagctgaacctgagccagcagaagagtacactgagcaaagtgaagttgaatcaacagagtatgtaaatagacagttcatggcagaaacacagttcaccagtggtgaaaaggagcaggtagatgagtggacagttgaaacggttgaggtggtaaattcactccagcagcaacctcaggctgcatccccttcagtaccagagccccactctttgactccagtggctcaggcagatccccttgtgagaagacagcgagtacaagaccttatggcacaaatgcagggttaagggctcccggagggttaagggctcccggagggttaagggctcccggagggttaagggctcccag

SEQ ID NO: 70294 - DNA, 299 bp, Homo Sapiens
ccgggagcccttaaccctccgggagcccttaaccctccgggagcccttaaccctccgggagcccttaaccctccgggagcccttaaccctgggggatgaataacatatcaacaaaaacttagaggaacagtggggcttcccacagagctacaataaggtcactccaagagctggaccctcgggtcctggggtcaaggaggagctagcaagatccctcctccctcctcccacaaggacatgaaacctgggggcagagggcacctacccgcccattctctatctctcgacaggccatcagg

SEQ ID NO: 70295 - DNA, 362 bp, Homo Sapiens
ccgggagcccttaaccggtccgggagcccttaaccctccgggagcccttaaccctccgggagcccttaaccctccgggagcccttaaccctccgggagcccttaaccctccgggagccccccggagcccttaaccctccgggagcccttaaccctgtgtgactgggcaagggctgggcaggcatttccagcatgaacacgctttcccaggcccactggttggagggcaccgaggggagaagggggacagaggaaaggagccggaagcaggatccagaattcgaacctaggtggcctgactccaagagggccctctctctcacttgacttcaatagtgacattagccaacttcaatagtgacc

SEQ ID NO: 70296 - DNA, 470 bp, Homo Sapiens
ccgggagcccttaaccctccgggagcccttaaccctccgggagcccttaacccgccgggagcccttaaccctccgggagcccttaaccctccgggagcccttaacccccgggagcccttaaccctccgggagcccttaaccctccgggagcccttaaccctccgggagcccttaaccctccgggagcccttaaccctccgggagcccttaaccctccgggagcccttaaccctccgggagcccttaaccctccgggagcccttaaccctccgggagcccttaaccctccgggagcacttaacccttggatttgcttggtcccaactgtagacagtcccaggacaccagaagtggacaacagaatcaggcaaacttaaatttctcagcagtgatgccatcaccaaaacagagactccaggccccatgagttaagtactgcatcttcacgaaatgaacaaggccaatgctgt

SEQ ID NO: 70297 - DNA, 798 bp, Homo Sapiens
gtagccgggatatcgtcgacccacgcgtcgagggtaccgggctggttacagcagctctacccctcacgacgcaaacatggcagcgcagaaggaccagcagaaagatgccgaggcggaagggctgagcggcacgaccctgctgccgaagctgattccctccggtgcaggccgggagtggctggagcggcgccgcgcgaccatccggccctggagcaccttcgtggaccagcagcgcttctcacggccccgcaacctgggagagctgtgccagcgcctcgtacgcaacgtggagtactaccagagcaactatgtgttcgtgttcctgggcctcatcctgtactgtgtggtgacgtcccctatgttgctggtggctctggctgtctttttcggcgcctgttacattctctatctgcgcaccttggagtccaagcttgtgctctttggccgagaggtgagcccagcgcatcagtatgctctggctggaggcatctccttccccttcttctggctggctggtgcgggctcggccgtcttctgggtgctgggagccaccctggtggtcatcggctcccacgctgccttccaccagattgaggctgtggacggggaggagctgcagatggaacccgtgtgaggtgtcttctgggacctgccggcctcccgggccagctgccccacccctgcccatgcctgtcctgcacggctctgctgctcgggcccacagcgccgtcccatcacaagcccggggagggatcccgcctttgaaaataaagctgttatgggtgtcattcaggaaaa

SEQ ID NO: 70298 - DNA, 489 bp, Homo Sapiens
  misc_feature (11)..(11): n is a, c, g, or t
aaacgggacangatctaggcaagtgtaaggtggcaacctggtgtccagtgtgggcacctgcagctgatgttggccgcagagagcggcaaggggaggagagagaggggaggagtcatgtggtttgaaaaggagtaggtttaaggcacagcagccaggtggatcctgggtttgaggaatagcaatttgagggggctgagactcgatagaaggatcggttgtgtctgagattttaagggatcaggtttgggggatctagtgtacatctaggcttgggcggacttgggttttgaaggacttggatttggggtctgaggtctgtctgcattccaaaagaccaagatttgagggaccaaggattcatctgggcagggggtttctccccaaagagcacaagcttggactccaaggtgcgcagatagagaatgtaacaggcgccgaaaaagacagccagatccacaaatatcgggggatcctcaagagtcagcgagc

SEQ ID NO: 70299 - DNA, 499 bp, Homo Sapiens
ccagctgacttgtaggaactctacatcttatcaatattaatcatttatcgaaaactatttgggtgccattatcttctcctagtcaatgttttttgtttgtgatatcttttataatatataagtttttaatgttggcagaagtaaagttaatctttttggctgtgttgtgtgtcttgtttgatgtaaagatagtttctgtaatagttttgcagtttgattgttcatctttaggtcttcaattacaacctgcacatccatcccctctatcctctttcttactctgtttttctccatagcacttatcatccaataatatgtcatgcactttatttatctgttttgcatatatattttgtctgttacctgtttccttccactagaatgtaagtcccatgagggcagggacttgcatctattttgtttgtggttgtatctctaacacctgggatagtcactggcaaatgatagttgctcaataaatatttgttggacaaataaa

SEQ ID NO: 70300 - DNA, 1358 bp, Homo Sapiens
  misc_feature (1053)..(1067): n is a, c, g, or t
gggagtgcgccctgcccaccgggggccacatctgctcctaccgctgcatcaacatccctggaagcttccagtgcagctgcccctcgtctggctacaggctggcccccaatggccgcaactgccaagacattgatgagtgtgtgactggcatccacaactgctccatcaacgagacctgcttcaacatccagggcggcttccgctgcctggccttcgagtgccctgagaactaccgccgctccgcagccacgctccagcaggagaagacagacacggtccgctgcatcaagtcctgccgccccaacgatgtcacatgcgtgttcgaccccgtgcacaccatctcccacaccgtcatctcgctgcctaccttccgcgagttcacccgccctgaagagatcatcttcctccgggccatcacgccaccgcatcctgccagccaggctaacatcatcttcgacatcacggaagggaacctgcgggactcttttgacatcatcaagcgttacatggacggcatgaccgtgggtgtcgtgcgccaggtgcggcccgtcgtgggcccatttcatgccgtcctgaagctggagatgaactatgtggtcgggggcgtggtctcccaccgaaatgttgtcaacgtccacatcttcgtctctgattactggttctgagggctggtctgccgcacagccgcaggtgcacctccaggccaaatcattgctgccagtgactgtggtctgtacttgtttataccctcagactttttttaatgttaggtatttgtagcattaggccaacatgtattaagctgagccagatgaataagtccatctgatgtattttcggtgtttaaaaaatgagcccagttgctcaactgtttggttgaaaaccttgctcattttttaatgcgaaggctaagtgtcaccccctttctctgcctctggctgggccttgctaagggccaaggaaagaaagacattttttagggggcagccagtccaaatgccaaaagaagaccagttcttgccctgattgtatgaaatttgacattttggcacnnnnnnnnnnnnnnnggccaatcagattttctatgttctaaggacatggctgctgtagaatagcacagacgtggatgataaattatccccagaagcagcatgacagaatgcctcggggagcacttggaagggaaattgcagttctgttgaaatagaggaaaatcccttggtaaagacacagcctgttaggctcgtgtgggcctccagtatgttcaccaggggaatggctgggatttctcggcactctgcatcatccatcttttcttataggtgggaaaataaacaactttgtgatcctcctgaaaa

SEQ ID NO: 70301 - DNA, 1439 bp, Homo Sapiens
agtgcgaaagagtatgaagtcacggcgcgccgaattcggcacgaggccgacaggtaccaccctggagtcagctggggtggtctgcccctacagagccatcgagtccctgtacaggaagcactgtctcgaacaggggaagcagcagctgatgccccaggaggccggcctggcggaggagttcctgctcactgacaatagtgccatatggcaaacggtagaagaactggattacttagaagtggaggctgaggccaagatggagaacttgcgagctgcagtgccaggtcaacccctagctctgactgcccgtggtggccccaaggacacccagcccagctatcaccatggcaatggaccttacaacgacgtggacatccctggctgctggtttttcaagctgcctcacaaggatggtaatagctgtaatgtgggaagcccctttgccaaggacttcctgcccaagatggaggatggcaccctgcaggctggcccaggaggtgccagtgggccccgtgctctggaaatcaacaaaatgatttctttctggaggaacgcccataaacgtatcagctcccagatggtggtgtggctgcccaggtcagctctgccccgtgctgtgatcaggcaccccgactatgatgaggaaggcctctatggggccatcctgccccaagtggggactgccggcacaatcactcgccgggctgtggagccaacatggctcaacgccagcaatgcccggcctgaccgagtaggcagtgagttgaaagccatggtgcaggccccacctggctacaccctggtgggtgctgatgtggactcccaagagctgtggattgcagctgtgcttggagacgcccactttgccggcatgcatggctgcacagcctttgggtggatgacactgcagggcaggaagagcaggcgcactgatctacacagtaagacagccactactgtgggcatcagccgtgagcatgccaaaatcttcaactacggccgcatctatggtgctgggcagccctttgctgagcgcttactaatgcagtttaaccaccggctcacacagcaggaggcagctgagaaggcccagcagatgtacgctgccaccaagggcctccgctggtatcggctgtcggatgagggcgagtggctggtgagggagttgaacctcccagtggacaggactgagggtggctggatttccctgcaggatctgcgcaaggtccagagagaaactgcaaggaagtcacagtggaagaacgtgggaggtggttgctgaacgggcatggaaggggggcacagagtcagaaatgttcaataagcttgagagcatagctacgtctgacataccacgtaccccggtgctgggctgctgcatcagccgaagcctggagcctcggctgtccaggaagagtttatgacaggcgtgtgaatgg

SEQ ID NO: 70302 - DNA, 2376 bp, Homo Sapiens
  misc_feature (2130)..(2130): n is a, c, g, or t
  misc_feature (2133)..(2164): n is a, c, g, or t
  misc_feature (2168)..(2193): n is a, c, g, or t
  misc_feature (2195)..(2206): n is a, c, g, or t
  misc_feature (2208)..(2230): n is a, c, g, or t
  misc_feature (2232)..(2233): n is a, c, g, or t
  misc_feature (2235)..(2257): n is a, c, g, or t
  misc_feature (2259)..(2273): n is a, c, g, or t
  misc_feature (2275)..(2275): n is a, c, g, or t
  misc_feature (2277)..(2299): n is a, c, g, or t
  misc_feature (2301)..(2310): n is a, c, g, or t
tcgcgccgggtcccgcttccgctgctgctgctcggcggccttgcgctgctggcggccggagtggacgcggatgtcctcctggaggcctgctgtgcggacggacaccggatggccactcatcagaaggactgctcgctgccatatgctacggaatccaaagaatgcaggatggtgcaggagcagtgctgccacagccagctggaggagctgcactgtgccacgggcatcagcctggccaacgagcaggaccgctgtgccacgccccacggtgacaacgccagcctggaggccacatttgtgaagaggtgctgccattgctgtctgctggggagggcggcccaggcccagggccagagctgcgagtacagcctcatggttggctaccagtgtggacaggtcttccgggcatgctgtgtcaagagccaggagaccggagatttggatgtcgggggcctccaagaaacggataagatcattgaggttgaggaggaacaagaggacccatatctgaatgaccgctgccgaggaggcgggccctgcaagcagcagtgccgagacacgggtgacgaggtggtctgctcctgcttcgtgggctaccagctgctgtctgatggtgtctcctgtgaagatgtcaatgaatgcatcacgggcagccacagctgccggcttggagaatcctgcatcaacacagtgggctctttccgctgccagcgggacagcagctgcgggactggctatgagctcacagaggacaatagctgcaaagatattgacgagtgtgagagtggtattcataactgcctccccgattttatctgtcagaatactctgggatccttccgctgccgacccaagctacagtgcaagagtggctttatacaagatgctctaggcaactgtattgatatcaatgagtgtttgagtatcagtgccccgtgccctatcgggcatacatgcatcaacacagagggctcctacacgtgccagaagaacgtgcccaactgtggccgtggctaccatctcaacgaggagggaacgcgctgtgttgatgtggacgagtgcgcgccacctgctgagccctgtgggaagggacatcgctgcgtgaactctcccggcagtttccgctgcgaatgcaagacgggttactattttgacggcatcagcaggatgtgtgtcgatgtcaacgagtgccagcgctaccccgggcgcctgtgtggccacaagtgcgagaacacgctgggctcctacctctgcagctgttccgtgggcttccggctctctgtggatggcaggtcatgtgaagacatcaatgagtgcagcagcagcccctgtagccaggagtgtgccaacgtctacggctcctaccagtgttactgccggcgaggctaccagctcagcgatgtggatggagtcacctgtgaagacatcgacgagtgcgccctgcccaccgggggccacatctgctcctaccgctgcatcaacatccctggaagcttccagtgcagctgcccctcgtctggctacaggctggcccccaatggccgcaactgccaagacattgatgagtgtgtgactggcatccacaactgctccatcaacgagacctgcttcaacatccagggcggcttccgctgcctggccttcgagtgccctgagaactaccgccgctccgcagccacccgctgtgagcgcttgccttgccatgagaatcgggagtgctccaagctgcctctgagaataacctactaccacctctctttccccaccaacatccaagcgcccgcggtggttttccgcatgggcccctccagtgctgtccccggggacagcatgcagctggccatcaccggcggcaatgaggagggctttttcaccacccggaaggtgagcccccacagtggggtggtggccctcaccaagcctgtccccgagcccagggacttgctcctgaccgtcaagatggatctctctcgccacggcaccgtcagctcctttgtggccaagcttttcatctttgtgtctgcagagctctgagcactcgcttcgcgtcgcggggtctccctcctgttgctttcctaaccctgccctccggggcgttaataaagtcttagcaagcgtcccacacagtgnaannnnnnnnnnnnnnnnnnnnnnnnnnnnnnnntttnnnnnnnnnnnnnnnnnnnnnnnnnngnnnnnnnnnnnnannnnnnnnnnnnnnnnnnnnnnngnntnnnnnnnnnnnnnnnnnnnnnnngnnnnnnnnnnnnnnncntnnnnnnnnnnnnnnnnnnnnnnngnnnnnnnnnncctggtaagtaattctctttaggagggggcgggggaatttgtttaaaaaaaccgcccctttttttt

SEQ ID NO: 70303 - DNA, 677 bp, Homo Sapiens
  misc_feature (24)..(24): n is a, c, g, or t
tactggatagcatgaattctgcantgagaacctgaatagctgtcataaaatgaaactttctttctaaagaaagatactcacatgagttcttgaagaatagtcataactagattaagatctgtgttttagtttaatagtttgaagtgcctgtttgggataatgataggtaatttagatgaatttaggggaaaaaagttatctgcagaaatgttgagggcccatctctccccccacacccccacagagctaactgggttacagtgttttatccgaaagtttccaattccactgtcttgtgttttcatgttgaaaatacttttgcatttttcctttgagtgccaatttcttactagtactatttcttaatgtaacatgtttacctggaatgtattttaactatttttgtatagtgtaaactgaaacatgcacattttgtacattgtgctttcttttgtgggacatatgcagtgtgatccagttgttttccatcatttggttgcgctgacctaggaatgttggtcatatcaaacattaaaaatgaccactcttttaattgaaattaacttttaaatgtttataggagtatgtgctgtgaagtgatctaaaatttgtaatatttttgtcatgaactgtactactcctaattattgtaatgtaataaaaatagttacagtgac

SEQ ID NO: 70304 - DNA, 1190 bp, Homo Sapiens
  misc_feature (43)..(86): n is a, c, g, or t
  misc_feature (90)..(124): n is a, c, g, or t
  misc_feature (821)..(825): n is a, c, g, or t
  misc_feature (827)..(835): n is a, c, g, or t
  misc_feature (837)..(839): n is a, c, g, or t
  misc_feature (842)..(843): n is a, c, g, or t
aaagacattgggtatagaatcactatagggcgctcccttaatnnnnnnnnnnnnnnnnnnnnnnnnnnnnnnnnnnnnnnnnnnnnccgnnnnnnnnnnnnnnnnnnnnnnnnnnnnnnnnnnncagtcgacggtaccggacatatgcccgggaattcggccattacggccggggacagccttccactaacatcccataggagcctctctccctactgctgctacacaagaccctgagactgacctgcaggacgaaaccatgaagagcctgatccttcttgccatcctggccgccttagcggtagtaactttgtgttatgaatcacatgaaagcatggaatcttatgaacttaatcccttcattaacaggagaaatgcaaataccttcatatcccctcagcagagatggagagctaaagtccaagagaggatccgagaacgctctaagcctgtccacgagctcaatagggaagcctgtgatgactacagactttgcgaacgctacgccatggtttatggatacaatgctgcctataatcgctacttcaggaagcgccgaggggccaaatgagactgagggaagaaaaaaaatctctttttttctggaggctggcacctgattttgtatccccctgtagcagcattactgaaatacataggcttatatacaatgcttctttcctgtatattctcttgtctggctgcacccctttttcccgcccccagattgataagtaatgaaagtgcactgcagtgagggtcaaaggagagtcaacatatgtgattgttccataataaacttctggtgtgatactttcaannnnncnnnnnnnnnannnaannaaaaaattgtccggccgccctccgcccctcgaagaaggctttcctaaaaccatttcgttttgggcgccgcggggcccagttagggtaaagtgaaacatgggtcaatagcctgttttccctaagggaaatccctgggccaatgaactaagggccttgggatttcctcccccaaattaaaaaaaccgcccccgggcggccaaacccggaggcgtgttcttgaaaccaaaattcccaaaatgggaagtttcttggaagggtccaatataactggggaatcctaattcaaaacagggggaagtccccaaaggccgaaaggccttccgaataattcaaaaaatttaaagggg

SEQ ID NO: 70305 - DNA, 971 bp, Homo Sapiens
gtgcctctggaggaggtccaattggtggtggagccagaaggtggagcagtagctcctggtggaaccgtaaccctgacctgtgaagtccctgcccagccctctcctcaaatccactggatgaaggatggtgtgcccttgccccttccccccagccctgtgctgatcctccctgagatagggcctcaggaccagggaacctacagctgtgtggccacccattccagccacgggccccaggaaagccgtgctgtcagcatcagcatcatcgaaccaggcgaggaggggccaactgcaggctctgtgggaggatcagggctgggaactctagccctggccctggggatcctgggaggcctggggacagccgccctgctcattggggtcatcttgtggcaaaggcggcaacgccgaggagaggagaggaaggccccagaaaaccaggaggaagaggaggagcgtgcagaactgaatcagtcggaggaacctgaggcaggcgagagtagtactggagggccttgaggggcccacagacagatcccatccatcagctcccttttctttttcccttgaactgttctggcctcagaccaactctctcctgtataatctctctcctgtataaccccaccttgccaagctttcttctacaaccagagccccccacaatgatgattaaacacctgacacattataagaacagtccgacaagatggtcataaatcggaactttttcgggcgactcgtgctctccacaaagttgtttaaacccactccgggagggccggggcgccccctttccttggcacagcggccaacacgctgtccatggagagcctccgtggcttccagaaggtggcgggccttccacggagtaaaaagccccgggcgcaagtcgagttttcgaccaaatccatgaaggtacggagagaccacgggtcttcacagggttcccgcagaatccattcattgcg

SEQ ID NO: 70306 - DNA, 909 bp, Homo Sapiens
  misc_feature (43)..(83): n is a, c, g, or t
  misc_feature (87)..(121): n is a, c, g, or t
aagaacttatcgatcactatagggcgctagctcgtctgttagnnnnnnnnnnnnnnnnnnnnnnnnnnnnnnnnnnnnnnnnnccgnnnnnnnnnnnnnnnnnnnnnnnnnnnnnnnnnnncagtcgacggtaccggacatatgcccgggaattcggccattacggccggggaaggaagcaggatggcagccggaacagcagttggagcctgggtgctggtcctcagtctgtggggggcagtagtaggtgctcaaaacatcacagcccggattggcgagccactggtgctgaagtgtaagggggcccccaagaaaccaccccagcggctggaatggaaactgaacacaggccggacagaagcttggaaggtcctgtctccccagggaggaggcccctgggacagtgtggctcgtgtccttcccaaacggctccctcttccttccggctgtcgggatccaggatgaggggattttccggtgccaggcaatgaacaggaatggaaaaggagaccaagtccaactaccgagtccgtgtctaccagattcctgggaagccagaaattgtagattctgcctctgaactcacggctggtgttcccaataaggtggggacatgtgtgtcagagggaagctaccctgcagggactcttagctggcacttggatgggaagcccctggttgcctaatgagaagggagtatctgtgaaggaacagaccaggagacaccctgagacagggctcttcacactgcagtcggagctaatggtgaccccagcccggggaggagatccccgtcccaccttctcctgtagcttcagcccaggccttccccgacaccgggccttgcgcacagccccagtccagccccgtgtctggagcctggcatctggaggagtccaaattggcggt

SEQ ID NO: 70307 - DNA, 1140 bp, Homo Sapiens
  misc_feature (1019)..(1053): n is a, c, g, or t
  misc_feature (1057)..(1097): n is a, c, g, or t
tgggcccctgctggaatgggtggccacacacctgtagttcccggtcctgaggccctatctcaggggaggatcagcacagggctggggggaaagggcaagggcaacacccatccttcatccagtggatttgaggagagggctgggcaggggacttcaacaggtcagggttaccaggttccacccaggagctactgctccaccttctggctccaccaccaattggacctcctccagaggcacaggctcccagacacggggctggatggggcctgtgcgcaaggcccggtgtcggggaaggcctgggctgaagctacaggagaaggtgggacggggatctcctccccgggctggggtcaccattagctccgactgcagtgtgaagagccctgtctcagggtgtctcctggtctgttccttcacagatactcccttctcattaggcaccaggggcttcccatccaagtgccagctaagagtccctgcagggtagcttccctctgacacacatgtccccaccttattgggaacaccagccgtgagttcagaggcagaatctacaatttctggcttcccaggaatctggtagacacggactcggtagttggacttggtctcctttccattcctgttcattgcctggcaccggaaaatcccctcatcctggatcccgacagccggaaggaagagggagccgttgggaaggacacgagccacactgtcccaggggcctcctccctggggagacaggaccttccaagcttctgtccggcctgtgttcagtttccattccagccgctggggtggtttcttgggggcccccttacacttcagcaccagtggctcgccaatccgggctgtgatgttttgagcacctactactgccccccacagactgaggaccagcacccaggctccaactgctgttccggctgccatcctgcttccttccagggtcctggctctgtctccccggccgtaatggccgaattcccgggcatatgtccggtaccgtcgactgnnnnnnnnnnnnnnnnnnnnnnnnnnnnnnnnnnncggnnnnnnnnnnnnnnnnnnnnnnnnnnnnnnnnnnnnnnnnntcttcaaagacgtagcgccctatagtgagtctatacgatgtgg

SEQ ID NO: 70308 - DNA, 1041 bp, Homo Sapiens
  misc_feature (51)..(85): n is a, c, g, or t
  misc_feature (779)..(779): n is a, c, g, or t
tctgcaaaacgaccgagcgcagagagagattttagacgaggaagcgtgcgnnnnnnnnnnnnnnnnnnnnnnnnnnnnnnnnnnncagtcgacggtaccggacatatgcccgggaattcggccattacggccgggagacagagccaggaccctggaaggaagcagtgatggcagacggaacagcagttggagcctgggtgctggtcctcagtctgtggggggcacgtagtaggtgctcaaaacatcacagcccggattggcgagccactggtgctgaagtgtaagggggcccccaagaaaccaccccagcggctggaatggaaactgaacacaggccggacagaagcttggaaggtcctgtctccccaggaggaggaccctggagacagtgtggctcgtgtccttccacaacggctccctcttccttaccggactgtcgggatccaggatgaggggattttccggtgccacggcaatgaacaggaatggaaaggagaccaagtccaactaccgagtccgtgtctaccagattcctggggaagccacgaaattgtagattctgcctctgaactcacggactggtgtacccaataacggtggggacatgtgtgtcaagagggaagctaccctgcaaggactcttagctggaacttggatgggaagcccctggtgcctaattgagaagggagtatctgtgaaggacagaaccggagaacacccgagacaggttttcacactgcagtcggagctaatggtaccccagccgggagggagatccncgtccacctctcttgtagctcagaccaggcttcccggaaacgggcctgcaaagcccatcaggccgggttggaactgtccctggagaggccactggcgggcccaaggggcccatcttcgggaccaccagatggaggccggagccccacaaagagaagtgtggctgccaccaagaggtgctccaaggtcagagacaaatcgccacaaagaagagtaacaaaacgaacggacagaacacacgcttcgtatacagtatcaccgccg

SEQ ID NO: 70309 - DNA, 1169 bp, Homo Sapiens
gagagagggtgcaggccccacctagggcggaggccacagcagggagaggggcagacagagccaggaccctggaaggaagcaggatggcagccggaacagcagttggagcctgggtgctggtcctcagtctgtggggggcagtagtaggtgctcaaaacatcacagcccggattggcgagccactggtgctgaagtgtaagggggcccccaagaaaccaccccagcggctggaatggaaactgaacacaggccggacagaagcttggaaggtcctgtctccccagggaggaggcccctgggacagtgtggctcgtgtccttcccaacggctccctcttccttccggctgtcgggatccaggatgaggggattttccggtgccaggcaatgaacaggaatggaaaggagaccaagtccaactaccgagtccgtgtctaccagattcctgggaagccagaaattgtagattctgcctctgaactcacggctggtgttcccaataaggtggggacatgtgtgtcagagggaagctaccctgcagggactcttagctggcacttggatgggaagcccctggtgcctaatgagaagggagtatctgtgaaggaacagaccaggagacaccctgagacagggctcttcacactgcagtcggagctaatggtgacccagcccggggaggagatccccgtcccaccttctcctgtagcttcagcccaggccttccccgacaccgggcctttgcggcacagcccccatccagcccccgtgtctgggagcctgtgccttctggaagaagtcccaattggtggtggagccagaaaggtggagcagtagcctccctggtggaaccgtaaccctggacctgtggaagtccctggcccagcccctctccctcaaatccactgggatgaaaggaatggggtggccctttccccctttccccccaggcccgggggctgaatccttccctgaaaataggggccttcaggaccaggggaaccctaacgccttgtgtgggcccccccatttccagccacggggcccccaaggaaaagccctggctgttcagcatttcagcatcattcgaaacaaagcccaagggagggggcccaactggcagggcttttggggggaaaggaataaaggggcttgggaaaacttctaacc

SEQ ID NO: 70310 - DNA, 795 bp, Homo Sapiens
  misc_feature (56)..(56): n is a, c, g, or t
tttcagtgacatccacagattatgcagctatacttgtgaaatcgtgcatgaggccncagggcaccgttctagaacaacgtcacttcacacaggcagctgagaaagttctcttgcttttccagtatcttcctaaggatggagcccaaaattgcagagcagtaactttggaataaaaccagggtgggtataaaacttcttattcttaaatttacatataagatctattaagcttgacacatctgtgtcatcacgcactgaagacaggaagcagttcactgagtcagctggttcccaagctcgcacagaaggtgataagttactatcaaatgccagtgagaatcttcttatagaataacctgggcccaagtgattttagtacaaaacttgcccttctttggtttaattttctatgtgcttttaggtgtgaatccagatatgcggtcttaattcctttggaaatacacagttcgtttagttactgtacactctgtttgttcaataaactgcatatcaacttcccacaaaagctgacttttttgggtctcttacatataaagtaggtcattgagttgatttttttggaggtatctcatattggtcgaattcttctggtatggactcttgccttatatagaggcttctatttctcttaagtcagcatcaatacaacggccggagtttctgtttttgcaataagaagatgttggtattttatgtagggtaaatgtgactggaatacacctttggaacggaattctttatcaataaagtttcacaatccgtccctcttccaaa

SEQ ID NO: 70311 - DNA, 492 bp, Homo Sapiens
aggattgcccctaaaagatgtagaggaaggtcaacaagacatagaggttcataggatcacttgttaactgtctaccagactaggttactggataaaaacgtgcccaggcactctgttaccaggttatctgcatacctaggactcgttctccgaggccccccagctccaaataggcgttctgaaaggcgtctttcagctcctcatccaggggctgctccttgccgtggaggaggatagagctgcaacggtctaggatcctttctggggcgcccttcatcaccaacaggtgttggggctccgatgtgttggggttcttatgaatagacaactgtgaaggattgttgagacataaacattggatggttggatgtgtggcagtccatggtggaaaacaaagcttcacttactatttagtatttgctataaagacccaagatcccttctttctgaactctgaagtatcttacacctgtaacatacttttaatgctac

SEQ ID NO: 70312 - DNA, 1458 bp, Homo Sapiens
  misc_feature (365)..(388): n is a, c, g, or t
  misc_feature (1431)..(1431): n is a, c, g, or t
  misc_feature (1435)..(1435): n is a, c, g, or t
ggaattcccgggatatcgtcgacccacgcgtccgcggacgcgtgggcggggtctggggcgcagagcagcggcgggaggaggcggacacgtggcaacagcggtagcagcccgggcggcggcagcaacagcggcggcggcatcggcccgagccgccggccgccctcccaccctcccgccccgcggcagccctagctccctccacttggctcccctggtcccgctcgctcggccgggagctgctctgtgcttttctctctgattctccagcgacaggacccggcgccgggcactgagcaccgccaccatggggaagggggttggacgtgataagtatgagcctgcagctgtttcagaacaaggtgatnnnnnnnnnnnnnnnnnnnnnnnngacagggacatggatgaactgaagaaagaagtttctatggatgatcataaacttagccttgatgaacttcatcgtaaatatggaacagacttgagccggggattaacatctgctcgtgcagctgagatcctggcgcgagatggtcccaacgccctcactccccctcccactactcctgaatggatcaagttttgtcggcagctctttggggggttctcaatgttactgtggattggagcgattctttgtttcttggcttatagcatccaagctgctacagaagaggaacctcaaaacgataatctgtacctgggtgtggtgctatcagccgttgtaatcataactggttgcttctcctactatcaagaagctaaaagttcaaagatcatggaatccttcaaaaacatggtccctcagcaagcccttgtgattcgaaatggtgagaaaatgagcataaatgcggaggaagttgtggttggggatctggtggaagtaaaaggaggagaccgaattcctgctgacctcagaatcatatctgcaaatggctgcaaggtggataactcctcgctcactggtgaatcagaaccccagactaggtctccagatttcacaaatgaaaaccccctggagacgaggaacattgccttcttttcaaccaattgtgttgaaggcaccgcacgtggtattgttgtctacactggggatcgcactgtgatgggaagaattgccacacttgcttctgggctggaaggaggccagacccccattgctgcagaaattgaacattttatccacatcatcacgggtgtggctgtgttcctgggtgtgtctttcttcatcctttctctcatccttgagtacacctggcttgaggctgtcatcttcctcatcggtatcatcgtagccaatgtgccggaaggtttgctggccactgtcaccgtctgtctgacacttactgcaacgcatggcaaggaaactgctagtgagaactagagctgtgagacttgggtcacgtcacatctgtcgataactggactcgatcngacngagacgtgccatgtgttgacaca

SEQ ID NO: 70313 - DNA, 3038 bp, Homo Sapiens
taagggggaagagtatgaagtcgacggcgcgccgaattcggcacgaggcaagaagctaaaagttcaaagatcatggaatccttcaaaaacatggtccctcagcaagcccttgtgattcgaaatggtgagaaaatgagcataaatgcggaggaagttgtggttggggatctggtggaagtaaaaggaggagaccgaattcctgctgacctcagaatcatatctgcaaatggctgcaaggtggataactcctcgctcactggtgaatcagaaccccagactaggtctccagatttcacaaatgaaaaccccctggagacgaggaacattgccttcttttcaaccaattgtgttgaaggcaccgcacgtggtattgttgtctacactggggatcgcactgtgatgggaagaattgccacacttgcttctgggctggaaggaggccagacccccattgctgcagaaattgaacattttatccacatcatcacgggtgtggctgtgttcctgggtgtgtctttcttcatcctttctctcatccttgagtacacctggcttgaggctgtcatcttcctcatcggtatcatcgtagccaatgtgccggaaggtttgctggccactgtcacggtctgtctgacacttactgccaaacgcatggcaaggaaaaactgcttagtgaagaacttagaagctgtggagaccttggggtccacgtccaccatctgctctgataaaactggaactctgactcagaaccggatgacagtggcccacatgtggtttgacaatcaaatccatgaagctgatacgacagagaatcagagtggtgtctcttttgacaagacttcagctacctggcttgctctgtccagaattgcaggtctttgtaacagggcagtgtttcaggctaaccaggaaaacctacctattcttaagcgggcagttgcaggagatgcctctgagtcagcactcttaaagtgcatagagctgtgctgtggttccgtgaaggagatgagagaaagatacgccaaaatcgtcgagatacccttcaactccaccaacaagtaccagttgtctattcataagaaccccaacacatcggagccccaacacctgttggtgatgaagggcgccccagaaaggatcctagaccgttgcagctctatcctcctccacggcaaggagcagcccctggatgaggagctgaaagacgcctttcagaacgcctatttggagctggggggcctcggagaacgagtcctaggtttctgccacctctttctgccagatgaacagtttcctgaagggttccagtttgacactgacgatgtgaatttccctatcgataatctgtgctttgttgggctcatctccatgattgaccctccacgggcggccgttcctgatgccgtgggcaaatgtcgaagtgctggaattaaggtcatcatggtcacaggagaccatccaatcacagctaaagctattgccaaaggtgtgggcatcatctcagaaggcaatgagaccgtggaagacattgctgcccgcctcaacatcccagtcagccaggtgaaccccagggatgccaaggcctgcgtagtacacggcagtgatctaaaggacatgacctccgagcagctggatgacattttgaagtaccacactgagatagtgtttgccaggacctcccctcagcagaagctcatcattgtggaaggctgccaaagacagggtgctatcgtggctgtgactggtgacggtgtgaatgactctccagctttgaagaaagcagacattggggttgctatggggattgctggctcagatgtgtccaagcaagctgctgacatgattcttctggatgacaactttgcctcaattgtgactggagtagaggaaggtcgtctgatctttgataacttgaagaaatccattgcttataccttaaccagtaacattcccgagatcaccccgttcctgatatttattattgcaaacattccactaccactggggactgtcaccatcctctgcattgacttgggcactgacatggttcctgccatctccctggcttatgagcaggctgagagtgacatcatgaagagacagcccagaaatcccaaaacagacaaacttgtgaatgagcggctgatcagcatggcctatgggcagattggaatgatccaggccctgggaggcttctttacttactttgtgattctggctgagaacggcttcctcccaattcacctgttgggcctccgagtggactgggatgaccgctggatcaacgatgtggaagacagctacgggcagcagtggacctatgagcagaggaaaatcgtggagttcacctgccacacagccttcttcgtcagtatcgtggtggtgcagtgggccgacttggtcatctgtaagaccaggaggaattcggtcttccagcaggggatgaagaacaagatcttgatatttggcctctttgaagagacagccctggctgctttcctttcctactgccctggaatgggtgttgctcttaggatgtatcccctcaaacctacctggtggttctgtgccttcccctactctcttctcatcttcgtatatgacgaagtcagaaaactcatcatcaggcgacgccctggcggctgggtggagaaggaaacctactattagccccccgtcctgcacgccgtggagcatcaggccacacactctgcatccgacacccaccccctctttgtgtacttcagtcttggagtttggaactctaccctggtaggaaagcaccgcagcatgtggggaagcaagacgtcctggaatgaagcatgtagctctatggggggcaggggggaggctgcctgaaaaccatccatctgtggaaatgacagcggggaaggtttttatgtgcctttttgtttttgtaaaaaaggaacacccggaaagactgaaagaatacattttatatctggatttttacaaataaagatggctattataatggaaaaaaaaacaagactgagacacacaacaaaaagggg

SEQ ID NO: 70314 - DNA, 877 bp, Homo Sapiens
gtttcaagctttgcatgatgggagagcgtcctctcctctatcagctgcgtgtgttctggataggacagtagcccggagatggaaaccaccttcagtaccattagcccaccataccaagtaacaagttaggcaggaatcgtgggaatttattgagtcagctttgagtgtttgagagaatgtaaacaagattggctcgaattgtaaacgtttgtactttggatgagttcatggttctttaggtcaccttaataccagctatctttggtagaagctacagcattcagtttctctggaaactgtatcacatttttgcattttaaaaattttacagtatcaaaaaaccaaaatctgcttatgaaacaaaacatgaagcaggacatatttggattctatttatttaaaattaaattctttgcaaaattgaacttctcaactaaaacgtgtccatgtcagaattttaactgttagcaggtagtttgtggcaaagatggctaaataatgaagcaaattagaatctgtgtgtatactaatgagctgctttttttctgttgagactatcattatttgtcttattacccaagaggcaattacctgaatttggatgtctgaattataacttatgcaggaatagttctgtaaatacatttaaataaactgtaaagatatttaataaatatagtatttatactaatctgtgtgcttcttttggtttgaatagtaactaaatgagacaccagcccttgacattgagtttgttggtcactatcaggtcctcatttccaagcctcctagtcattctagcactgattatatgctgctactttaactggctccagctgcttcactacatcagtttagcttcctcagaaattcatca

SEQ ID NO: 70315 - DNA, 2998 bp, Homo Sapiens
  misc_feature (1953)..(1967): n is a, c, g, or t
  misc_feature (2163)..(2164): n is a, c, g, or t
agggcgagtagagcgcggtgaagtcggcaccgaggctggtttccggcctgagaaaccgtcatgtttctggggagtcacctcagctggcagttaccaccgtgttagaaagcagcctcaggaccggccacctccatcactggcgtcaccatgggggctgtgctgggtgtcttctccctcgccagctgggttccatgcctctgcagcggtgcctcatgtttgctgtgtagttgctgtcctaacagtaagaattccacggtgactcgcctcatttatgctttcattctcctcctgagcactgtcgtatcctatatcatgcagagaaaagagatggaaacttacttgaagaagattcctggattttgtgaagggggatttaaaatccatgaggctgatataaatgcagataaagattgtgatgtgctggttggttataaagctgtgtatcggatcagctttgccatggccatctttttctttgtcttttctctgctcatgttcaaagtaaaaacaagtaaagatctccgagcggcagtacacaatgggttttggttcttcaaaattgctgcccttattggaatcatggttggctctttctacatccctgggggctatttcagctcagtctggtttgttgttggcatgataggggccgccctcttcatcctcattcagctggtgctgctggtagattttgctcattcttggaatgaatcatgggtaaatcgaatggaagaaggaaacccaaggttgtggtatgctgctttactgtctttcacaagcgccttttatatcctgtcaatcatctgtgtcgggctgctctatacatattacaccaaaccagatggctgcacagaaaacaagttcttcatcagtattaacctgatcctttgcgttgtggcttctattatatcgatccacccaaaaattcaggaacaccagcctcgctccggcctcttgcagtcctccctcatcaccctctacactatgtacctcacctggtcagccatgtccaatgaacctgatcgttcctgcaatcccaacctgatgagctttattacacgcataactgcaccaaccctggctcctggaaattcaactgctgtggtccctacccctactccaccatcaaagagtgggtctttactggattcagataattttattggactgtttgtctttgttctctgcctcttgtattctagcatccgcacttccactaatagccaagtagacaagctgaccctgtcagggagtgacagcgtcatccttggtgatacaactaccagtggtgccagtgatgaagaagatggacagcctcggcgggctgtggacaacgagaaagagggagtgcagtatagctactccttattccacctcatgctctgcttggcttccttgtacatcatgatgaccctgaccagctggtacagccctgatgcaaagtttcagagcatgaccagcaagtggccagctgtgtgggtcaagatcagctccagctgggtctgcctcctgctttacgtctggacccttgtggctccacttgtcctcaccagtcgggacttcagctgaacctctgagtgccaaggacaccactggaactcacaaaggtctccttcaccgaaaacccatataccttttaagtttgtttcaactaaaatattaagtgaatgctttgcaagtttgactgtatgcaggtttatatcagaaggtgagattgaataatgcttgatgcagaatcgaaacttctcatttatctgtatattatgtttacttctaaggatatagcacaaagggaacattttttgtttaaagtgaactacagctgtgctgtgaagagagttctttataaagcctgtaggttcttttaactttggtttaaaatgtaagataggaaaatgttggatatttgaggccatgcttaatatatttatattgcagtatcctttaaaagcnnnnnnnnnnnnnnntgcatttatattacagttttcctctatgaaagtccttacttatatgatacaagcactgtgttttgtgcttaaactcttcagcggggtagcatcaaagttcttggggaaggatcgtatatgtgggtcccttccctagaagaatggttgctgatatggctactgcttctacatcttgagttttaatttactttttttnnacactgtagcattgagactgcttgattcaagtctggtgctttgccagatgtattaatttccataaatgctttgtgagtttggttaaaatgaagattcacttgggaaaacactgcagctttagtctgtgttactatcttgttatgagtatgtaaaagtaaaatgcatgtgaatttatcatatttgcactatgaaggtatttggttaaaatacaaagacttttaagattttaaggccctttcttccaacagcttttatagttagcagccattctttattttctggatagccaggttttatcacgcttctagtcaggatgctcctattccttctaaaaattacggtctgactagtgagcaaagtcttgaatttattcaaaagtcctaaataccttctctaggtaagacacttggtagatgagagacggaaggcattgtcaagaaccattttcatgagaggtggtgtgcaaaaaggtagaataaaagagttctttcaacaaagatttactgtgctattctgtactagacccctgtaggtttttggggtacagggttaaacatgatagaggctctgcccgtcttggactttaatagcttagagaagagagcaaatgagctgacagggggttataatgggaattacgggctgcgggtttagggaattggagaaaacccccaagggagaggaattccgggggtaacggtaacggctttcctgggacaaaatggagattttagacccacgaaactctctaaaaagtaaccccacaaagaagggaggggaaacaagggggaccgaccgtggccggggcacccaaataaaacccgggctggtgc

SEQ ID NO: 70316 - DNA, 1141 bp, Homo Sapiens
  misc_feature (637)..(663): n is a, c, g, or t
  misc_feature (667)..(707): n is a, c, g, or t
aggtgcaagccggccactgttccgctgcgtcactgaccgcctggccatccagtttggcaactacaaaaagtagagcaagctgcagccaccgcggggcctcagtgggggtctctggggaacacagccagacatcctgatggggaggcagagccaggaagctaagccagggcccagctgcgtccaacccagccccccacctcaggtccctgaccccagctcgatgccccatcaccgcctctccctggctcccaagggtgcaggtgggcgcaaggcccggcccccatcacatgttcccttggcctcagagctgcccctgctctcccaccacagccacccagaggcaccccatgaagcttttttctcgttcactcccaaacccaagtgtccaaggctccagtcctaggagaacagtccctgggtcagcagccaggaggcggtccataagaatggggacagtgggctctgccagggctgccgcacctgtccagacacacatgttctgttcctcctcctcatgcatttccagcctttcaaccctccccgactctgcggctcccctcagcccccttgcaagttcatggcctgtccctccaagacccctgctccactggcccttcgaccagtcctcccttctgtnnnnnnnnnnnnnnnnnnnnnnnnnnnttcnnnnnnnnnnnnnnnnnnnnnnnnnnnnnnnnnnnnnnnnncttgtgcttcctcagacctttctcgcttctgagcttggtggcctgttccctccatctctccgaacctggcttcgcctgtccctttcactccacaccctctggccttctgccttgagctgggactgctttctgtctgtccggcctgcacccagcccctgcccacaaaaccccagggacagcggtctccccagcctgccctgctcaggccttgcccccaaacctgtactgtcccggaggaggttgggaggtggaggcccagcatcccgcgcagatgacaccatcaaccgccagagtcccagacaccggttttcctagaagcccctcacccccactggcccactggtggctaggtctccccttatccttctggtccagcgcaaggaggggctgcttctgaggtcggtggctgtctttccattaaagaaacaccgtgc

SEQ ID NO: 70317 - DNA, 1098 bp, Homo Sapiens
  misc_feature (110)..(139): n is a, c, g, or t
  misc_feature (143)..(187): n is a, c, g, or t
  misc_feature (628)..(682): n is a, c, g, or t
tgcggctcccctcagcccccttgcaagttcatggcctgtccctccaagacccctgctccactggcccttcgaccagtcctcccttttgttctctctttccccgtccttcnnnnnnnnnnnnnnnnnnnnnnnnnnnnnnttcnnnnnnnnnnnnnnnnnnnnnnnnnnnnnnnnnnnnnnnnnnnnncttgtgcttcctcagacctttctcgcttctgagcttggtggcctgttccctccatctctccgaacctggcttcgcctgtccctttcactccacaccctctggccttctgccttgagctgggactgctttctgtctgtccggcctgcacccagcccctgcccacaaaaccccagggacagcggtctccccagcctgccctgctcaggccttgcccccaaacctgtactgtcccggaggaggttgggaggtggaggcccagcatcccgcgcagatgacaccatcaaccgccagagtcccagacaccggttttcctagaagcccctcacccccactggcccactggtggctaggtctccccttatccttctggtccagcgcaaggaggggctgcttctgaggtcggtggctgtctttccattaaagaaacaccgtgcaacgtgnnnnnnnnnnnnnnnnnnnnnnnnnnnnnnnnnnnnnnnnnnnnnnnnnnnnnnnggggggcccaaatcccctgaggggccccaatttaagcgtcacccagtttttttgaaaaaaggggccccccatagaggagctgctttataaacagcacacagaccggccccgcgctttaaaaaacaggcgctctaattgggaaagaacctgcgtacctgcaggtcgaactcttgtggagaaggaaccccccacaacctccggggggggacacaataatggtgggcaccaaccacccatcaggagaaattaaaagcccccggggcaaattaacaacttggaggtgtctaatggtggtgtcacccaacggcgcaattcttgcggcgtgaaacaacttcgcaccagagctatatgattgtacgagcacatttttctcgcgggacattcattgtaatacgagcactatcatcatactagct

SEQ ID NO: 70318 - DNA, 417 bp, Homo Sapiens
cttgtgcttcctcagacctttctcgcttctgagcttggtggcctgttccctccatctctccgaaccaggcttcgcctgtccctttcactccacaccctctggccttctgccttgagctgggactgctttctgtctgtccggcctgcacccagcccctgcccacaaaaccccagggacagcggtctccccagcctgccctgctcaggccttgcccccaaacctgtactgtcccggaggaggttgggaggtggaggcccagcatcccgcgcagatgacaccggttttcctagaagcccctcacccccactggcccactggtggctaggtctccccttatccttctggtccagcgcaaggaggggctgcttctgaggtcggtggctgtctttccattaaagaaacaccgtgcaacgtgaa

SEQ ID NO: 70319 - DNA, 920 bp, Homo Sapiens
  misc_feature (409)..(438): n is a, c, g, or t
  misc_feature (442)..(486): n is a, c, g, or t
ttgggcgctaagggcccggcgccccatcacaatgtttcccttggccttcagaagctgccccctgctcttccctccacaagccacccagagccaaccccatgaagctttttttctcgttcactccctaacccaagtgtccaagtctccagtcctaggagaacagtccctgggtcagcagccaggaggcggtccataagaatggggacagtgggctctgccagggctgccgcacctgtccagacacacatgttctgttcctcctcctcatgcatttccagcctttcaaccctccccgactctgcggctcccctcagcccccttgcaagttcatggcctgtccctccaagacccctgctccactggcccttcgaccagtcctcccttctgttctctctttccccgtccttcnnnnnnnnnnnnnnnnnnnnnnnnnnnnnnttcnnnnnnnnnnnnnnnnnnnnnnnnnnnnnnnnnnnnnnnnnnnnncttgtgcttcctcagacctttctcgcttctgagcttggtggcctgttccctccatctctccgaacctggcttcgcctgtccctttcactccacaccctctggccttctgccttgagctgggactgctttctgtctgtccggcctgcacccagcccctgcccacaaaaccccagggacagcggtctccccagcctgccctgctcaggccttgcccccaaacctgtactgtcccggaggaggttgggaggtggaggcccagcatcccgcgcagatgacaccatcaaccgccagagtcccagacaccggttttcctagaagcccctcacccccactggcccactggtggctaggtctccccttatccttctggtccagcgcaaggaggggctgcttctgaggtcggtggctgtctttccattaaagaaacaccgtgc

SEQ ID NO: 70320 - DNA, 280 bp, Homo Sapiens
tattagaggatcttgggaggcaggacactgtgggcagtggataggggtcttggagggacaggcatgaacttgcaagggggctgaggggagccgcagagtcggggagggttgaaaggctggaaatgcatgaggaggaggaacagaacatgtgtgtctggacagtgtgcggcagcccatggcagagcccactgtccccattcttatggaccgcctcctggctgctgacccagggactgttctcctaggactggagccttggaacacttggcctccggcgagt

SEQ ID NO: 70321 - DNA, 1789 bp, Homo Sapiens
  misc_feature (64)..(98): n is a, c, g, or t
atgggcgctagctccgtcgagcgaacgacgagcgcagcgaagtagtgagcgaggaagcggccgnnnnnnnnnnnnnnnnnnnnnnnnnnnnnnnnnnncagtcgacggtaccggacatatgcccgggaattcggccattacggccgggggtcgcaggcggcgagggcgcgagtgaggagcagacccaggcatcgcgcgccgagaaggccgggcgtccccacactgaaggtccggaaaggcgacttccgggggctttggcacctggcggaccctcccggagcgtcggcacctgaacgcgaggcgctccattgcgcgtgcgcgttgaggggcttcccgcacctgatcgcgagaccccaacggctggtggcgtcgcctgcgcgtctcggctgagctggccatggcgcagctgtgcgggctgaggcggagccgggcgtttctcgccctgctgggatcgctgctcctctctggggtcctggcggccgaccgagaacgcagcatccacgacttctgcctggtgtcgaaggtggtgggcagatgccgggcctccatgcctaggtggtggtacaatgtcactgacggatcctgccagctgtttgtgtatgggggctgtgacggaaacagcaataattacctgaccaaggaggagtgcctcaagaaatgtgccactgtcacagagaatgccacgggtgacctggccaccagcaggaatgcagcggattcctctgtcccaagtgctcccagaaggcaggattctgaagaccactccagcgatatgttcaactatgaagaatactgcaccgccaacgcagtcactgggccttgccgtgcatccttcccacgctggtactttgacgtggagaggaactcctgcaataacttcatctatggaggctgccggggcaataagaacagctaccgctctgaggaggcctgcatgctccgctgcttccgccagcaggagaatcctcccctgccccttggctcaaaggtggtggttctggcggggctgttcgtgatggtgttgatcctcttcctgggagcctccatggtctacctgatccgggtggcacggaggaaccaggagcgtgccctgcgcaccgtctggagctccggagatgacaaggagcagctggtgaagaacacatatgtcctgtgaccgccctgtcgccaagaggactggggaagggaggggagactatgtgtgagctttttttaaatagagggattgactcggatttgagtgatcattagggctgaggtctgtttctctgggaggtaggacggctgcttcctggtctggcagggatgggtttgctttggaaatcctctaggaggctcctcctcgcatggcctgcagtctggcagcagccccgagttgtttcctcgctgatcgatttctttcctccaggtagagttttctttgcttatgttgaattccattgcctcttttctcatcacagaagtgatgttggaatcgtttcttttgtttgtctgatttatggtttttttaagtataaacaaaagttttttattagcattctgaaagaaggaaagtaaaatgtacaagtttaataaaaaggggccttcccctttagaataaatttcagcatgtgctttctttatgggagtcctaatttcaaccctaccaaaatgatcacaagacactatctgaggtgtcccattctagaaatagacccctcaacatagcgtctttcagatctttttgaatgaatccacaagatgaaataaatgtccgattactgagtggccgtgaactttggccagacct

SEQ ID NO: 70322 - DNA, 889 bp, Homo Sapiens
ctggcgactccgcgcgttgggaggtgtagcgcggctctgaacgcgctgagggccgttgagtgtcgcaggcggcgagggcgcgagtgaggagcagacccaggcatcgcgcgccgagaaggccgggcgtccccacactgaaggtccggaaaggcgacttccgggggctttggcacctggcggaccctcccggagcgtcggcacctgaacgcgaggcgctccattgcgcgtgcgcgttgaggggcttcccgcacctgatcgcgagaccccaacggctggtggcgtcgcctgcgcgtctcggctgagctggccatggcgcagctgtgcgggctgaggcggagccgggcgtttctcgccctgctgggatcgctgctcctctctggggtcctggcggccgaccgagaacgcagcatccacgacttctgcctggtgtcgaaggtggtgggcagatgccgggcctccatgcctaggtggtggtacaatgtcactgacggatcctgccagctgtttgtgtatgggggctgtgacggaaacagcaataattacctgaccaaggaggagtgcctcaagaaatgtgccactgtcacagagaatgccacgggtgacctggccaccagcaggaatgcagcggattcctctgtcccaagtgctcccagaaggcaggattctgaagaccactccagcgatatgttcaactatgaagaatactgcaccgccaacgcagtcactgggccttgccgtgcatcccttcccacgctgggaactttgacgtgggaaaaggaactcctgcaataacttcatctatggaagctgccccgggcaataagaaacagttacccgctctgaaggaagcctggcatgctccccctgctttccgcccgccagaaaaatc

SEQ ID NO: 70323 - DNA, 1100 bp, Homo Sapiens
  misc_feature (912)..(912): n is a, c, g, or t
  misc_feature (957)..(957): n is a, c, g, or t
caccttcgggagccgcttccaataggcgttcgccattggctctggcgacctccgcgcgttgggaggtgtagcgcggctctgaacgcgctgagggccgttgagtgtcgcaggcggcgagggcgcgagtgaggagcagacccaggcatcgcgcgccgagaaggccgggcgtccccacactgaaggtccggaaaggcgacttccgggggctttggcacctggcggaccctcccggagcgtcggcacctgaacgcgaggcgctccattgcgcgtgcgcgttgaggggcttcccgcacctgatcgcgagaccccaacggctggtggcgtcgcctgcgcgtctcggctgagctggccatggcgcagctgtgcgggctgaggcggagccgggcgtttctcgccctgctgggatcgctgctcctctctggggtcctggcggccgaccgagaacgcagcatccacgacttctgcctggtgtcgaaggtggtgggcagatgccgggcctccatgcctaggtggtggtacaatgtcactgacggatcctgccagctgtttgtgtatgggggctgtgacggaaacagcaataattacctgaccaaggaggagtgcctcaagaaatgtgccactgtcacagagaatgccacgggtgacctggccaccagcaggaatgcagcggattcctctgtcccaagtgctcccagaaggcaggattctgaagaccactccagcgatatgttcaactatgaagaatactgcaccgccaacgcagtcactggggccttgccgtgcatccttcccacgctggtactttgacgtggagaggaactcctgcaataacttcatctatggaaggctgcccggggcaataaagaacagctaccggctctgaggaagcctgcatgcctccgctgcctccgnccagcaaggagaattctccccctgccccttggttccaaaggtggnggggttctggggggggctgttcccggaaggggggtttgatccccctttcctggggagccctccatgggcctaccccgaaaccggggggggccacgggagggaacccaggaaaggggggccttggcggcaccggtttgggaagc

SEQ ID NO: 70324 - DNA, 918 bp, Homo Sapiens
  misc_feature (762)..(762): n is a, c, g, or t
  misc_feature (764)..(764): n is a, c, g, or t
ccaagaataaagtcgtttattattttcagagcggcgggagtagggctggggaccctagggccgctccagtgggacttccctgaacccggttgtagaggatgatggcgcctttggccgaggggcagagttcagcccacatctccgtctcgggcaatctccgcacgttctgtggggagacaacgagacccaggcattcaagcttgccacttctcctgccagggctgtgcccagaattcctgagcctcagagacctctgcactgtccttagggaggcatgttaaggggctgaacatgtccctggacctttcccttgcactgagggcaaatcttgtgactctggagggaattgtgacccagccaacacctcccctacaagatatgcattgccaggcctctgcaggccccagccctggcctccaagcaagatggtttgtcactctgcacctgtgtctccacaaagaagattcctgtagactcgtgggcctcgggtcccccactcaggtagtgcttcctcacctgctcagaagtcaggctgcacctggacaagaaacaagggtggcttagtgggtgaccacccctgcggggtacctgtggagccacagctgcctcagcccactcctcaccacccaccttcccaagacccaggatcatgtacccgagcctactcactggacatagaactcggcactggctcggccagcactggtctcatttcgcgatgcccaacagcaggggctggctcagggtgagcagcggcaggtntnctgcggtggagggtggggtggggggaggtcccacctatcaatgccactgcccacatccctgcccgtctcaatgaaaaaccgcctgttacctgtgtacagcattttatagcttgtagatcaaggacccagcattacagaatgtcagatgaaaaaa

SEQ ID NO: 70325 - DNA, 1086 bp, Homo Sapiens
gggatccgctggaggctggagcttccgggccctggaaaggggtccccgcgcgccccgggtcggaggcagacccctgggtttgggggacatgggcatttggggcgcctgaacccaagacctctggatgagctgccccgttcagaccatggatcctgaggtgaccttgctgctgcagtgccctggcgggggcctgccccaggagcagatacaggccgagctgagccccgcccatgaccgtcgcccactgccaggtggggacgaggccatcactgccatctgggagacccggctaaaggcccaaccctggctcttcgacgcccccaagttccgcctgcactcagccaccctggcgcctattggctctcgggggccacagctgctcctgcgcctgggccttacttcctaccgagacttcctgggcaccaactggtccagctcagctgcctggctgcgacagcagggtgccaccgactggggtgacacgcaggcctatctggcggacccactgggggtgggcgctgcactagccacagccgatgacttccttgtcttcctgcgccgctcccggcaggtggctgaggcccctgggctggtggacgtacctggtgggcaccctgagcctcaggccctgtgccctggtggcagcccccagcaccaggacctcgctgggcagctggtggtacatgaactcttttccagtgtccttcaggagatctgtgatgaggtgaacctgccgctgctcaccctgagccagcccctgctgttgggcatcgcccgaaatgagaccagtgctggccgagccagtgccgagttctatgtccagtgcagcctgacttctgagcaggtgaggaagcactacctgagtgggggacccgaggcccacgagtctacaggaatcttctttgtggagacacagaacgtgcggagattgcccgagacggagatgtgggctgaactctgcccctcggccaaaggcgccatcatcctctacaaccgggttcagggaagtcccactggagcggccctagggtccccagccctactcccgccgctctgaaaataataaacgactttattcttggaaaa

SEQ ID NO: 70326 - DNA, 1025 bp, Homo Sapiens
  misc_feature (13)..(13): n is a, c, g, or t
  misc_feature (47)..(125): n is a, c, g, or t
  misc_feature (531)..(533): n is a, c, g, or t
gcttgctgcgtcnccgaccccttacccgaagcggcgcgccccacacnnnnnnnnnnnnnnnnnnnnnnnnnnnnnnnnnnnnnnnnnnnnnnnnnnnnnnnnnnnnnnnnnnnnnnnnnnnnnnncctcagaggatccagaactgcagccagtccttgctgggctgttcctgtccatgtgcctggtcacggtgctggggaacctgctcatcatcctggccatcagccctgactcccacctccacacccccatgtacttcttcctctccaacctgtccttgcctgacatcggtttcacctccaccacggtccccaagatgattgtggacatccagtctcacagcagagtcatctcctatgcaggctgcctgactcagatgtctctctttgccatttttggaggcatggaagagagacatgctcctgagtgtgatggcctatgaccggtttgtagccatctgtcaccctctatatcattcagccatcatgaacccgtgtttctgtggctttctagttttgttgtcttgttgtnnnctcagtcttttagactcccagctgcacaacttgattgccttacaaatgacctgcttcaaggatgtggaaattcctaatttcttctgtgacccttctcaactcccccaccatgcctgttgtgacaccttcaccaataacataatcatgtatttccctgctgccatatttggttttcttcccacctcggggacccttttctcttactataaaattgtttcctccattctgagggtttcatcatcaggtgggaactataaagccctcaccacctgtgggtctcacctgtcagttgtttgctgattttatggaacaggcgttggagggtacctcagttcagatgtgtcatcttcccccagaaagcgtgcagtggcctcagtgatgtacacggtggtcacccccatgctgaaccccttcatctacagcctgagaaacagggatatgaaaagtgtcctgcggcggccgcacagcagcgcagtctaatctcaatatctt

SEQ ID NO: 70327 - DNA, 878 bp, Homo Sapiens
atatgcctgtttctcaggctgtagatgaaggggttcagcatggggtgatcaccgtgtacatcactgaggccactgcagcctttctcggggaagatgacacatctgaactgaagtatcctccaatgcccgttccgtaaaatcagcaaacaactgacaggtgagacccacaggtggagaaggccttatactgcccacgtgatgatgaaacactcagaatggaggaaacaattttatagtaagagaaaagggtcccagagatgggaagaaaaccaaatatgacagcagggaaatacatgattatgttattggtgaaggtgtcacaacatgcaagatgggggagttgagaagggtcacagaagaaattaggaatttccgcatcctggaagcaggtcatttgtaaggcaatcaagttgtgcagctgggcgtctaaaacacttaggaccctcctggaggactgtgggtataggtgtccaagaagaaagctcaaatctgccgacggctggtaccttacttgggatttactatccgacaggtgtcagaacgcagcccgggaacagaaagtaagcaggtcatttacaatctaccagagcctggaggacagtgggtattaggtgtccaagaagaaagctcaaatctgccgacggcgggtaccttacttgggattgactggaggactgtgggtattaggtgtccaggcagaaagctcaaatctgccgacggcaggtaccttacttgggatttactatcggacggggtccgacgcctccttgggatttccgatccgacaggggtccgaagccacccgggaacagaaagaaaggatgttatttgcaatctaccagagcctaagggccaaaggcaggcgagagaattctcag

SEQ ID NO: 70328 - DNA, 2530 bp, Homo Sapiens
  misc_feature (1820)..(1820): n is a, c, g, or t
ggcctgggaggcgaattcggcacgaggcagggctccaccaggccctgcagggctcagtggtggggagtcgctgctggtgaaacagatcgaggagcagataaagaggaacgcggcaggcaaagatggcaaagagcgcttgggcggctcagtgctggggcagatccccttcctgcagaactgcgaggacgaagacagcgacgaggacgatgagctggacagcgtgcagcacaagaagcagcgtgtgaagctcccatccaaggctctggtgcccgaaatggaagacgaggatgaggaagacgactctgaggatgctatcaatgagtttgatttcctgggctcaggagaggatggggaaggggctccagaccctcggcggtgcactgtggatgggagcccccatgagctggaaagccgtcgggtcaaactccaaggcattctggctgacctgcgggatgtggatgggctgcccccaaaagtgactggcccgcctcctggcacaccccagccccggccacatgaagacgtcttcatcatggacactatcgggggcggggaggtgagcctgggggacttggcagatctcaccgtcaccaacgacaacgacctcagctgcgatctgtctgacagcaaagatgcttttaagaagacgtggaaccccaagttcaccctgcgctcgcactacgacggcattcgttccctggccttccaccacagccagtcggctctgctcaccgcctccgaggacggcacgctcaagctctggaacctgcagaaggcggtcacggccaagaagaatgcggcgctagatgtggaacctatacatgctttccgggctcacagggggcccagtgttggctgtggctatgggcagcaacagtgaatactgctacagtggcggggcagatgcctgcatccatagttggaagattccagacctcagcatggatccctatgatggctacgacccaagcgtgctgagccacgtcctggagggccacggggacgccgtgtggggcctggccttcagtcccacctcccagcgcctggcctcctgttctgctgatggcaccgtccgcatctgggaccccagcagcagcagcccggcctgcctctgcaccttccccacagccagcgagcacggggtccccacctcagtggccttcaccagcaccgagcctgcccacatcgtggcctccttccgctctggcgacaccgtcttgtatgacatggaggttggcagtgccctcctcacgctggagtcccggggcagcagcggtccaacccagatcaaccaagtggtgagtcatccaaaccagcctctcaccatcaccagccacgacgacaggggcatccgcttcctggacaatcggacaggtaagccggtgcactccatggttgcacacctggacgcagtcacctgcctagccgtggaccccaacggcgcattcctgatgtcaggaagccatgactgctccctgcgtctctggagcctggacaacaaaacgtgcgtgcaggagatcacggcccaccgcaagaagcacgaggaggccatccacgctgttgcctgccaccccagcaaggccctcattgccagtgctggcgctgatgccctggccaaggtcttcgtatgatgcccacctggccctgccctggccgccacgctggctggggtgtagggccgggcaggtggggctgaggggactcccagcctcgctggaggtgcagaggcctggcctctgtctgtttgccgtggagcctggtggtgctaacggccctttccccaggaatccctccccaacggctgccttccccaagcatcncagcctggggatgggcccctttcaggaatcacccccgaggatggcctcggggtttccccctgtgccctgacagccgctcctggtatcagagctgctttccagagggcagcacagccagggccgggtgtctttagggatcagtttttccaagactccagaaggtgccaggttctccccttgagctcctgctcccccatcccccatcctcccagacctgggcaggagctgtgctgggagaaagggtggcagccgggagcctcagagctgagccccggcctggctgcccctcccctccggccctctccactgctttccagacactaaccaaggcttccaggccagggattgcccaacactcctagggcagccctcccagcgccccatggggtcgcccatgggtagagacggctttcttgtgcccctccctggggcatggagggtggagtgggcctcgggtccccctgaactccctgtatatctgtataaataacgggattttcatggcgccgccccacccgcattatcactgtgtgatggtctcagtcagtctcctccctgtctccactctttccctctatttatttcactctcttgtttggttctaccctgcaccctcggtccccttccaggttcctgtttataagccccaacccctctgtccccatcttgtatgtgaaaacttgtctcaataaaccctttggagtaaaaaa

SEQ ID NO: 70329 - DNA, 800 bp, Homo Sapiens
  misc_feature (155)..(170): n is a, c, g, or t
  misc_feature (172)..(179): n is a, c, g, or t
  misc_feature (183)..(227): n is a, c, g, or t
atggggtggggaatcccaaagcccttattctctgggcccggggttttccttgggaaaacaagtatggcccccgtttccctttccctttgggggcccggcggccaaagaaaaggttaaaaaagtttttgaggggcggagggggcccccaattttcnnnnnnnnnnnnnnnntnnnnnnnngggnnnnnnnnnnnnnnnnnnnnnnnnnnnnnnnnnnnnnnnnnnnnntcatttcaattttttattaaaatacttttttgttaatagggacaaccaaagaaaaatacacaattttatatgttgtagatcatataaaatacaataaacataaactcttgggaatgcagaatagatttcaaaatcttaaaagaagctttcataaaaataaactttagaaatgtggcttatatttactgcattttttcagaaaactttcttttctccattttaatgctaccctgattataaataacggtccaaatttctaacatcttatcaattttgctttctggaattttagaaatcacatgtctaaatgaagacctcttttttataccaccctacataaacacagaatagattttatttaaattaccatttgatttggcaccactattgtaaatacaattttagtaataattaaatgttatgggggaaaaactaacagaaaaacctgctaacaagcacaagtcttactataagaaaggatcttttatatatggcttttatgatacccactgatttaaaacctagtgctttaaaaatctggttataaaaaaagtaataacctaattttttatt

SEQ ID NO: 70330 - DNA, 735 bp, Homo Sapiens
taagtgtcgtttgaggtatcgactgtgatccttcccccaccctccattctccagcggttggccggtgttagaactcgctctctttgagtgactggctacaagggcctgagaggtggccagccagggttggagctggaggggatggagccccacctgaggtgccgtgtcacacgggttagagggtcactgggaaacaccgggcggtggcttctgtgatttattttcttgatggtaacttctcagagcagggcgattgggacatcaccagccagagcacaggaagccaccctgcctgctggggaggagggacccacacaagccccctcggcagtttgtccccccagcttcggtatgccttcagggaaaggtcacagctggggaggaagcggggggacgcctgtcacccctggcaggtggtgagttcaggtgggggctccctgctgcccccaggcctgggagcttgaagccctcccggcatctggcatccgagcctcccgccctccagggtgcgcttccctctcttgccgcagcatacacgagggcaggcagtggccttgtcactgtatcttgcatcagagacaaaggaggacccgctttagccctgctgcgggaaatgggggagggcccagggccagcgcattgtgcactggtttactttaaaatgtacagattcttctcgttaaattcttgatagattttttattattattaaaagtcagtttataatacaaagaa

SEQ ID NO: 70331 - DNA, 1953 bp, Homo Sapiens
  misc_feature (1285)..(1350): n is a, c, g, or t
  misc_feature (1356)..(1392): n is a, c, g, or t
cagtcgacggtgccggacatatgcccgggaattcggccattacggccggggcctttggtccgctgcaggcccgcagcccgagtgtcgccgccatggcttcgccgcagctctgccgcgcgctggtgtcggcgcaatgggtggcggaggcgctgcgggccccgcgcgctgggcagcctctgcagctgctggacgcctcctggtacctgccgaagctggggcgcgacgcgcgacgcgagttcgaggagcgccacatcccgggcgccgctttcttcgacatcgaccagtgcagcgaccgcacctcgccctacgaccacatgctgcccggggccgagcatttcgcggagtacgcaggccgcctgggcgtgggcgcggccacccacgtcgtgatctacgacgccagcgaccagggcctctactccgccccgcgcgtctggtggatgttccgcgccttcggccaccacgccgtgtcactgcttgatggcggcctccgccactggctgcgccagaacctcccgctcagctccggcaagagccaacctgctcccgccgagttccgcgctcagctcgaccccgccttcatcaagacctacgaggacatcaaggagaacctggaatcccggcgcttccaggtggtggactcccgagccactggcaggttccgcggcaccgagcccgagccccgagacggcattgaacctggccacatcccaggtaccgtgaacatccccttcacagacttcctgagccaggaggggctggagaagagccctgaggagatccgccatctgttccaggagaagaaagtggacctgtctaagccactggtggccacgtgtggctctggcgtcacagcctgccacgtggcactaggggcctacctctgcggcaagccagacgtgcccatctacgatggctcctgggtggagtggtacatgcgcgcccggcccgaggatgtcatctcagagggccgggggaagacccactgaagctgggcaggacacaggcgagctcaggtgatgccggccaccagcaatgcctggcctggtagctccgcttctgctttcaccaagagagtgtttcttcactcaactcaggtggcatttggggtgacatctcaaaggccaggaattccgttgacttgttggctgccagtaggggcgggaggaaaggcggaggcgagccctggaggagggaggccacaactccgagctgcccacctggtgctgagctggggccccgcctcctttctgttttatttttgaggaaataaaataaccaagtgctnnnnnnnnnnnnnnnnnnnnnnnnnnnnnnnnnnnnnnnnnnnnnnnnnnnnnnnnnnnnnnnnnncaacannnnnnnnnnnnnnnnnnnnnnnnnnnnnnnnnnnnnggggggggcccgagcccatacatctctctctcccacggggggggcgcccactattacgcccccccagctgcatgttgcgcaccaggcggcacccacacagagatgggccgtgattttatgcggagcaggagggaccgaaggcatcagctccacaactacacagatcagtcgtagcgcggaagacaaaagctcgcacgtcgcgggtgcgttctgattgtgttgtcggagagagcgacacccccctctagcgtcgttgagtggagcggcaacataatggtggaggaacaccaccgcccgcagcgaagagagtcaaattttgccgccctcgcccagggagaagtcgaaaatataaccacaccgccgatgggccaggtagtaggatggcagcagggcgccgcccacaccccccaccggccatccttattgccacgccgcgcggcgcaatagcaacaccttggtcgctgcgacgcggcagatctgacatttcctgcctcgtacgtaacaaatatataaccccgcggggcgctagatatcgaatgataaaaaggacatgagggtcat

SEQ ID NO: 70332 - DNA, 882 bp, Homo Sapiens
gttgctatcaagaccaaactatgaccggttttttattccagatgtctccagagtgaagatgccgaggatgaacttgcattgaacattccagatgtgtgagatcatgtgtattacagtgggcaggtatttgcttttgcttgcactgaaaattaaattgctatcaagaataaaccatgaaacattttatcctgaacagccacagtgcctgaattcactcaagtggataaaaagtgtattttaactctgtatatattacccttaagtcattttcctgtcttcactaatttagcaatgcattcatattagctgatgaaaataggcactcacaatgacaaccagagccagtttcttgtcttttttatacattttgtcatcccagagacaatcagtatgtgcttacctgtgttcaagtagagaaaaatacagtagagtctgataggacatattcttgtaccacagacaaaacaaatcttatgttgcatttactatcaactgctgctaatacgttattataaaacttacctagctcctgaattcttcctatcttatagcttaaaaaaattaggatcataggcaaatcagttaccttgcagaaagagctttgtatgacagacattgtcttattttatttctgtaaaatattagctgtatgaatatgatttaattaacaagaaaacatttcttcctgattgacaacagtgttagacaaggtgcaaagcgaaactggttgctcaagttgatagaaaacaaaattctgaatatcttcaaattaaattcggtaaaaacacattattttttcatatgtgatgtattcatgcagaacaactatctttgtattttgtttttaaaatgtgtttaataaatgatcctttgtaaataaaa

SEQ ID NO: 70333 - DNA, 608 bp, Homo Sapiens
atccgaagcacagctgaatttcagcgtgacattatgctgatgtttcagaatgctgtaatgtacaatagctcagaccatgatgtctatcacatggcagtggagatgcagcgagatgtcttggaacagatccagcaattcttggccacgcagttgattatgcaaacatccgagtctgggatcagtgctaaaagtcttcgagggagagattctacccgcaaacaggatgcttcagagaaggatggaggaaccaggggacgccgctgtgccattgaagcagatatgaagatgaaaaagtgaagcctcagagttaccctctttgagccgaacctaaaataaaagtaaacaagatagagcttgggcttgcgggcccagttccagaggtggaagttacagaagaggaggtacctgggccacacgacatgagctggaaaatctctcttagagagttggagtagcacaattgcctgttttagggcagaaaccatgggctatgttaatgtcctaatgtgtagctagcagatcgtagctagtttgtattgtcttgtcaattgtacagactttttaaaaaaaacaaccaccagtgaaatgtgtgtgtatacaataaactg

SEQ ID NO: 70334 - DNA, 1432 bp, Homo Sapiens
cagagatcaaggtggaacctgcagaaccagagccagtcatttcaggagccgaaatagtagctggagttgttccagccacaagtatggagccaccagaactcaggagtcaggacttagatgaggaactgggaagtactgcagctggagagattgttgaagcagatgttgccattgggaaaggcgatgagactccacttacaaatgtgaagacagaggcatcccctgaaagcatgttgtctccatcacatggctcaaatcccattgaagatcctttagaggcagagactcagcacaagtttgaaatgtcagactcattgaaagaagaatcagggactatttttggaagccatataaaggatgccccaggtgaggatgaggaggaagatggtgtcagtgaagcggccagcctagaggagcctaaggaagaggatcaaggagaaggctacttgtcagaaatggataatgaacctcctgtgagcgagagtgatgatggcttcagcatacacaatgctacactgcagtcacacacactggcagactccatccccagcagccctgcttcttcacagttctctgtctgtagtgaggatcaggaagctattcaggcacagaaaatttggaagaaagccatcatgcttgtatggagagctgcagctaatcataggtatgccaatgtcttcctgcagcctgttacagatgacatagcacctggctaccacagcattgtgcagaggcctatggatttgtcaactattaagaaaaacatagaaaatggactgatccgaagcacagctgaatttcagcgtgacattatgctgatgtttcagaatgctgtaatgtacaatagctcagaccatgatgtctatcacatggcagtggagatgcagcgagatgtcttggaacagatccagcaattcttggccacgcagttgattatgcaaacatccgagtctgggatcagtgctaaaagtcttcgagggagagattctacccgcaaacaggatgcttcagagaaggacagtgtcccaatgggctctcctgccttccttctctctctctttgatggaggaaccaggggacgccgctgtgccattgaagcagatatgaagatgaaaaagtgaagcctcagagttaccctctttgagccgaacctaaaataaaagtaaacaagatagagcttgggcttgcgggcccagttccagaggtggaagttacagaagaggaggtacctgggccacacgacatgagctggaaaatctctcttagagagttggagtagcacaattgcctgttttagggcagaaaccatgggctatgttaatgtcctaatgtgtagctagcagatcgtagctagtttgtattgtcttgtcaattgtacagactttttaaaaaaaacaaccaccagtgaaatgtgtgtgtatacaataaactg

SEQ ID NO: 70335 - DNA, 1270 bp, Homo Sapiens
gattcagagtcctttgaataacaagctgcttaacagtcctgcaaaaactctgccaggggcctgtggcagtccccagaagttaattgatgggtttctaaaacatgaaggacctcctgcagagaaacccctggaagaactctctgcttctacttcaggtgtgccaggcctttctagtttgcagtctgacccagctggctgtgtgagacctccagcacccaatctagctggagctgttgaattcaatgatgtgaagaccttgctcagagaatggataactacaatttcagatccaatggaagaagacattctccaagttgtgaaatactgtactgatctaatagaagaaaaagatttggaaaaactggatctagttataaaatacatgaaaaggctgatgcagcaatcggtggaatcggtttggaatatggcatttgactttattcttgacaatgtccaggtggttttacaacaaacttatggaagcacattaaaagttacataaatattaccagagagcctgatgctctctgatagctgtgccataagtgcttgtgaggtatttgcaaagtgcatgatagtaatgctcggagtttttataattttaaatttcttttaaagcaagtgttttgtacatttcttttcaaaaagtgccaaatttgtcagtattgcatgtaaataattgtgttaattattttactgtagcatagattctatttacaaaatgtttgtttataaagttttatggatttttacagtgaagtgtttacagttgtttaataaagaactgtatgtatattttgtacaggctcctttttgtgaatccttaaaaactcaactctaggaagcaactactgtttattatactaaaaggctgaaaaacctccaggccagactgctaagctctgaaattcctgagaggtctcagaccgggattctacttgttccaagaaagggtaaagcttctaaaccatcttattcttgtctccaagcatgaacacaggagcatgttaagaaaatctttactacttcttccatgcggagaaatctacatattttgaattagaaacaccctcacacccacttgaagatttttttcctgggaacattatgtcccgtagatcagaggtggtgttgtctttttgcttctactggccattgagaaactttgatgataaaaaagaacggtatagatttttcaaacgtatataaaatatttttatgttatatgttatgccataactttaaaataaaaatagtttaaaattctaaa

SEQ ID NO: 70336 - DNA, 1007 bp, Homo Sapiens
  misc_feature (18)..(18): n is a, c, g, or t
  misc_feature (84)..(84): n is a, c, g, or t
  misc_feature (103)..(103): n is a, c, g, or t
  misc_feature (735)..(749): n is a, c, g, or t
  misc_feature (822)..(837): n is a, c, g, or t
  misc_feature (859)..(867): n is a, c, g, or t
tttcattagctcccgctngatttgttgaatttgacgataccattcacacagaacagctagactgatacgatttatcgactcatntagggatttgccctcgagncaagattcggcacgaggcgctccctgcggcgacgctcatcgtgcgctctcctcttcccccggtggtctcctcgctcgccttctggctctgccatgccctgctctgaagagacacccgccatttcacccagtaagcgggcccggcctgcggaggtgggcggcatgcagctccgctttgcccggctctccgagcacgccacggcccccacccggggctccgcgcgcgccgcgggctacgacctgtacagtgcctatgattacacaataccacctatggagaaagctgttgtgaaaacggacattcagatagcgctcccttctgggtgttatggaagagtggctccacggtcaggcttggctgcaaaacactttattgatgtaggagctggtgtcatagatgaagattatagaggaaatgttggtgttgtactgtttaattttggcaaagaaaagtttgaagtcaaaaaaggtgatcgaattgcacagctcatttgcgaacggattttttatccagaaatagaagaagttcaagccttggatgacaccgaaaggggttcaggaggttttggttccactggaaagaattaaaatttatgccaagaacagaaaacaagaagtcatacctttttcttnnnnnnnnnnnnnnngtttttgcttcaagtgttttggtgttttgcacttctgtaaacttactagctttaccttctaaaagtactgcannnnnnnnnnnnnnnnatgatcaaggaaaagatcattnnnnnnnnncacaaagaagtttttctttgtgtttggatcaaaaagaaactttgtttttccgcaattgaaggttgtatgtaaatctgctttgtggtgacctgatgtaaacagtgtcttcttaaaatcaaatgtaaatcaattacagattt

SEQ ID NO: 70337 - DNA, 1724 bp, Homo Sapiens
  misc_feature (921)..(936): n is a, c, g, or t
  misc_feature (1009)..(1024): n is a, c, g, or t
  misc_feature (1046)..(1055): n is a, c, g, or t
  misc_feature (1195)..(1205): n is a, c, g, or t
gctggaccggtccggattcccgggatatcgtcgacccacgcgtccgcgtcttcagggtggaagcctggcgcacgcccggaggtgccgaggacccaaccagcccaaactctgggggaaatgactcccctctgccctcgccccgcgctctgctaccatttccttacgtctctgcttcgctcagcgatgcaaaacgcgcgaggcgcacggcagagggccgaagccgcggtactctccgggccaggcccgcccctcggccgcgccgcgcagcacgggattccccggccgctgtccagcgctggccgcctgagccaaggctgccgcggagccagtacagtcggggccgctggctggaagggcgagcttcctaaggcggggggaagcccggcgccggggccggagacacccgccatttcacccagtaagcgggcccggcctgcggaggtgggcggcatgcagctccgctttgcccggctctccgagcacgccacggcccccacccggggctccgcgcgcgccgcgggctacgacctgtacagtgcctatgattacacaataccacctatggagaaagctgttgtgaaaacggacattcagatagcgctcccttctgggtgttatggaagagtggctccacggtcaggcttggctgcaaaacactttattgatgtaggagctggtgtcatagatgaagattatagaggaaatgttggtgttgtactgtttaattttggcaaagaaaagtttgaagtcaaaaaaggtgatcgaattgcacagctcatttgcgaacggattttttatccagaaatagaagaagttcaagccttggatgacaccgaaaggggttcaggaggttttggttccactggaaagaattaaaatttatgccaagaacagaaaacaagaagtcatacctttttcttnnnnnnnnnnnnnnnngttttggcttcaagtgtttgggtgtttggcacttctgtaaacttactagctttaccttctaaaagtactgcannnnnnnnnnnnnnnnatgatcaaggaaaagatcattnnnnnnnnnncacaaagaagtttttctttgtgtttggatcaaaaagaaactttgtttttccgcaattgaaggttgtatgtaaatctgctttgtggtgacctgatgtaaacagtgtcttcttaaaatcaaatgtaaatcaattacagattnnnnnnnnnnngcctgtatttaactcaaggaaacccaaatcccatttgatcgccttacctgacccatatccccctcgtccccactatccgccctcattactctacactttttccttcgcccaccctctcacgctgatacaccataccctcccttacccgtacaacccgtctttgtaaccctccccacaccctctcacacactcttatccatacccaatccctccttcctttctccatttctttccccaccctctaagcactttcctacacccctctccattttttacgcccgcctccctctcatgagttagcgggcgtgagggcgcgtcatacgtgccccgattaagagaactcccccgcccctctccatatggattgatcgaccccccatcctatacagcgcaccccccgccctcgccagtcatgcccagccgccttcttcctccattcacaattcgcgcacgccctcctcacccaccctctactatctgcatcgcttcttccgctaagtctatcctcccgcacatagc

SEQ ID NO: 70338 - DNA, 635 bp, Homo Sapiens
  misc_feature (46)..(46): n is a, c, g, or t
  misc_feature (62)..(62): n is a, c, g, or t
  misc_feature (108)..(108): n is a, c, g, or t
gagaaaacatagttggctattatctatcttaacctgttcaggcttntaaaaaaaactgtttntgcatagggtagtactaagatcttaaaaagtggtaactgtcttganagaaaaaacgtttattgtttgtttgcaattgaaataacagggttaccttaacaatgactgtctatgatgtgtcagttcttatctgaattccaaaataaacctgtgcttaaaaaagaaataattgaccaagtaagtttgcataaaatgtgaatactaaatgtgtccccagttgctggcattcatatgtacaggatttgttctagcaagctatgcttcagtatgtggttgatatttttctgtcacaatgatttctttatgcatgcagagcctgggaaagtcatgggattaacttgagggtcactattgagcctattaattaattattgttttaataaaacaaacattggtattggaagataaatatgtttatgtggtatctgacaatgtgtattaggtgtcatatacaatggtaatatgcctgtctttaaagtgttattttattaattaaaaggatatggctattattatatattctctaaagatttgagtcctaaatgctttcatcaggtaaataaaatgtataatcc

SEQ ID NO: 70339 - DNA, 1801 bp, Homo Sapiens
  misc_feature (705)..(720): n is a, c, g, or t
  misc_feature (1305)..(1367): n is a, c, g, or t
cggcgcactagaggatcccctcggtctaccttgtctctgaaacaaggcttggaatctttgccctgataatatggaagcctgtaaatcagagacaagggaacacatgcccactttggaggaattctttgaagaagccattgaacaggcagaccctgaaaatatggtggaaaatgaatataaggctgtgaacaattcaaattatggttggagagccctgagactattagcacggagaagccctcacttcttccagccaaccaaccagcagtttaaaagtttaccagaatatcttgaaaatatggtaataaagctagccaaggaattaccgcctccttctgaagaaataaaaacaggtgaggatgaagatgaggaagataatgatgctctactgaaggaaaatgaaagtcctgatgttcggcgagacaaacctgtaacaggagaacaaatagaggtatttgccaacaagctgggtgaacaatggaagattctggctccctacttggaaatgaaagactcagaaattaggcagattgagtgtgacagtgaagacatgaagatgagagctaagcagctcctggttgcctggcaagatcaagagggagttcatgcaacacctgagaatctgattaatgcactgaataagtctggattaagtgaccttgcagaaagtctaactaatgacaatgagacaaatagttagcttcnnnnnnnnnnnnnnnnattaaaactgtgatagattttgttaccaagcagcatttgataagaggtccactggttttggtaaacaataaacatttttataacaattgttgtacagtcggctggtgctctgagaacaatagaacacatattggctcaaaccagagtttggggaggttgggttgagataatgacctaaacgaagtgacctcaagatcacaaaatatatttttttgttaagtagatgtatttataatgaagttaaataagcactatttagggatatgtcgtttcttataccaaattagtttcctgtgtgttgtttgttagtagttttacaaaatttatcctgaaatcccagaataacactttctgaaaccatatgactgctctgttctcacttattcgtgctttcaagcagaggatcaacaaatgatggtttgttctgcctgccacgagtcttgatcattaaaattgtactggcacccagctgtgctcactcataactaactaactaactgtctatggctccagctacactataacaacagcaaagctaaggagctgcagcactttatagcctgcaaagcctgaaataatttactnnnnnnnnnnnnnnnnnnnnnnnnnnnnnnnnnnnnnnnnnnnnnnnnnnnnnnnnnnnnnnngtccattacagaaaatgtttgtttgccaactttaaaagaaatgaagtctaaaacctcacttttccttctagccttacaaaaattgcctgacctctcaagacttttaatcacttcagggattcttgtgacattcaattgagatatatgtgaacacaccctatacacagcaaagcactaagtagtagtagcagaagacagtaccaccgacttttcttgttcccacataagcatttccctttagggctctaagatgaggtcatcatcgtttttaatcctgaagaagggctactgagtgagtgcagattattcggtaaacactcttaggcctaacctagctagtcagtcaagcagtaatccgacgcgtggtcgacgatatcccgggaattccggaccgtaccagcctgcttttttacacactgtttatagtactcaag

SEQ ID NO: 70340 - DNA, 689 bp, Homo Sapiens
gacacagtgcttctgttggacacacgtacccagcaatatcagttgtaagcacagatgatgatctagcttgacttctgtgacaaatgttgacctttgaggtctaaacaaataatacccccgtcggaatggtaaccgagccagcagctgaagtctctttttcttcctctcggctggaagaacatcaagatacctttgcgtggatcaagcttgtgtacttgaccgtttttatattacttttgtaaatattcttgtccacattctacttcagctttggatgtggttaccgagtatctgtaacccttgaatttctagacagtattgccacctctggccaaatatgcactttccctagaaagccatattccagcagtgaaacttgtgctatagtgtataccacctgtacatacattgtataggccatctgtaaatatcccagagaacaatcactattcttaagcactttgaaaatatttctatgtaaattattgtaaactttttcaatggttgggacaatggcaataggacaaaacgggttactaagatgaaattgccaaaaaaatttataaactaattttgtacgtatgaatgatatctttgacctcaatggaggtttgcaaagactgagtgttcaaactactgtacattttttttcaagtgctaaaaaattaaaccaagcagcttaaccatga

SEQ ID NO: 70341 - DNA, 3621 bp, Homo Sapiens
  misc_feature (2729)..(2729): n is a, c, g, or t
tccggaattcccgggatatcgtcgacccacgcgtccgcccacgcgtccgcccacgcgtccgcgcacgccggcgtgagagggcacggggaaaaggtggctctggccggggtggctcggtttcctggggctatgtaactgagctcgtcgacttaggggtccttcttcgctgccctcgccgcgtgctagcagggagtttccgctcgggagagagactgtcctcacgcccgctgcgcctcctcgacggcagagcaggcttgctcgcccgtgggagcgtcccggccgagaagccctgaggggggaggggaggccattttgtcccgaccgactccccggaaccgggcggagcggctgggagaggctgcggagccgcggtcgccgccctcggaggcactggacgccgccactgtcggggcttcctcaaagctgttcgtaggtcgcccgcgccgtctcgagcctttttcccacgcttccccggtcctccggcctgagaacgcccgagtgaggagttggccgtagtgagagggaccgatcccttggggccgccggcggcgagagcccgagccgctcctcccaatggcgaagaagacgtacgacctgcttttcaagctgctcctgatcggggattccggagtggggaagacctgcgtcctttttcgtttttcggatgatgccttcaatactacctttatttccaccataggaatagacttcaagatcaaaacagttgaattacaaggaaagaagatcaagctacagatatgggatacagcaggccaggagcgatttcacaccatcacaacctcctactacagaggcgcaatgggtatcatgctagtatatgacatcaccaatggtaaaagttttgaaaacatcagcaaatggcttagaaacatagatgagcatgccaatgaagatgtggaaagaatgttactaggaaacaagtgtgatatggacgacaaaagagttgtacctaaaggaaaaggagaacagattgcaagggagcatggtattaggttttttgagactagtgcaaaagcaaatataaacatcgaaaaggcgttcctcacgttagctgaagatatccttcgaaagacccctgtaaaagagcccaacagtgaaaatgtagatatcagcagtggaggaggcgtgacaggctggaagagcaaatgctgctgagcattctcctgttccatcagttgccatccactaccccgttttctcttcttgctgcaaaataaaccactctgtccatttttaactctaaacagatatttttgtttctcatcttaactatccaagccacctattttatttgttctttcatctgtgactgcttgctgactttatcataattttcttcaaacaaaaaaatgtatagaaaaatcatgtctgtgacttcatttttaaatgtacttgctcagctcaactgcatttcagttgtattatagtccagttcttatcaacattaaaacctatagcaatcatttcaaatctattctgcaaattgtataagaataaagttagaattaacaattttaattttgtacaacagtgggaattttctggcatggaataatgtgctttgagtccctataatctatagacatgtgatagcaaaagaaacaaacaaaagccaggaaaacactcattttcgccttgaatatgtaaatgggattaattttgtcctgtgccttatgtggaaaggaacttctctggttttccttttttgttctggtggaagcatgtgcaggagacatatcatccaaacataaaccattaaaatgtttgtggtttgcttggctgtaattttcaaagtagttaattgaggacaaagggtaatgcagaagtgatagctttggtttgctgagtcttgttttaagtggccttgatatttaaaactattcctgccaccatttcttctccttggccacttcttccttgcgtctccctgcatgctgctttatttgcttctccctccccaaccacctcatggtatatttaagagtgaaagggacaaactagtaggtttgtcaagtttaatataaagcactgatgtaacttgctaggtaaacggaaagataagttctaactgcctactatccaatgtcagttaattggtgtcttcccccctcatttgctctcttccctaaaatgtgtcccagatgccttcatttgctgttttacttctatgttctgcttttcctcctctctttgttcccttcctgtctatccattgagtttatgaaatggaagagttaactgcatgcactagtgtttggagggtgttgtggtttgtctttctaattaggtgtatagcctattcactttcctagaataaatctcttaacctaaatttgagtagtctgcattttggcaactcctctagcagcttggtagcctagtacaggttgtttttttaaaaaaggaaaagcaggaaggaggagtgaattttattaacatgtttgccaaatgtattgagatttggcctctgaagaacactttttcagtgttaagtttctttaccttaagattcagaaatactttagaatattattaaatttttaagtcctgtctttacatccctttcggaaaaacttgtattaccatgagttcggaaaaacaggacaacgaaaggcttttcatgtaaacgataagatctttagctatctctaacccttgtccttttttcacgtgcattttttctagtgttgcttcattgcttatcattnaggatagggtaagtgaagtttgctatgctgctagcatcctaagatgatacctttgttgaaagaattgtgaatagcatgattcatttctagcagaggctgagtttaggacagcagcttccattgagaagtctttctgtgtcgtgaatagcattttaatgacctcttggctcacataagcaaacaacatagggacgtatctgctatgaaaatccacaaatttttcagatagtgccctaaaaacaattttatatgcctcactggttgttattcttaggttattcccacacttgactttatcattgtttactactagtaaaaagcagcattgccaaataatccctaattttccactaaaaatataatgaaatgatgttaagctttttgaaaagtttaggttaaacctactgttgttagattaatgtatttgttgcttccctttatctggaatgtggcattagcttttttattttaaccctctttaattcttattcaattccatgacttaaggttggagagctaaacactgggatttttggataacagactgacagttttgcataattataatcggcattgtacatagaaaggatatggctaccttttgttaaatctgcactttctaaatatcaaaaaagggaaatgaagtataaatcaatttttgtataatctgtttgaaacatgagttttatttgcttaatattagggctttgccccttttctgtaagtctcttgggatcctgtgtagaagctgttctcattaaacaccaaacagttaagtccattctctggtactagctacaaattcggtttcatattctacttaacaatttaaataaactgaaatatttctagatggtctacttctgttcatataaaaacaaaacttgatttc

SEQ ID NO: 70342 - DNA, 2116 bp, Homo Sapiens
  misc_feature (74)..(320): n is a, c, g, or t
  misc_feature (1663)..(1683): n is a, c, g, or t
gcatgtgaatatagacagtggtaaaaagcaggctggtacggtcggaatcccgggatatcgtcgaccacgcgtcnnnnnnnnnnnnnnnnnnnnnnnnnnnnnnnnnnnnnnnnnnnnnnnnnnnnnnnnnnnnnnnnnnnnnnnnnnnnnnnnnnnnnnnnnnnnnnnnnnnnnnnnnnnnnnnnnnnnnnnnnnnnnnnnnnnnnnnnnnnnnnnnnnnnnnnnnnnnnnnnnnnnnnnnnnnnnnnnnnnnnnnnnnnnnnnnnnnnnnnnnnnnnnnnnnnnnnnnnnnnnnnnnnnnnnnnnnnnnnnnnnnnnnngagaaacagctgtcacctcccgcaggacccaaatcctctctctgagcaccgtcatccaccacatggctgggcctggctcccaggaccagtccagtcctctagtgccttatctgaggctgcagccgccagtctccaccccaaggagacagcccctgctcctagatgcccttggcctccgcagtgcagcccccaggtgtcctgactgaagcacaggccatagccccatttccccggtgcctgcagggctaacctccacgggagcccaggagctctggccggcaggtccatggcacggggcatcggaagactgcaaaactgctggacttaccctgggctgcagtccattgtcggcccctgggttgaatcaagatagtacttgcagctagatggatgcttttagccaggggacattgtgaggggaagattcctccacccagtctggcctgtggtgtctgtctcctccctgagaccacagcttctccagtagcagactcatgggcgccaccaagtggaagcacctggagcggcctctgccatccagtggggaagccaggccccgagacggaggtgggggcagcacgtgccctccacagccaccgctttcccgcctcagcagcccaggcctcctggcccagccctgcctggacagtgctctcccctcacccgggaagctggaatcctcctgcccgagaggaagcagacggcacagggacacccctgccaccttgggatctgcctccaagctggtgcagggtatcgagagtggattccagatggaggtcctggtcccagcacgcagcagtcctggtagctctgcagaggagacaggaacccgagaagtagctgaagcagaagccagccgcagtccccttgccacatagaggcgggcttctcccagccatggtgtcccctctgcctcccctcccccgaccctcctgccttccgcgtggagggtggtggtcctgtagtgtcagcaccagcaccatgggcttggaccccctccctggacacaggcaggtgtcctagggctgggggtgcagcccgagggaatggagaccacactcatggctcaggtctgccggggccggcagggggttggggaagaagagggctcaggcccagcaggggtggaagcccctgccactgccactacccgctccagagctttaaggaaaatgaagtgagacccctccccttaggcctggggagccatagggctggcttctctgtgggtgcgtggacgtggggttgggagctgggaatctattttttgtattatgttttgagctactgtagttttggcgtggcactattgtaatggaaataaaatacttgtacggagnnnnnnnnnnnnnnnnnnnnngggggggccggtcttaaagatttcccctcgaaggggcccaaagtttacgcgttacccagctttctctgtgttacaaggtgtggccccttattaggtgagctcgtatttataagctaggcactgggccgcgcgtttaacaaccgttcgttgactggggaaaaacgtgctagcctggggactccttggcgtaaaggaacccttatactctcggcgggtggtgaccacttacttggggcaccacaactctaccctacagggagacattttaaagcccctcctaagggcgtaaacactattaacacccctttctaacgggtgcttctatacccgcggtgtctacacagaccctgaagcctgccactaagtgtccctcgccccgcccttcggcacgaagctttcgggcctcaccggggagcataactaagctgccacc

SEQ ID NO: 70343 - DNA, 2734 bp, Homo Sapiens
  misc_feature (436)..(452): n is a, c, g, or t
  misc_feature (842)..(852): n is a, c, g, or t
  misc_feature (1967)..(1986): n is a, c, g, or t
  misc_feature (2017)..(2593): n is a, c, g, or t
  misc_feature (2637)..(2637): n is a, c, g, or t
  misc_feature (2655)..(2655): n is a, c, g, or t
aagtattggaaaaagtctaaagaaaagaaagtgccttattttccttcagggtcattcagtcaagtgtcccaaaaagataagctcccccctcaaaatacaagttaaatgcatgttacccagtcgcccagtatgtgaaagaagatatgagggagacaaatgagttgataagtttgaattaaaggatttttgccacggtaccttgatgcaaatttgccaaatctgaaactgtgaaaagatttgataacttttctaaggccggactagtaagttttaaaacatcattctttaaaagaaaagtttaagacttttggttattccaaccttcaatgttaacccaagggattcggaaataaaaattaggtgtcatccaaacttcagtttacagacaaaattagagctttgttttatttggaaaagggggatgcaatcatttgannnnnnnnnnnnnnnnnaattaattgaatataagaggatacctagcaaatgttttcacaaaagtgaatctttgggattttcattctagaaaacaatgttgtaaatcacccaaatttaatcacatgtctttataacaaaccagaaaacgggcgtgagtgtatccttttacggtttaaataaactctgcctcccccaccccttaactttaaaagaatgtgaaaaactagcatcacagtgcatataaatactcaaccacatttcagcttaagcttctaatttctcaaaaagttgaaacagttagttatgtagttgaagcaatttgtgtgcaaagcctacatctaaacacttgagtgaataatcattaactgctcagtaccagacgtggcaaatctcaagtgacagtggannnnnnnnnnngcccagcttatcaactcgtcccctcttccacaccttcccagcatcacagtcagaggtcagcaggaagctgagtcattaccttcttggtgacctcccccaccatcttgtctcacttggaaaccgttgtcagtttatttactatgcaatagacattcattgttttgtatccagctagctttggtttaatatgccactgctttgtctttctgttacacatacagttttgatttatttacaatatatgctgtgccattttgatttttatattgtttggttggttgaataaatttgcgacactcaaacacttgaggtgatagttgttaaaaacaataccagtatttgatccagtttcatctcaactatgttatacctggacattttagatgtttatcaaaggtcttttatggggaagaaagtaaatgtatgaaataataaatgtgtgacatttatagggaatgttggctctgaacaaacttttgaaaacttggttgacaaaattttggatcaactgaaaaaagcatgacttttgaaatctctgaatgccttggttctcagtattatcattctttattgaatttatttcttattaaaatatgtagtttttaagactttttttctgacagtattatgtaattttttagcgtgggtagatgggagtgtcgcttgtatgttatcgtacagctgacatgtatttttgtctattctttattatcttagtttcatgctatgtatgtaccataaccaacctattgcctatgagaaacatgtaagataatgtatttacagccattgttacaagtttataatgtatttttctatcttgttttatatgtatgttatataacattcaaaaagaatttttttcttgattgagaaaaggatacaaaatgcaaaatccacaattttgataactgaaaattgccaattgttttgcagtactttattatattgggtgtcttgtcttttttgggcttttagttagctaatgaatgaatacattagacacttttgggttttagttgggattttacatagcttgcattttaattctttggttctttgctgtttctattaacccacagcattattttaataaatgttataataccaacctnnnnnnnnnnnnnnnnnnnngcctacagccgcgcctcgtgccgaattcttnnnnnnnnnnnnnnnnnnnnnnnnnnnnnnnnnnnnnnnnnnnnnnnnnnnnnnnnnnnnnnnnnnnnnnnnnnnnnnnnnnnnnnnnnnnnnnnnnnnnnnnnnnnnnnnnnnnnnnnnnnnnnnnnnnnnnnnnnnnnnnnnnnnnnnnnnnnnnnnnnnnnnnnnnnnnnnnnnnnnnnnnnnnnnnnnnnnnnnnnnnnnnnnnnnnnnnnnnnnnnnnnnnnnnnnnnnnnnnnnnnnnnnnnnnnnnnnnnnnnnnnnnnnnnnnnnnnnnnnnnnnnnnnnnnnnnnnnnnnnnnnnnnnnnnnnnnnnnnnnnnnnnnnnnnnnnnnnnnnnnnnnnnnnnnnnnnnnnnnnnnnnnnnnnnnnnnnnnnnnnnnnnnnnnnnnnnnnnnnnnnnnnnnnnnnnnnnnnnnnnnnnnnnnnnnnnnnnnnnnnnnnnnnnnnnnnnnnnnnnnnnnnnnnnnnnnnnnnnnnnnnnnnnnnnnnnnnnnnnnnnnnnnnnnnnnnnnnnnnnnnnnnnnnnnnnnnnnnnnnnnnnnnnnnnnnnnnnnnnnnnnnnnnnnnnnnnnnngaccctgcgctacggatactgtccgcttctcctcgggagcgtgngcttccaagctcagcgtngtaccagtcgtgtagtcgtcgccagctggctgtggacaaccccgtcaaccacgctggctacggtatacgctggtcaccg

SEQ ID NO: 70344 - DNA, 2673 bp, Homo Sapiens
aaggtagcgaggcctgggtggcgattccggcacgaggagtatttgcttatatagcaatgagttttattttgtttatttgttttgcaataaaggatatgaaggtggctggctaggaagggaagggccacagccttcatttctaggagtgctttaagagaaactgtaaatggtgctctggggctggaggctagtaaggaaactgcatcacgattgaaagaggaacagacccaaatctgaacctcttttgagtttactgcatctgtcagcaggctgcagggagtgcacacgatgccagagagaacttagcagggtgtccccggaggagaggtttgggaagctccacggagaggaacgctctctgcttccagcctctttccattgccgtcagcatgacagacctccagcatccacgcatctcttggtcccaataactgcctctagatacatagccatactgctagttaacccagtgtccctcagacttggatggagtttctgggagggtacacccaaatgatgcagatacttgtatactttgagccccttagcgacctaaccaaatgttaaaaatactttttaccaaaggtgctatttctctgtaaaacacttttttttggcaagttgactttattcttcaattattatcattatattattgttttttaatattttattttcttgactaggtattaagcttttgtaattatttttcagtagtcccaccacttcataggtggaaggagtttggggttcttcctggtgcaggggctgaaataacccagatgcccccaccctgccacatactagatgcagcccatagttggcccccctagcttccagcagtccactatctgccagaggagcaagggtgccttagaccgaagccaggggaagaagcatcttcataaaaaactttcaagatccaaacattaatttgtttttatttattctgagaagttgaggcaaatcagtattcccaaggatggcgacaagggcagccaagcagggcttaggatatcccagcctaccaatatgctcattcgactaactaggagggtgagttggccctgtctcttcttttttctggacctcagtttcctcagtgagctggtaagaatgcactaaccttttgatttgataagttataaattctgtggttctgatcattggtccagaggggagataggttcctgtgatttttccttcttctctatagaataaatgaaatcttgttactagaacaagaaatgtcagatggccaaaaacaagatgaccagatttgatctcagcctgatgaccctacaggtcgtgctatgatatggagtcctcatgggtaaagcaggaagagagtgggaaagagaaccaccccactctgtcttcatatttgcatttcatgtttaacctccggctggaaatagaaagcattcccttagagatgaggataaaagaaagtttcagattcaacagggggaagaaaatggagatttaatcctaaaactgtgacttggggaggtcagtcatttacagttagtcctgtgtctttcgacttctgtgattattaaccccactcactaccctgtttcagatgcatttggaataccaaagattaaatccttgacataagatctcatttgcagaaagcagattaaagaccatcagaaggaaattatttaggttgtaatgcacaggcaactgtgagaaactgttgtgccaaaaatagaattccttctagtttttcttgttctcatttgaaaggagaaaattccactttgtttagcatttcaagcttttatgtatccatcccatctaaaaactcttcaaactccacttgttcagtctgaaatgcagctccctgtccaagtgccttggagaactcacagcagcacgccttaatcaaaggttttaccagcccttggacactatgggaggagggcaagagtacaccaatttgttaaaagcaagaaaccacagtgtctcttcactagtcatttagaacatggtatcatccaagactactctaccctgcaacattgaactcccaagagcaaatccacattcctcttgagttctgcagcttctgtgtaaatagggcagctgtcgtctatgccgtagaatcacatgatctgaggaccattcatggaagctgctaaatagcctagtctggggagtcttccataaagttttgcatggagcaaacaaacaggattaaactaggtttggttccttcagccctctaaaagcatagggcttagcctgcaggcttccttgggctttctctgtgtgtgtagttttgtaaacactatagcatctgttaagatccagtgtccatggaaacattcccacatgccgtgactctggactatatcagtttttggaaagcagggttcctctgcctgctaacaagcccacgtggaccagtctgaatgtctttcctttacacctatgtttttaagtagtcaaacttcaagaaacaatctaaacaagtttctgttgcatatgtgtttgtgaacttgtatttgtatttagtaggcttctatattgcatttaacttgtttttgtaactcctgattcttccttttcggatactattgatgaataaagaaattaaagtgatagttttattggtttcctttcccccaattaaggccaaataaagtcgtgagaacattaccc

SEQ ID NO: 70345 - DNA, 659 bp, Homo Sapiens
  misc_feature (47)..(47): n is a, c, g, or t
  misc_feature (464)..(549): n is a, c, g, or t
taaatgtgctctggggctggaggctagtaaggaaactgcatcacgantgaaagaggaacagacccaaatctgaacctcttttgagtttactgcatctgtcagcaggctgcagggagtgcacacgatgccagagagaacttagcagggtgtccccggaggagaggtttgggaagctccacggagaggaacgctctctgcttccagcctctttccattgccgtcagcatgacagacctccagcatccacgcatctcttggtcccaataactgcctctagatacatagccatactgctagttaacccagtgtccctcagacttggatggagtttctgggagggtacacccaaatgaatgcagatacttgtatactttgagccccttagcgacctaaccaaattttaaaaatactttttaccaaaggtgctatttctctgtaaaacacttttttttggcaagttgacnnnnnnnnnnnnnnnnnnnnnnnnnnnnnnnnnnnnnnnnnnnnnnnnnnnnnnnnnnnnnnnnnnnnnnnnnnnnnnnnnnnnnnagtagtcccaccacttcataggtggaaggagtttggggttcttcctggtgcaggggctgaaataacccagatgcccccaccctgccacatactagatgcagcccatagtc

SEQ ID NO: 70346 - DNA, 1351 bp, Homo Sapiens
ttctgcaaagatgtttaatgcacttagattacagagaggaagagggggcaagaaggaaacgacatctaagtgagtcacccaaaaattcttacaaaagtcccaggctggctgcagccccaggaaccgagtcgccactgacattaaaaactaatataaaattttacaaaaatctgcttgtcgcagcattcaggtacttgtacaaaaggaggggtctccctacagggctcctgacttgtaacagggacccaggcacctcacctggcatggatgtcctagaagccagaaagggaagaccagacacaaaaatacagtaaaggaaattctctactggtcagccccataggggcaccgaccttcaggttttctccctgcttgcaactcaatccgaaaccccagtcccaagaccctgtgtctatttttaaaaatgctctagcccttttagactctccccttggcttctccagtccctgccttggagcactgcccttggaagagaaagatacgggcaggaagaggcaccagctccccacacaggcctgagacctcgcacaagcctcccaaacccccctcagaattgcagctgagtctgcagtcctcctgcagcccacactgagccagcagagccacaggaacctgccttatatagcaggcaaagaggaaagggaaaggccttctcagaagctctagcaccagggacctggaggggtgggtacaactaggcaagtctccaagtagcttgcagaagaggcagatttagggagggaggccccttacctcctccacccactacaaggtcaggggctccctcagagctgcagggagggaaagaaagggtacattcaccaagcatcctgtgccagaagctgtgctggacagggtccaaggtcagcttggcttgatcttctttaagggtcctctctcaccagccagcagcccaagaaacctctgggaggcaccaatgcccataggaaaggaggcctggtgagaaatgtgtgataccctgtcctgccctcagagccagtgagatggagcctggcccctgcaggatcttgggtgagcgtgaggctcctgacatattgcaggtacgaaggggccacaggcttcatgtgctcatcatctcggagctcacccacttcctcctgccttaccctgctcccccagaacagggccaccatgctggctggtgtctaccttcagtccacaaagaccctccaggtctggggcaggttgctgaccaggtgcttcacaaactaatgacaaagcttagctcagaaaatgccccatccccacccaaccaacgatggaggcacccagcagatggaagtacggcgaactgcagcagggagccccc

SEQ ID NO: 70347 - DNA, 846 bp, Homo Sapiens
  misc_feature (48)..(48): n is a, c, g, or t
aatcagtcccctgaatgtgcttgagatgtgacaaggccagatgacgantatgagctgtgaaaggaatggggaagcagaagggcacaaacagaagtactggagggagaggccgggctctcagaagcagcagcacgtgccaggtggaagccagctgcaggcaggggaggaaggaggcccttactcttccttcttgtccatgggaccatctactgcagcctgcagctttgcgtgctcctccagcaagcggtcgtactccttggtgaggccctcagactgcttccgcatggccagaacctggttttcagctttctctagtttttgcttagtgctggccagctcgtcctttagcttctgcaggtcagccttcaggctcctgttctcttcctccaacttcacctcagcattcccgacatccaacttgcctccgtcaacagcagctcccttcttgagctggtcattctcctccatgtacttcttggccgcctcactagcactctccgcctgctttttaaaggcttcattggaggccagcagcgtggcctgctgcgaaatgagagtcaccaggcgtctaagcaggaaggacagcagcaaggaaaagccagcatgtagagattcctctgggcacggaaaagcttcatgtggaagtgctccatggccccgggattgttctggaggttcaccttttccgtcacatcatcatacttccgaatttcgcgcacggcactcgatgaccaacagcacaaggatggcaacaccttctttgtggttctcattgtcatccttgtgctgttggtcatcgatgccaacctcgtgccgattcaccacccagcctcgtacctagcctta

SEQ ID NO: 70348 - DNA, 904 bp, Homo Sapiens
cagtcgacggtaccggacatatgcccgggaattcggccattacggccggggggggccggggctgctgtgggagagttcggttgctgcggcggggcctgcacgttgactgtgggaaactcggaaacaagctcacatcttcctgtgggaaaccttctagcaacaggatgagtctgcagtggactgcagttgccaccttcctctatgcggaggtctttgttgtgttgcttctctgcattcccttcatttctcctaaaagatggcagaagattttcaagtcccggctggtggagttgttagtgtcctatggcaacaccttctttgtggttctcattgtcatccttgtgctgtctggtcatcgatgccgtgcgcgaaattcggaagtatgatgatgtgacggaacaaggtgaacctccagaacaatcccggggccatggagcacttccacatgaagcttttccgtgcccagaggaatctctacattgctggcttttccttgctgctgtccttcctgcttagacgcctggtgactctcatttcgcagcaggccacgctgctggcctccaatgaagcctttaaaaagcaggcggagagtgctagtgaggcggccaagaagtacatggagggagaatgaccagctcaagaagggagctgctgttgaccggagggcacgtttggatgtcgggaatgctgaaggtgaagttgggggaagagaacaggagccttaaaggtgactggagaagtaaagggacgagctggccagcactaagcaaaaataagagaaaggtgaaaacaggtgcggccatgcggaagcagtcgagggctcaacaagggatacgaacgttgttggaggacccgcaaggtggagtgtcagctcccggtggcggtcccattccttccaagtaag

SEQ ID NO: 70349 - DNA, 1039 bp, Homo Sapiens
  misc_feature (43)..(83): n is a, c, g, or t
  misc_feature (87)..(121): n is a, c, g, or t
aaagaaaacttgatcacctatagggcgctagcgcggttatttnnnnnnnnnnnnnnnnnnnnnnnnnnnnnnnnnnnnnnnnnccgnnnnnnnnnnnnnnnnnnnnnnnnnnnnnnnnnnncagtcgacggtaccggacatatgcccgggaattcggccattacggccgggggggagagttcggttgctgcggcggggcctgcacgttgactgtgggaaactcggaaacaagctcacatcttcctgtgggaaaccttctagcaacaggatgagtctgcagtggactgcagttgccaccttcctctatgcggaggtctttgttgtgttgcttctctgcattcccttcatttctcctaaaagatggcagaagattttcaagtcccggctggtggagttgttagtgtcctatggcaacaccttctttgtggttctcattgtcatccttgtgctgttggtcatcgatgccgtgcgcgaaattcggaagtatgatgatgtgacggaaaaggtgaacctccagaacaatcccggggccatggagcacttccacatgaagcttttccgtgcccagaggaatctctacattgctggcttttccttgctgctgtccttcctgcttagacgcctggtgactctcatttcgcagcaggccacgctgctggcctccaatgaagcctttaaaaagcaggcggagagtgctagtgaggcggccaagaagtacatggaggagaatgaccagctcaagaagggagctgctgttgacggaggcaagttggatgtcgggaatgctgaggtgaagttggaggaagagaaacaggagcctgaagggctgacctgcagaagctaaaggacgagctggcagcactaagcaaaaactagagaaagctgagaaccaggttctggccatgcggaacgcagtctgagggcctcacaaaggagtcgaaccgattgactggaagagccagcaaagatgcaggtgcgtagatggtcccaggccacagaaggagcagtaaggctcttactaccctgctcactgcttcac

SEQ ID NO: 70350 - DNA, 1862 bp, Homo Sapiens
  misc_feature (1347)..(1378): n is a, c, g, or t
  misc_feature (1381)..(1386): n is a, c, g, or t
  misc_feature (1397)..(1397): n is a, c, g, or t
agctttgtacactatgaacaagtgggttacaaaaaagcaggctggtacggtccggaattcccgggatatcgtcgacccacgcgtccggcggcggggcctgcacgttgactgtgggaaactcggaaacaagctcacatcttcctgtgggaaaccttctagcaacaggatgagtctgcagtggactgcagttgccaccttcctctatgcggaggtctttgttgtgttgcttctctgcattcccttcatttctcctaaaagatggcagaagattttcaagtcccggctggtggagttgttagtgtcctatggcaacaccttctttgtggttctcattgtcatccttgtgctgttggtcatcgatgccgtgcgcgaaattcggaagtatgatgatgtgacggaaaaggtgaacctccagaacaatcccggggccatggagcacttccacatgaagcttttccgtgcccagaggaatctctacattgctggcttttccttgctgctgtccttcctgcttagacgcctggtgactctcatttcgcagcaggccacgctgctggcctccaatgaagcctttaaaaagcaggcggagagtgctagtgaggcggccaagaagtacatggaggagaatgaccagctcaagaagggagctgctgttgacggaggcaagttggatgtcgggaatgctgaggtgaagttggaggaagagaacaggagcctgaaggctgacctgcagaagctaaaggacgagctggccagcactaagcaaaaactagagaaagctgaaaaccaggttctggccatgcggaagcagtctgagggcctcaccaaggagtacgaccgcttgctggaggagcacgcaaagctgcaggctgcagtagatggtcccatggacaagaaggaagagtaagggcctccttcctcccctgcctgcagctggcttccacctggcacgtgcctgctgcttcctgagagcccggcctctccctccagtacttctgtttgtgcccttctgcttcccccattcccttccacagctcatagctcgtcatctcggcccttgtccacactctccaagcacattacaggggacctgattgctacacgttcagaatgcgtttgctgtcatcctgcttggcctggccaggcctggcacagccttggcttccacgcctgagcgtggagagcacgagttagttgtagtccggcttgcggtggggctgacttcctgttggtttgagcccctttttgttttgccctctgggtgttttctttggtcccgcaggagggtgggtggagcaggtggactggagtttctcttgagggcaataaaagttgtcatggtgtgtnnnnnnnnnnnnnnnnnnnnnnnnnnnnnnnnaannnnnnagggcggccgnctctagagtatcccctcgaggggcccaagcttacgcgtacccagctttcttggtacaaagtggcccctaatagtgagtcgtattataagctagggcactggccgtcgtttttacaacgtcgtggactgggaaaaactgctagctttgggaatctttgtgaaaggacctttaccttctgtgggggggacataaattgggacaaactaccctaccgagatttaaaagctcttagggaaaatataaaaatttttaagggggataaagggggttaaactaacttgcaaatgctttgcctggcttgaaaagttttgccttacgggggaatggattttttgaaaaaaattataccccgggagcctaggggagtcccaaatggggttgggggaaattttaaaatcccccgagcccccaggggctcatttttaaggggcccctccggtgccctcccaagatttgggttttatt

SEQ ID NO: 70351 - DNA, 1113 bp, Homo Sapiens
  misc_feature (116)..(116): n is a, c, g, or t
tccctttggccctgggcccatctactccagcctgcacttgcgggctcctccagcaacgttcgtactcccttggtgagggccctcagactgcttccgcatggcccagaacctggttnttcagctttctctagtttttgcttagtgctggccagctcgtcctttagcttctgcaggtcagccttcaggctcctgttctcttcctccaacttcacctcagcattcccgacatccaacttgcctccgtcaacagcagctcccttcttgagctggtcattctcctccatgtacttcttggccgcctcactagcactctccgcctgctttttaaaggcttcattggaggccagcagcgtggcctgctgcgaaatgagagtcaccaggcgtctaagcaggaaggacagcagcaaggaaaagccagcaatgtagagattcctctgggcacggaaaagcttcatgtggaagtgctccatggccccgggattgttctggaggttcaccttttccgtcacatcatcatacttccgaatttcgcgcacggcatcgatgaccaacagcacaaggatgacaatgagaaccacaaagaaggtgttgccataggacactaacaactccaccagccgggacttgaaaatcttctgccatcttttaggagaaatgaagggaatgcagagaagcaacacaacaaagacctccgcatagaggaaggtggcaactgcagtccactgcagactcatcctgttgctagaaggtttcccacaggaagatgtgagcttgtttcctgccccctccagcacgtgtgtcaacacgtccagagcggcctctcccgacgatccctgccccaggaagcccgagatttccgacgcccgtttaactgaaaggcgttcttcgggaagagcagtgccagggcaccaagaggaggacgcctcggcacccatcgggcgctcccttccccgccaggcagaactcagccgcagaggcgggcgctctgcgggcccaaatccccgctaccaggcaggcccaaggccgcacctagtccaagcgctgccgacgcccccgcctcccaccgtccccacggcgcccgcggagagaaaccggcacctccctcgaggatcc

SEQ ID NO: 70352 - DNA, 941 bp, Homo Sapiens
gtatgtgactattagaaccaagtgggttacaaaaaagcaggctggtacggtccggaatcccgggatatcgtcgacccacgcgtccggttccttcttctttgagttttagctttctcctttatctatcagtctcttaacgagttggtaggaactaggtcacaggacctttaataaatactccctggtaaattatgaaaggttgaatttctgaccctgcaaaatgaaagaccagagctttaatagtgagtgcactaagtggacttccctttgtgttaatttggaccctcggttagacatgcaggagagttggagagtttgtgggggatgtagtaggggagggtcgaggagtctgggaaagctgtcagactatgatacagatctaacctctggagaagaaataggaaggaggggtgggtaggaaaagtcttgtgcagttctaagatggtttcagctagaccaaagtgagttgagccagagtcacctgtcagaggagccctgctacatcagccatcataagcagttcatgctattgcctcttggcctccatctcagccatcgtggctgctgtgctcatgtgcccattatgccattgctgtggtagccagtgacaaaggcctgtgaaccgggttaagtcatttcgtctgcttgcttttatatgtggcaaggaattggatcacacaattatgagggctggttaggcaagcctaaaattcatgaaacaagagctgacactggtgggatttcttcaggaaaatctgttttcctcttgaggttcaactgattggtttgaggccaaccacagtattaatggtatcaataacctaactgatcgtaagatgttaaccaaatctacaaaatccaatactccccgtttcacggattgttcagacccaggttgctaatggttaaggtacctaatttaaggtttcggatttttgaag

SEQ ID NO: 70353 - DNA, 830 bp, Homo Sapiens
tcccgggatggcccacaataacctcggggtgaagaggccacgtctcgggctccctccccgtcaggtctcatgtccccaagccgcctgcctggaagccgcgaacgggactgggaaaatggcagcaatgcctcctccccagcgtcagtgcccgagtacacaggtccacggctgtacaaagaacccagcgccaagtccaacaagttcatcatccacaatgccctatcacactgctgcctggcgggcaaggtgaacgaaccgcagaagaatcgcattctggaggaaattgagaaaagcaaggccaaccacttcctgatcctctttcgcgactcgagctgccagttccgggcgctctacacgctgtcgggggagacagaggagctgtcgcggctggcagggtatgggccccggaccgtcacgcccgccatggtggaaggcatctacaagtacaactcggaccgcaagcgcttcacccagatccccgccaagaccatgtccatgagcgtcgatgccttcaccatccagggacacctctggcagggcaagaaacccaccactcccaagaagggcggcggcacccccaaatagccccacccgggcggtccacgggccgggccctgtgtgctgcggccgccatcccctgcacgacagtcagacggtattcctgggtcctgtctgtccccaaccgtgtctgggtggggctggagtctccaccctctgactttgagtccagtcctgctgtgggggctgagctgggaggttcagggactcagggctcagctcagtccccttgtctgtcctcccccacttcttgaataaaataatttaaagtg

SEQ ID NO: 70354 - DNA, 1286 bp, Homo Sapiens
ggggggcgaggagtccagagagccatggccgccctgcgtgtcctgctgtcctgcgcccgcggcccgctgaggcccccggttcgctgtcccgcctggcgtcccttcgcctcgggtgctaactttgagtacatcatcgcagaaaaaagagggaagaataacaccgtggggttgatccaactgaaccgccccaaggccctcaatgcactttgcgatggcctgattgacgagctcaaccaggccctgaagaccttcgaggaggacccggccgtgggggccattgtcctcaccggcggggataaggcctttgcagctggagctgatatcaaggaaatgcagaacctgagtttccaggactgttactccagcaagttcttgaagcactgggaccacctcacccaggtcaagaagccagtcatcgctgctgtcaatggctatgcctttggcgggggctgtgagcttgccatgatgtgtgatatcatctatgccggtgagaaggcccagtttgcacagccggagatcttaataggaaccatcccaggtgcgggcggcacccagagactcacccgtgctgttgggaagtcgctggcgatggagatggtcctcaccggtgaccggatctcagcccaggacgccaagcaagcaggtcttgtcagcaagatttgtcctgttgagacactggtggaagaagccatccagtgtgcagaaaaaattgccagcaattctaaaattgtagtagcgatggccaaagaatcagtgaatgcagcttttgaaatgacattaacagaaggaagtaagttggagaagaaactcttttattcaacctttgccactgatgaccggaaagaagggatgaccgcgtttgtggaaaagagaaaggccaacttcaaagaccagtgagaaccagctgcccctgcttcacacctctgcttggagaggacaagtgcagcctgtcagttttagaagcaagtaaatcatcctcttttcaagagcagtgtccgtggtgtgcagttcctctccaattgctgcgtggtcgtggcccgacctctcacggcatgacagccttcgtcacccagcctgtgagggtcctgactggagcaccttctaaatctaagattctgctgaggagcccccgctggtccctctgggcatgctgtgctcggacggaaagcggggcctgtgggtccttgtgtccctgccgctgaagaatggggctgctctgagggaaacgctgtctgctgccttcatacagatgctgattaaagtgatagcgaattcagaattacacc

SEQ ID NO: 70355 - DNA, 1554 bp, Homo Sapiens
  misc_feature (1255)..(1255): n is a, c, g, or t
  misc_feature (1261)..(1261): n is a, c, g, or t
  misc_feature (1291)..(1303): n is a, c, g, or t
  misc_feature (1413)..(1421): n is a, c, g, or t
  misc_feature (1445)..(1445): n is a, c, g, or t
ggcacgagggcttctgtactgccaggtccgggtcggcggctgcactgcggatgagaccggtgcgactcatgaaggtgttcgtcacccgcaggatacccgccgagggtagggtcgcgctcgcccgggcggcagactgtgaggtggagcagtgggactcggatgagcccatccctgccaaggagctagagcgaggtgtggcgggggcccacggcctgctctgcctcctctccgaccacgtggacaagaggatcctggatgctgcaggggccaatctcaaagtcatcagcaccatgtctgtgggcatcgaccacttggctttggatgaaatcaagaagcgtgggatccgagttggctacaccccagatgtcctgacagataccaccgccgaactcgcagtctccctgctacttaccacctgccgccggttgccggaggccatcgaggaagtgaagaatggtggctggacctcgtggaagcccctctggctgtgtggctatggactcacgcagagcactgtcggcatcatcgggctggggcgcataggccaggccattgctcggcgtctgaaaccattcggtgtccagagatttctgtacacagggcgccagcccaggcctgaggaagcagcggaattccaggcagagtttgtgtctacccctgagctggctgcccaatctgatttcatcgtcgtggcctgctccttaacacctgcaaccgagggactctgcaacaaggacttcttccagaagatgaaggaaacagctgtgttcatcaacatcagcaggggcgacgtcgtaaaccaggacgacctgtaccaggccttggccagtggtaagattgcagctgctggactggatgtgacgagcccagaaccactgcctacaaaccaccctctcctgaccctgaagaactgtgtgattctgccccacattggcagtgccacccacagaacccgcaacaccatgtccttgttggcagctaacaacttgctggctggcctgagaggggagccgatgcctagtgaactcaagctgtagccaaacagtagagatggagggccgggaagcaaaccgtgccctggtattgtcagacacacccaggcttgatttggatccacaggcagagccaagggaaggtgtgattctctgaggaaagagtgattctgatatatgtacttgtcacattggtgttggacacatttgcgccaaaagtatggtaattctattattaaataattctctgagaaaaccacacncacacnaccgccaaccaccaccccacctcaatactnnnnnnnnnnnnntttattcacacaaaataatgacacccccagccccccaacccgtcaccccactgtcagaaaattggggggggccccctcggcctcctcaaaaaaaatttttcaaacacacnnnnnnnnnggggcgcgcggcggggccccttantgggttaaacggacaacggggggcaacaaaggccgggtccccccagaagaacaaaacccgggggaacacagaaaaaaagggggtgggggaaacctcccccccaacacac

SEQ ID NO: 70356 - DNA, 1280 bp, Homo Sapiens
aaaaaaaatggcaggagaggcccggggttaatcggcacgagggcacgcggatgagaccggtgcgactcatgaaggtgttcgtcacccgcaggatacccgccgaggctgtgaggtggagcagtgggactcggatgagcccatccctgccaaggagctagagcgaggtgtggcgggggcccacggcctgctctgcctcctctccgaccacgtggacaagaggatcctggatgctgcaggggccaatctcaaagtcatcagcaccatgtctgtgggcatcgaccacttggctttggatgaaatcaagaagcgtgggatccgagttggctacaccccagatgtcctgacagataccaccgccgaactcgcagtctccctgctacttaccacctgccgccggttgccggaggccatcgaggaagtgaagaatggtggctggacctcgtggaagcccctctggctgtgtggctatggactcacgcagagcactgtcggcatcatcgggctggggcgcataggccaggccattgctcggcgtctgaaaccattcggtgtccagagatttctgtacacagggcgccagcccaggcctgaggaagcagcggaattccaggcagagttcgtgtctacccctgagctggctgccaatctgatttcatcgtcgtggcctgctccttaacagctgcaaccgagggactctgcaacaaggacttctttccagaagatgacggaaacagctgtgttcatcaacatcagcagggcgacgtcgtaacacagggacgaactggtaccagggcttgggccagtggtaagatgcgagtgctggactggttgttgacgagccaggaacatggttaaaaacaacctttctgaacctgaagaatgtgtgatctgcccaatgggcggtgccaccacgaacggaaaaccatggtcttggtggaggtaacacatgcggggtggctgtaagggaccagatgctatgaaaccaggtttcaacgtagagtggcgggaggaacagccccggttgttgtaaccccgggtgttgggtcatgcgatcagggaggtgtatgtagaaaggagtcatttatccacggtggtccgaccccaggtcttatatcctgtcgacaacaaccttggggagacggtccctcctaacgacacatgacacatgacttacatctcaatcatggtgtattacactacgtcggtgtgaagcaacataaaggccagaagagcgaggcagggaacagaactatcagaacggagaactgaaagacagctga

SEQ ID NO: 70357 - DNA, 1393 bp, Homo Sapiens
  misc_feature (18)..(18): n is a, c, g, or t
gtctaagagcgagcctgngtggcgattctccacgagggtactgccaggtccgggtcggcggctgcactgcggatgagaccggtgcgactcatgaaggtgttcgtcacccgcaggatacccgccgaggggtagggtcgcgctcgcccgggcggcagactgtgaggtggagcagtgggactcggatgagcccatccctgccaaggagctagagcgaggtgtggcgggggcccacggcctgctctgcctcctctccgaccacgtggacaagaggatcctggatgctgcaggggccaatctcaaagtcatcagcaccatgtctgtgggcatcgaccacttggctttggatgaaatcaagaagcgtgggatccgagttggctacaccccagatgtcctgacagataccaccgccgaactcgcagtctccctgctacttaccacctgccgccggttgccggaggccatcgaggaagtgaagaatggtggctggacctcgtggaagcccctctggctgtgtggctatggactcacgcagagcactgtcggcatcatcgggctggggcgcataggtgaggctcccaccggcccgcttgcccgccccggctctcacagcgtggtttgcatccctggcaccacgtgtctgaaggctgagaagacccacatgctgtcagggcactttgcttgcagtagagatatctctaatgagggaatacagctttgtaaaacacaggcaaatacataaataaacccaaagcaggattccttaagaactcaccaggtgataaaagcaagttgcctaagggtcagggggcttcatgattccggctccataaagaacagatgaagactacaaatgtgttggggccgttaggagtggttaccgtgagagagcccattcccccgacacctactccggcttgcgttctggaaggccaggccattgctcggcgtctgaaaccattcggtgtccagagatttctgtacacagggcgccagcccaggcctgaggaagcagcagaattccaggcagagtttgtgtctacccctgagctggctgcccaatctgatttcatcgtcgtggcctgctccttaacacctgcaaccgagggactctgcaacaaggacttcttccagaagatgaaggaaacagctgtgttcatcaacatcagcaggggcgacgtcgtaaaaccagggacgacctgtaccaggcccttggccagtggtaaaaattgcagctgctggactggatgtgacgagcccagaaccactgccttacaaccaccctctcctgaccctgaagaactgggttgattctgccccacattggcagtgccacccacagaacccggcacaccatgttccttggttggcagctaaccaacttgctgcctgggcc

SEQ ID NO: 70358 - DNA, 689 bp, Homo Sapiens
ctggtcatcaagttggacttccctatgtgaaaccataaactaacctgaggaagatactgaggggagaggggctgtgtaacggtgactgcctctaggccagccttctgccaggcagagaacaggaagctggcatgcagggtgtctggcactggtaaaatgacaccatgtttgtaagtgcattgtcctggcttttggtgggccgtgcaggagttcctgcctgaattatagtctttccatctcatatcttcatgtggagccctcaagctttagacaagtcttttatctccgttttcaggtggctcccattatcttgagacctcataatgctgctttccttaaatttgttttacactgacgctagtcagcacagagctactcacatttctggccaccactcggctccattatcttgacttctctcctgccctcttacgttgcatttcttcttttacaccactgttttacatgttgctcctccttagccattggttcctgttggcttttgttcttttacctgagttggaaatctgggaagacaattccaactcagtggtctgggcattctgatggtgctgccaaccccagggcaggaagaacagtgagtgagatactgtgccattacctgcttctccagccttgaagcccaaagcagccaaataactctcaaatgacgatcacttttactcaaa

SEQ ID NO: 70359 - DNA, 685 bp, Homo Sapiens
agtctccacttcagaggggatgcgaagaggtcggcccagctccggtgaccatgaaggtggcacaggaattacagtgtgaatggctgtgtcagatgttttcgtacctcagattaaaaatattgctgaggtcagacgccacaattttcatgactttcttcagaagtagcacattttcgtgacttccgctgtcctctgaaaaacaaagttatttggaacatgttcatgcaaaagtgattctgaccaagtctaaatcgagcttttctactgacatgaaactgttggaaactgatctcattttataagaaatgattttcccctcaaggaggcgtctgtaattccagaacagtccagacatcagctgtacctcatgctcagtagtttttatttgagtttcttttgtgagttaactatgggagatttaacctcttttgccaaagagggaagtgtgtgtgtttttttaatagaaaatatggaccaaaaatttttttccctgaagaatgtattataaccctatttgtgtggttattacatcctgtgaaatgtatatatgttaaaataatgggggtgctggaaggtcatggcagactagctgctggttagtgtggaggggaaatggtttactttgtagagtttacatggttttatgcgcacactaattgtaataaactatgccaaaccaaaaaaa

SEQ ID NO: 70360 - DNA, 1290 bp, Homo Sapiens
  misc_feature (46)..(89): n is a, c, g, or t
  misc_feature (93)..(127): n is a, c, g, or t
  misc_feature (179)..(197): n is a, c, g, or t
agggggaggaaaactgaataccactaagggcgctagctcggtttgnnnnnnnnnnnnnnnnnnnnnnnnnnnnnnnnnnnnnnnnnnnnccgnnnnnnnnnnnnnnnnnnnnnnnnnnnnnnnnnnncagtcgacggtaccggacatatgcccgggaattcggccattacggccggggnnnnnnnnnnnnnnnnnnntgttggctggtattacatcaaacctactctggataaattttccagtagggcatctgaaatggcttgggcaaaagcaaaacaggttatcaatacaccaaggacatcaagtagttttaatggcaactacagtgttgagtgcttttttactggggagaaaaatcctagcagaacctgctactctgggcgcattaggtagttttatgcaactatagtattaagagttttattgggaagaaaaaacactgtcagagcttactggctccagaccttttttttcaatagaagagacggggtaaaaatgatgcaggggctgaatgaaagccagctctgctccaggggctctctgagttgagcatgcatcagttaccttaagggcttgttaaaacatcgctaggctccaccctgtttattcaataagtttgttatgggatataagaagatgcattttattaagttccccagtgatgctgctgttctactataggaaccacacttgaagaactagttctacaattcagctgtatgttgtaaaggagtcaagtcaatgaaggagttataaagagttgctgaaaaatggagtaacagtgtatgggacttcacatcagttctccttattgattgttagtttgatccctcttgttcttttgttgtaaacattttctataattaggaaatgccatttaagagtgagagaggtatatatctatgagccattgtgtttggtgttttacaagaactttaccatactggtgtgtagtccattctgtacagtttaaaagtgattcacgatttgcaggctttttatcagatcacaaaaaaatcagtctttaagcatttgcttggtaaggtttcttaagattaggtttataatacaaccatctgtaatgtatctctcgtttgagcttgtgggccatacaattcattaactagatgaatacattgtggacagcatcctcactacccctctctactcactcacaaagaaccatgatacactggaatgtttttctctggaatcctctttctactcttgtattaaaatttttccccacttcatgattatattcaaaataaacaactacatcattaaaaa

SEQ ID NO: 70361 - DNA, 557 bp, Homo Sapiens
gagaccctggcagagaagaaacgcatggccatgccaatgaggcagaaggccctgggcaccctgggcataccgacaaatgaaaagggccaggtcgtgaccaagacagcactcctgaagcagatggaagagctgatcgaggagcctggcctcacgtgctgcatctgcagggagggatacaagttccagcccacaaaggtcctgggcatttataccttcacgaagcgggtagccttggaggagttggagaataagccccggaaacagcagggctacagcaccgtgtcccacttcaacattgtgcactacgactgccatctggctgccgtcaggttggctcgaggccgggaagagtgggagagtgccgccctgcagaatgccaacaccaagtgcaacgggctccttccggtctggggacctcatgtccctgaatcagcttttgccacttgcttggcaagacacaacacatacctaggagccatgagttgtcccggccagcttcatacttgagtgtgcacatcttgagaaataaacaagtgacttaacacacattgaaaaaa

SEQ ID NO: 70362 - DNA, 877 bp, Homo Sapiens
  misc_feature (843)..(843): n is a, c, g, or t
ggagagagtatgaagtcgacggcgcgccgaattcggcacgagggctgaatggatacctgtgcttgcggaagctggtggtgcagaggaccaagctgatcgatgagacgcaggacatgctgctggagatgctggaggacatgaccacaggtacagaatcagaaaccaaggccttcatggctgtgtgcattgagacagccaagcgctacaatctggatgactaccggaccccggtgttcatcttcgagaggctctgcagcatcatttatcctgaggagaatgaagtcactgagttctttgtgaccctggagaaggatccccaacaagaagacttcttacagggcaggatgcctgggaacccgtatagcagcaatgagccaggcatcgggccgctgatgagggatataaagaacaagatttgccaggactgtgacttagtggccctcctggaagatgacagtggcatggagcttctagtgaacaataaaatcattagtttggaccttcctgtggctgaagtttacaagaaagtctggtgtaccacgaatgaaggagagcccatgaagattgtttatcgtatgcgggggctgctgggcgatgccacagaagaattcattgagtccctggactctactaccgatgaagaagaagatgaagaagaagtgaataaatggctggtgtgatggcccagtgtgggggcctggaatgcatgcttacagactcgcaagatcaagatttcagcaagacccaccttctacatgctatgaaatgtcagtacgcgtgaaggaaagtcacgcacactgtcactgaatgacactgactcgctggaccctactgcttactacnaacagactggtcactgtacagctacctgattcaa

SEQ ID NO: 70363 - DNA, 3108 bp, Homo Sapiens
ggcctgagtggcgaatccggcacgaggtggatacctgtgcttgcggaagctggtggtgcagaggaccaagctgatcgatgagacgcaggacatgctgctggagatgctggaggacatgaccacaggtacagaatcacaaaccaaggccttcatggctgtgtgcattgagacagccaagcgctacaatctggatgactaccggaccccggtgttcatcttcgagaggctctgcagcatcatttatcctgaggagaatgaagtcactgagttctttgtgaccctggagaaggatccccaacaagaagacttcttacagggcaggatgcctgggaacccgtatagcagcaatgagccaggcatcgggccgctgatgagggatataaagaacaagatttgccaggactgtgacttagtggccctcctggaagatgacagtggcatggagcttctagtgaacaataaaatcattagtttggaccttcctgtggctgaagtttacaagaaagtctggtgtaccacgaatgagggagagcccatgaggattgtttatcgtatgcgggggctgctgggcgatgccacagaggagttcattgagtccctggactctactacagatgaagaagaagatgaagaagaagtgtataaaatggctggtgtgatggcccagtgtgggggcctggaatgcatgcttaacagactcgcagggatcagagatttcaagcagggacgccaccttctaacagtgctactgaaattgttcagttactgcgtgaaggtgaaagtcaaccggcagcaactggtcaaactggaaatgaacaccttgaacgtcatgctggggaccctaaacctggcccttgtagctgaacaagaaagcaaggacagtgggggtgcagctgtggctgagcaggtgcttagcatcatggagatcattctagatgagtccaatgctgagcccctgagtgaggacaagggcaacctcctcctgacaggtgacaaggatcaactggtgatgctcttggaccagatcaacagcacctttgttcgctccaaccccagtgtgctccagggcctgcttcgcatcatcccgtacctttcctttggagaggtggagaaaatgcagatcttggtggagcgattcaaaccatactgcaactttgataaatatgatgaagatcacagtggtgatgataaagtcttcctggactgcttctgtaaaatagctgctggcatcaagaacaacagcaatgggcaccagctgaaggatctgattctcccagaaggggatcacccagaatgcacttgactacatgaaaaagcacatcccctagcgccaagaatttggatgccgacatctggaaaaagtttttgtctcgcccagccttgccatttatcctaaggctgcttcggggcctggcatccagcaccctggcacccaggttctgattggaactgattccatcccgaacctgcataagctggagcaggtgtccagtgatgagggcattgggaccttggcagagaacctgctggaagccctgcgggaacaccctgacgtaaacaagaagattgacgcagcccgcagggagacccgggcagagaagaaacgcatggccatggcaatgaggcagaaggccctgggcaccctgggcatgacgacaaatgaaaagggccaggtcgtgaccaagacagcactcctgaagcagatggaagagctgatcgaggagcctggcctcacgtgctgcatctgcagggagggatacaagttccagcccacaaaggtcctgggcatttataccttcacgaagcgggtagccttggaggagttggagaataagccccggaaacagcagggctacagcaccgtgtcccacttcaacattgtgcactacgactgccatctggctgccgtcaggttggctcgaggccgggaagagtgggagagtgccgccctgcagaatgccaacaccaagtgcaacgggctccttccggtctggggacctcatgtccctgaatcagcttttgccacttgcttggcaagacacaacacttacctccaggaatgtacaggccagcgggagcccacgtatcagctcaacatccacgacatcaaactgctcttcctgcgcttcgccatggagcagtcgttcagcgcagacactggcgggggcggccggggagagcaacatccacctgatcccgtacatcattcacactgtgctttacgtcctgaacacaacccgagcaacttcccgagaagagaagaacctccaaggctttctggaacagcccaaggagaagtgggtggagagtgcctttgaagtggacgggccctactatttcacagtcttggcccttcacatcctgccccctgagcagtggagagccacacgtgtggaaatcttgcggaggctgttggtgacctcgcaggctcgggcagtggctccaggtggagccaccaggctgacagataaggcagtgaaggactattccgcttaccgttcttcccttctcttttgggccctcgtcgatctcatttacaacatgtttaagaaggtgcctaccagtaacacagagggaggctggtcctgctctctcgctgagtacatccgccacaacgacatgcccatctacgaagctgccgacaaagccctgaaaaccttccaggaggagttcatgccagtggagaccttctcagagttcctcgatgtggccggtcttttatcagaaatcaccgatccagagagcttcctgaaggacctgttgaactcagtcccctgaccaccacacagcagctgcggcggcgaagacgaagctggcttgccttccaccctctgttctccctccttgtgcattaagttccctccgcgggatgctgcattgttaccccgccctcccctctctcatttttcttggtgtggcttggggtttttaggcttcctgttttatctcgtgtgtgtggtgcaccagctatgaggttgtctgtaacccaagccatcaaagggcctgtacatacctaggagccatgagttgtcccggccagcttcatacttgagtgtgcacatcttgagaaataaacaagtgacttaacacacattgaaaaggaaaaaa

SEQ ID NO: 70364 - DNA, 1469 bp, Homo Sapiens
  misc_feature (1204)..(1288): n is a, c, g, or t
  misc_feature (1305)..(1306): n is a, c, g, or t
  misc_feature (1309)..(1309): n is a, c, g, or t
  misc_feature (1311)..(1313): n is a, c, g, or t
  misc_feature (1315)..(1315): n is a, c, g, or t
  misc_feature (1317)..(1319): n is a, c, g, or t
  misc_feature (1371)..(1387): n is a, c, g, or t
gctaggtagcgaggcctgggtggtgaattcggcacgaggctgcggcgcatggcggccctgggacatcttgctggggaggcagcggcggccccaggcccgggtactccctgcgcgtcccgcggagcccggcttcccggcccagtttccagcgcccggaatccttccactgtctgtctctgcccagagcaacctacgtgcagtaacgctgactccagagcgcacccgttgggcgatgaaggcggcacagcgtcgaaaaaacaaaagaataagaagaaaacgcggaacagggcctctgtggcaaatggaggcgagaaggcctcagagaaactcgccccagaagaagttcccctaagcgctgaggcccaggcacaacagttggcccaggaattggcttggtgtgtggagcaactggagctgggcctcaagaggcagaaacccaccccgaaacagaaagagcaggctattggagcaatccgaaccctgcgcagcaaaagaacgcccttgccccggaagaggcagctgatgcactccttgtttggagactatagggctcagatggaagccgaatggcgtgaggccctgcgggctctcagagctgctgcttattcagcccaggtgcaacctgtagatggagccaccagaaagaagagccaaagggtctgcaggcctcgctctatatggagagccaaagccactctggacatgcctgatgaagagtttaggttcaatttcttttagcgtctccccgaacctgaaacaatccccctcccttggggtggtgtaggggtttgttttgagtgcagagcctttccaggacttctgttgtcagagaaccctggagttggtctgtccctggctggtccaaggatttgtagctgttgtgaaggtgtgagaccatcagataggcaaaagaccccgttcgttttctgatgaaatgttctctctttcagaagagagagagaggtgcatttagaaaatatgcaataaattgaagtgagtgttcaaagtattgtagaaggaatattgtactcagtctttaggattagattaagtggctgttggtaacaaagattagtggagaagctgtataatcgtacactggttttcacttttgaaaggaatccctgtcaaatggtttagtgcttaatgctgttatgtcatattgccctaatctctatttttgataaaattggataaggagtgnnnnnnnnnnnnnnnnnnnnnnnnnnnnnnnnnnnnnnnnnnnnnnnnnnnnnnnnnnnnnnnnnnnnnnnnnnnnnnnnnnnnnctccaaaacaccaaacnnttnannncncnnncccccgtgggggcgcccctccggccccaaaaaaattttcttaaagacatttnnnnnnnnnnnnnnnnncccccgaggaggaaaggggaaccgggtggctttccggttgtttccaagggaaaccccgggaccaaagactaggggcgtgggg

SEQ ID NO: 70365 - DNA, 1671 bp, Homo Sapiens
  misc_feature (1146)..(1157): n is a, c, g, or t
cagcagaagatgaaaaaaatactgcactaaagaccattcagaaggcagctctcctttctccaggtgatcctgctatctgggctgggctaatggcagcctgtcacgctgatgataaactggccttagtgaacaacactcagccaaagaggatagatttatacttggcactgttatctgctgtttctgcttcaattaaagacgaaaaattctttgaaaattacaaccagtcccttgaaaagtggtctctctcacaagctgtcactggtctaatagacacaggaagaatatctgaagctgaaactctctgcacaaagaatttaaaaagtaaccctgatcagccagccgttatcttacttgtgagaccaagttcagtgtaaaccactcctggagtcacaaaagccactcccagatgctgtacttgaagaactacaaaaaacagtcatgtccaactcaacctctgttccagcttggcagtggctggcacatgtgtatcaatcccaaggaatgatgagagctgcagagatgtgttacagaaagagtctacaattggcatcccaacggggcagttggagtgggaagctctcaagtctgttgagactagcactacttgcattaaaagtctgtatggctaacatttccaatgatcactggccatctttggttcaagaggctacaactgaggccttgaaagctttgcttttgtccactggctgttcttttacaagctttgttacaattcaaacgcaaaatgggggcaagagagacacggcgtcttttggaaagagtggtatatcagcctgggtatcccaaatctattgcatcaactgcacgttggtacctactgagacacttatatgccaaagatgactatgagcttattgacgtgctggtaaacaatgccaaaactcatggagatacaagagcattggaactgaatcagagattgtcctcacaataacattggattattttatagtaaggaagcaaagaaaaagctgtaagaatgaagcaatgaatcaagacttctacccaaagcaacatttttttaaactatatttattccttttctaaaggaatctagagaagttgaagtttttaagttaggaatgcaattttctgttaactccaaacctgattttaatctgnnnnnnnnnnnntttaatttgggaaaaccagaatgaaaggaaaaccattattgccttggttgcttaacattatttgtaaaccattattttctgcatcttgcatggtgcacaatagaatatcttttactgtaatcccttacaataaagccttaatagccattttctatgtaatatgcaaaagtagattagcacaatgcacaattttcttttgttaaaaatcaaattcaaagatttaattcttcctatgaattctaaagttcggcaaaccaactcatcataaaatccaaataatcttgtaacctatttatctagtgattcatctccaattctgttgaaaaagcataacataaatgttgatgagactagactctaatggatatgtttatataattccaaacactcaggtgtgtgaatgcatttaaaaacattaatggaaaataatgctgataatatttaattgatcatgcaattccttcaattatgatggaaagacttgaactttctgaaataaaacaaaaatacagca

SEQ ID NO: 70366 - DNA, 857 bp, Homo Sapiens
  misc_feature (713)..(713): n is a, c, g, or t
ggatccccattatctcacgaaaactcagaaaggttaaacaacttgcctaagtaacatacagctaattagtcgaggagcctgacgcatgttgctctagcctggtcacagttacagaggtggcaagcaatggcctgaacaggacgaacaaccaaatacccaggctggtggctcttaaacatggtggggtcagctaacgacagcaaccagggtgggcactggtgcccctcgcccccggctggtgccctaacatctcccttttctctaccagttcagaatctataacgtgacctacctagaaccctccctccgcatcgcagccagcaccctgaagtctgggatttcctacagggcacgggtgagggcctgggctcagtgctataacaccacctggagtgagtggagccccagcaccaagtggcacaactcctacagggagcccttcgagcagcacctgctgctgggcgtcagcgtttcctgcattgtcatcctggccgtctgcctgttgtgctatgtcagcatcaccaagattaagaaagaatggtgggatcagattcccaacccagcccgcagccgcctcgtggctataataatccaggatgctcaggggtcacagtgggagaagcggtcccgaggccaggaaccagccaagtgcccccttcaagggacggcaggaggaggggtgttctggaaacgtggactgctggccaagcccnctgagtttcactggtgtgtcagacactggaagaattgtcttaccaagctcttgccctgttttttggagcacaacatgaaaagggatgaagatcctcacaaggctgccaaagagatgcctttccagggctctggaaaatcagcat

SEQ ID NO: 70367 - DNA, 2367 bp, Homo Sapiens
taggctaggtagcgaggccgggggtgaattcggcacgaggcggagcggggaacgaggccgtcggccattttgtgtctgcttcctgtgggacgtggtggtagccgttgggttgggaaagtgagggatttttggcctcgtttctcctgcttcttttctcctcccttttactttgccggtagaacacagttatgggtcgcaagaagaagaagcagctgaagccgtggtgctggtattgtaatagagattttgatgatgagaagatccttattcagcaccaaaaagcaaagcattttaaatgccatatatgtcacaagaaattgtatacaggacctggcttagctattcattgcatgcaggtacataaagaaacaatagatgccgtaccaaatgcaatacctggaagaacagacatagagttggaaatatatggtatggaaggtattccagaaaaagacatggatgaaagacgacgacttcttgaacagaaaacacaagaaagtcaaaaaaagaagcaacaagatgattctgatgaatatgatgatgacgactctgcagcctcaacttcatttcagccacagcctgttcaacctcagcaaggttatattcctccaatggcacagccaggactgccaccagtaccaggagcaccaggaatgcctccaggcatacctccattaatgccaggtgttcctcctctgatgccaggaatgccaccagttatgccaggcatgccacctggattgcatcatcagagaaaatacacccagtcattttgcggtgaaaacataatgatgccaatgggtgggaatgatgccacctggaccaggaataccacctctgatgcctggaatgccaccaggtatgcccccacctgttccacgtcctggaattcctccaatgactcaagcacaggctgtttcagcgccaggtattcttaatagaccacctgcaccaacagcaactgtacctgccccacagcctccagttactaagcctcttttccccagtgctggacagatggggacacctggtacaagctcaagtacagcttcatccaattccgaaagtctgtctgcatcttctaaagctctgtttcctagcacagcacaagctcaggcagctgtccaaggacctgttggtacagatttcaaacccttaaatagtacccctgcaacaactacagaacccccaaagcctacattccctgcttatacacagtctacagcttcaacaactagtacaacaaatagtactgcagctaaaccagcggcttcaataacaagtaagcctgctacacttacaacaactagtgcaaccagtaagttgatccatccagatgaggatatatccctggaagagagaagggcacagttacctaagtatcaacgtaatcttcctcggccaggacaggcccccatcggtaatccaccagttggaccaattggaggtatgatgccaccacagccaggcatcccacagcaacaaggaatgagacccccaatgccacctcatggtcagtatggtggtcatcatcaaggcatgccaggataccttcctggtgctatgcccccgtatgggcagggaccgccaatggtgcccccttaccagggtgggcctcctcgacctccgatgggaatgagacctcctgtaatgtcgcaaggtggccgttactgatcttacttcatccagtctaataggtttggagattaaaccttttctcaacttgtgctgtttatatagccaagcttccgtcaataaggcttcattgtgactttaacaaacattatcttcccacataccaggaactattggacatttattttacatgggaaaaattatttggaataataaagcaggaacttttcctgaagttgcaatttatactgtatggcttctttttcatgtttcatctaggtttttagaagtgaagtatagtaaatttggttcgttaaattgtgaaggcgctggaattacatgaacataccaccctagtaaaggcaagttctgtaagcttacattgctatttgtaaagtttgccttcacagcatttcagatgctgttggacttcatgtccccaacctagcttggtgagggctgtaactgtttccaagtacttgtacattggaagtctgaatgtgtaacaatatttaatgtatttagagttcctcatgttgcagggtttaagaaatctgacccaccaaggtcatgtgacttttctgtactgttaaacttcattgtaataaaatgagagaaaaatttatgcctttttattcataacccagctgtggaccactgcctgaaaggtttgtacagatgcatgccacagtagatgtccacataataaaattcatagttaccaatgcaaaa

SEQ ID NO: 70368 - DNA, 1857 bp, Homo Sapiens
ccccactgctagccccaaacccacatttctctggggacacagcactgctggcaagcaggcttgagaaggccttgtaaccagcctctcctggggacccaagcccaccaccgcactggcctgggtgccaccctgctccaccgcatgtacaaactcctgatagccactggtgggggccgagacgggggctgcagctgccccatgctggaggacatttcggcggaggatctgctcccaggtttctggctcaggttggggcacagtggttggctcagagagctgggggacacagggcatctcgggttctacttcctccaggtgtctggccagcagtgggtctggacccagctctctgggacacggtgactggctcagggagttgctgaagctgcggtaagcagggttgcctgcgatgacgaggggcgtctctgtgcaagtcaggttgtctggactctgggtcgggctggcaggaggacttggctccaggtggagaggctgctccttgccccagggaggtgcctccttgggccctgcacttgggaactcatcccagggcatgtgagcactcgtacttcccgaaggtgggagaaggcgtgactcccccatgtcctgctggcaaaagcccccattctcctctccgagaaggtccaggaacaggctctctgttagccgggccacaatgcccgcccttccctcctggaagtcatccctgctgctctcaggcgatgcacagaagctccctttttcttcctctacctcctcctcctcctcacactccaccggggcctcaaacaactccacacatcgcaccacgctgatgctctctggccagaggactgtcttgctgatctccactgggcaccatgctgattttccagagccctggaaaggcatctctttggcagccttgtgaggatcttcatcccttttcatgttgtgctccagaaaacagggcaagagcttggtaagacaattcttccagtgtgggcacttggctggttcctggcctcgggaccgcttctcccactgtgacccctgagcatcctggattattatagccacgaggcggctgcgggctgggttgggaatctgatcccaccattctttcttaatcttggtgatgctgacatagcacaacaggcagacggccaggatgacaatgcaggaaacgctgacgcccagcaggaggtgctgctcgaagggctccctgtaaggagttgtgccacttggtgctggggctccactcactccaggtggtgttatagcactgagcccaggccctcacccgtgccctgtaggaaatcccagacttcagggtgctggctgcgatgcggagggagggttctaggtaggtcacgttatagattctgaaatctgccgggtcgttttcactccaaatgttgactgcataggtgagatgattatacaggtaattgtcagggggatacgggttgctccaggtcagcagcagagtgtcggagacattggtgtgaactgtcaggtttcctggggccctgggtttcacatgctcgctgggcttgaaggagccattccacagcagctgctgcccagcccacaggtccagtgtatagttatccgcactgaccacgtcatccatgagcaggtggcacacgcaccccgcgcctccgttgttctcagggacacacgtgtgggcttcggagagcagaaaaaccagctggtacaacaggcggagctcggtgctgcaattggtgggaccattcatcttccactcgcaagtagagatgctcatgtagtcggagaccttcatgtaattccagcgccttcacaatttaacgaaccaaatttactatacttcacttctaaaaacctagatgaaac

SEQ ID NO: 70369 - DNA, 908 bp, Homo Sapiens
tcgtggacatctggcacgtgggcctctgtgtcctgcactgttaccagccactcctccccagtgcggcgggacactcccctgaagtcccggaagttccgccgagcccggaggtgcaggctgtcttttccgtaaggatgacggcgtccaccaaatccagaacctcctcaaacaccgctgggaggtacgcccctactgtggtgaccagccattcttcccctgtcaccctctccttgccgtcccggtcccagcactccttgcgggccctgagccgcagagcctggttctgcctgatgatggtggcctgaatgatctccacgacctccacttccttccgggggatgtacgtgccaggtccctcgaaaagccactcatctcctgccaccaccttgtctccatctttatcctcaaaatcaagcagcgcctttagatggagggcagtgttgggcagaaccacctgcaggggtgtgatgtccttttccagcacctcccctgggtacagggggaaggggtcctgggccagccggatctcgaggtcagcgtggcgaagccgaacttgccctgtgacatcaaacagcaccaagccctgggcatcccgagacacagggttggccactgtgcagtagtgacgtggggggacggtcaccatgcgcatgggggcaaacagtaccctctcattgtcctgccggatgtaggtctttggcccgacctccacacgggacacgttgctgttctggtccagcacatggatatagtggtatggggggatgcggatgatgaactcttcagttgccatggtgactcctaagcccagggctcacaagaagatgacctggtaggtgggggagacgacacaggatgaacctggggagcatctagaagtgcaggtagctgcaacaaacgcctcagat

SEQ ID NO: 70370 - DNA, 1882 bp, Homo Sapiens
aagtgttgaaattgtaaatgcccagaaacttccattgtattaatcaggagttagcgcagtacaggcaccacgtggttgtctccaggagcttgaggggcctgagcagactggggggatatcccctccccagggctgggcccactggccacccttctgcccaggggctgaccctcgggccccatccccagcagcccaaaggctgtgttgaagaggttgatgggagtggagccatcggtgatgagggttgatttcaggcccagggactggagcagttttacctgcatctcaggcccagccacagcaaggtccctgatggtgctggggcctatggcctctgtcatctgcttgaacttcttcacctccacctcagccagctgctgagccttgctcacctccagctccagctgggcccgggcatagaccagttccagctctcggaccttctggaccctctggagctcagcctccgtttcaatggccaaggcctgtgcttttagcttggcctgcagcacggacccttctccctcaatccgggctgcctccgcacgggactcggcctccgccttggcagtcccggtgctctccacggccatgctcagagcctccagctccaaaagttccttgcgagctttctcggcttctgactggtccaggatcttctgccgctcaagccggccgcgggcttcctgctccagtctctgagcctcatgcttggccgccgcttcctgggagttggtggtgatctcgatggccagctggacgctgcgttgcagggcgtcccgggtcctctgatccacaggctccactgactgcacgtccacactgctgaccaccagcccgttttgggggaagacagcctggtcccggggcctgggcagggccatgccatcggggcccttcgcttccgaggtctcaaagccaaagacagcagtgcgaatgatgcgggctgagttcttatggaagtcatcgaaagtgacagaggccacggccccccgcacccgggatgcgatggctttgcaggcatcacctacaaagtctggcactgaaaaggagcttggccgtctcttgggggtccttccggtcattcacctcaaagtgccagttgtaggccagctgcagttgcagcctggcatgatccgccgtttcgatggtgatgacgtctgtgaagaagtcaggccccagcagcaggcagagcgcacggcgggcatggggacgcttgggccgcccagctgagagggacaacactgtgaactgctcctcaggacccagcgacaccagctcaggcccgaagaccacgcgggctcgcttctctcggtagtcgtacacctgcaccgcagcgttgtggggcacgcggtagctgaccacacgggtcttgttccggggcgccaagggctggaggctcttagctgtgtccttctcacccctgtctgccagagggtcctgccccttgttcagcagctcctccaccccgggaggcagctctttctcccacaggacttcgtcctgggtcagcatgtaggtgcttccaatcacagcgcgcacctttccggtcttgacatcctgcacatagatgccctcgttctcgtctagagggatggcctggcgctcctccaccacctccactttggcagatggcacatactccaggggtccgcggatgagccagtggtccccagcctggtgtgagaccttctcctcatcctccccctcctccaggggggatgcggatgatgaactcttcagttgccatggtgactcctaagcccagggctcacaagaagatgactggtaggtgggggagacgacacaggatgaacctggggagcatctagaagtgcacctcgtgccggaatcgccacccaggcctcgctaccttggaccg

SEQ ID NO: 70371 - DNA, 1136 bp, Homo Sapiens
  misc_feature (921)..(945): n is a, c, g, or t
gtccccatctgaggcgttgttgcagctacctgcacttctagattcatcttcttgtgagccctgggcttaggagtcaccatggcaactgaagagttcatcatccgcatccccccataccactatatccatgtgctggaccagaacagcaacgtgtcccgtgtggaggtcgggccaaagacctacatccggcaggacaatgagagggtactgtttgcccccatgcgcatggtgaccgtccccccacgtcactactgcacagtggccaaccctgtgtctcgggatgcccagggcttggtgctgtttgatgtcacagggcaagttcggcttcgccacgctgacctcgagatccggctggcccaggaccccttccccctgtacccaggggaggtgctggaaaaggacatcacacccctgcaggtggttctgcccaacactgccctccatctaaaggcgctgcttgattttgaggataaagatggagacaaggtggtggcaggagatgagtggcttttcgagggacctggcacgtacatcccccggaaggaagtggaggtcgtggagatcattcaggccaccatcatcaggcagaaccaggctctgcggctcagggtcccgcaaggagtgctgggaccgggacggcaaggagaagggtgacaggggaagaatggctggtcaccacagtacgggcgtacctcccagcggtgtttgaagaggttctggaattggtggacgccgtcatccttacggaaaagacagccctgcacctcggggctcggccggaacttccggggatttcaggggagtgtccccgccgcatctgtgggagggagtgcctggttaacagcggcacgtacactgatggcccatgtggctagaatgtttcacccaggaggctccctccgggcgctccttccctttttnnnnnnnnnnnnnnnnnnnnnnnnnatccctgtcgttgtttccctcccatccctgtttcggtacctgtttgggcctataatatccaattttggcccccccataagtctttgtgtgttccacctttgtatcatccacacctccttccttttttcccttccctcttaccgacaatgtatcacctgttcccccacattttctaccctttccccccattt

SEQ ID NO: 70372 - DNA, 703 bp, Homo Sapiens
  misc_feature (27)..(27): n is a, c, g, or t
ctgccttgctcctggctgtggggctgncactgttggtgcggaagcttcgggagaagcggcagacggagggcacctaccggcccagtagcgaggagcaggtgggtgcccgcgtgccaccgacccccaacctcaagttgccgccggaagagcggctcatctgaacgctggggcctgctgcagccaccaacactgcccaggactgcgggttgctggcttgtacaccgcagctgccaccgagacaccagcctctgatggctcaggaggacttgtggggagaggctgggggcacccatgtggtgggctctgtgcagcatgttgcctctgcttggctgtgcctgcagctcagggtgctggggctcgggacccacccccctgcttgcggaaccaacttttctctgtgtgtccagcaggccccacaaccccctctcctttctttcagttctcccatgcagccgaggcccgggcccctcaggactccaaggagacggtgcagggctgcctgcccatctaggtcccctctcctgcatctgtctcccttcattgctgtgtgaccttggggaaaggcagtgccctctctgggcagtcagatccacccagtgcttaatagcagggaagaaggtacttcaaagactctgcccctgaggtcaagagaggatggggctattcacttttatatatttatataaaattagtagtgagatgt

SEQ ID NO: 70373 - DNA, 727 bp, Homo Sapiens
gacggaccgagggttcgagggagggacacggaccaggaacctgagctaggtcaaagacgcccgggccaggtgccccgtcgcaggtgcccctggccggagatgcggtaggaggggcgagcgcgagaagccccttcctcggcgctgccaacccgccacccagcccatggcgaaccccgggctggggctgcttctggcgctgggcctgccgttcctgctggcccgctggggccgagcctgggggcaaatacagaccacttctgcaaatgagaatagcactgttttgccttcatccaccagctccagctccgatggcaacctgcgtccggaagccatcactgctatcatcgtggtcttctccctcttggctgccttgctcctggctgtggggctggcactgttggtgcggaagcttcgggagaagcggcagacggagggcacctaccggcccagtagcgaggagcagttctcccatgcagccgaggcccgggcccctcaggactccaaggagacggtgcagggctgcctgcccatctaggtcccctctcctgcatctgtctcccttcattgctgtgtgaccttggggaaaggcagtgccctctctgggcagtcagatccacccagtgcttaatagcagggaagaaggtacttcaaagactctgcccctgaggtcaagagaggatggggctattcacttttatatatttatataaaattagtagtgagatgt

SEQ ID NO: 70374 - DNA, 754 bp, Homo Sapiens
  misc_feature (714)..(714): n is a, c, g, or t
cgtggcatgctggggcgtcctacgctgccgtaccccttatcgggctctattgccagactactggacttggaggatcagcagttgcaggtcatgcctcagacaagattgaaaacatggtgcctgttaaagatcgaatcattaaaattagctttaatgcagatgtgcatgcaagtctccagtggaactttagacctcagcaaacagaaatatatgtggtgccaggagagactgcactggcgttttacagagctaagaatcctactgacaaaccagtaattggaatttctacatacaatattgttccatttgaagctggacagtatttcaataaaatacaggtattgtcttccaggcttcaaagctgcacagagtctacgttttagagagttggcacctttgatgtggtagtgagctgatcatccactttcttctaaaataaagagaagaaaatggccagtattcatcctgtccttctctttccccattccttgataactctcttgtctttactgggaagctggagagtcacagtctagtagaagaaagattagaaaaatttcaactgtaggtgcctttgcaacctatcctgggagaccctaaaacatatttagttttagtgcctagagattttcactcctctaacatctctggatacagtgtccctggtcaacatgaagaagttacagaagaacgctttctgatcctggcccctanaagaatttacttgtgctaagtaataaaattcctattgatc

SEQ ID NO: 70375 - DNA, 751 bp, Homo Sapiens
actggccattttcttctctttattttagaagaaagtggatgatcagctcactaccacatcaaaggtgccaactctctaaaacgtagactctgtgcagctttgaagcctggaagacaatacctaccaacatgtcaaagccatggtggcacatttctgctataatgaagattaaatagaataacagttccaggataacactgattcctgacaacagcgtgagatttcaacagaacttgtttggaacaaatactcacttaaaacttcagcagaagaaaaattacttagtccttaggccaaccaatttaactgcagtgtcatgtttcacaggccttcctacatttagaaatcgtcacacagctgtgataagagtagattattttactatgaaataattctgaatagatgaaagcataaaatgtgagaaactgaatgtattattcaggaagaatactgagtgccttcatttaactaaagttgaatgtaaaagtcaatttgcacttctttataatcctctggtttagaattataaattgttaaaaccttgataattgtcatttaattatatttcaggtgtcctgaacaggtcactagactctacattgggcagcctttaaatatgattctttgtaatgctaaatagcctttttttctctttttactgcaacttaatatttctatttagaacacagaaaatgaaaatatttagaataagttgtacatttgatgacaaataaatcactattaaaacaaa

SEQ ID NO: 70376 - DNA, 1045 bp, Homo Sapiens
  misc_feature (36)..(36): n is a, c, g, or t
  misc_feature (38)..(38): n is a, c, g, or t
  misc_feature (69)..(70): n is a, c, g, or t
  misc_feature (98)..(98): n is a, c, g, or t
  misc_feature (110)..(481): n is a, c, g, or t
gactagctcgatttttgtgtcgtcaagggcgggacntntgaaaacgccagcacgcgccttttacgtctnngcctttgttgccttttgctcacatgtcnttcctgcgtatnnnnnnnnnnnnnnnnnnnnnnnnnnnnnnnnnnnnnnnnnnnnnnnnnnnnnnnnnnnnnnnnnnnnnnnnnnnnnnnnnnnnnnnnnnnnnnnnnnnnnnnnnnnnnnnnnnnnnnnnnnnnnnnnnnnnnnnnnnnnnnnnnnnnnnnnnnnnnnnnnnnnnnnnnnnnnnnnnnnnnnnnnnnnnnnnnnnnnnnnnnnnnnnnnnnnnnnnnnnnnnnnnnnnnnnnnnnnnnnnnnnnnnnnnnnnnnnnnnnnnnnnnnnnnnnnnnnnnnnnnnnnnnnnnnnnnnnnnnnnnnnnnnnnnnnnnnnnnnnnnnnnnnnnnnnnnnnnnnnnnnnnnnnnnnnnnnnnnnnnnnnnnnnnnnnncccaagaattcggcacgaggctgtgtgacgatttctaaatgtaggaaggcctgtgaaacatgacactgcagttaaattggttggcctaaggactaagtaatttttcttctgctgaagttttaagtgagtatttgttccaaacaagttctgttgaaatctcacgctgttgtcaggaatcagtgttatcctggaactgttattctatttaatcttcattatagcagaaatgtgagaaactgaatgtattattcaggaagaatactgagtgccttcatttaactaaagttgaatgtaaaagtcaatttgcacttctttataatcctctggtttagaattataaattgttaaaaccttgataattgtcatttaattatatttcaggtgtcctgaacaggtcactagactctacattgggcagcctttaaatatgattctttgtaatgctaaatagcctttttttctctttttactgcaacttaatatttctatttagaacacagaaaatgaaaatatttagaataagttgtacatttgatgacaaataaatcactattaaaacaattt

SEQ ID NO: 70377 - DNA, 1666 bp, Homo Sapiens
gctggtaccggtccggaattcccgggatatcgtcgacccacgcgtccgagaggcgggtgggtgttagttcagagggttatgggagggctctggcgtcctggatggaggtgcgttcctttctgtggctggcgctggatccaccctgggtctccaaccagggctgcagagagggtagagccgtttcttaggccagagtggagtgggacaggaggtgccgagagaggactgaggtggcttgggacatggaagcgctgcagccttcgagcccggcatccagcattgcagccgccgcggcggcctaagagctcgaaccctttcacacgcgcgcaggaggaggagcggcggcggcagaacaagacgaccctcacttacgtggccgctgtcgccgtgggcatgctgggggcgtcctacgctgccgtacccctttatcggctctattgccagactactggacttggaggatcagcagttgcaggtcatgcctcagacaagattgaaaacatggtgcctgttaaagatcgaatcattaaaattagctttaatgcagatgtgcatgcaagtctccagtggaactttagacctcagcaaacagaaatatatgtggtgccaggagagactgcactggcgttttacagagctaagaatcctactgacaaaccagtaattggaatttctacatacaatattgttccatttgaagctggacagtatttcaataaaatacagtgcttctgttttgaagaacaaaggcttaatccccaagaggaagtagatatgccagtgtttttctacattgatcctgaatttgctgaagatccaagaatgattaaagttgatcttatcactctttcttacactttttttgaagcaaaggaagggcacaagttgccagttccaggatataattgaagtcagcaactaagtcttccttcaaagttgtgatttttgggaaaatcatatatcctatcttctcaaaggagaaatattgtacaataatatgaaggcttatattttaaataattattttttctcaactaatttttttcacttaaacttgagagaacaagttcagcttttatcataagaaactcatatgcctagctagaatatatgactgactattcaataccatactgaagagtttgatactattaaaataagccgctttgttttttaaatatgcaggcatgggttcagcttaattccataattcccttccagattattaactcttcatacttacagcaatgaatctgacaatgtttttcaaaaatgtatgctcagggttatttgtttcaagtcataggccagaacttctaaccatgtttattgtgtctaaaagagttggttgctattttccttcattatgaatagtcagtattttaaaagctcaaagtagaagaggagtcactaagccctaacagcttgtccaaagatttaaattcttatttcaaatttgatttgtcctttaaggtttagggctattttatattcagagttctgaataattactttgaaattgtagtatcataaaattgaaataaaatacatctactaggctgttagccaaagcatcaccattacaagtccatgaatgttaaaatgtacaggtgggattgtgaagatttactgacatcaaaagttcttctggaaacaaacctttgtt

SEQ ID NO: 70378 - DNA, 537 bp, Homo Sapiens
aactttagacctcagcaaacagaaatatatgtggtgccaggagagactgcactggcgttttacagagctaagaatcctactgacaaacaagtaattggaatttctacatacaatattgttccatttgaagctggacagtatttcaataaaatacaggtacatcaaagtgtaaactttacagaatatgataaagatacatgaaacggtttagtatgaaacttagtgttttagtagatcttgtgatttctgaaaacgaatttcttctaaacatcaagctatttttcttcactatctatacctgctatgcagagattgagaaccaaaccaaatggatatctgcttttaagattagaatttgttcttcatccttaaagcagaactcattgagatgaaaagatgctcttaatttatcacagaactgtgtatttaatagtatgcttattaaaatcacgaagtgtactggaatgctaagataaaagaactgtatagtttctgttatgtaatacgagaatagaaatgttattaaaatcttaaaaa

SEQ ID NO: 70379 - DNA, 983 bp, Homo Sapiens
  misc_feature (301)..(301): n is a, c, g, or t
  misc_feature (304)..(304): n is a, c, g, or t
cccccccgggaatgacatagggccagaaccctggccccagcccaataaagaatggcagggcccaaactcattaattaaaagttggtagggaatcaaaaggggttataaaaagtcttgtgacaatcctgatgccccataccaaggagccaagctaccaaaggcggcaaagacctgccaccgatgaaaattatgcctccaccccatgggctatacgggccttcttcacttggtcgtctcccccacagccgcgtgcacttcatgcccatcgtggccacaaacatggccaggaagcccagcaccnagnggagaccaccattaggggctcgagtggcctgcaaggccgcggacagggcgagcaccgagtcgtacattttgcagctcatcatccccgtgctctgcgtgacgcagtccatccacagcccccttgtacatggcctgggccgtgatgatgttgtcacccgcataggagctcatctgccactgcgggatggcggtgcaggccaccagacccacccagcccagcagggccatggagaagcccagcaactgcaggcccgaattggccatttccgccctcagaaaacactgggggcgccgggcgggagaccctacagtaaaacaaacgacacttggggggcagccccacaaaagaaaacttgaggtggagttttccggtcacccaaagagacaaaaagggtttgggccaggtgaatgcaaatcttgtcaccaaactacacacaaatcgacccctccagtgaagcgatggcctcgcggcacagggagtaggatacgccgggagggtggttccagacaaaattggtggtccccgaaggccaggcggttccctccgggcgctctcggcgaccctaggcaaacaaaaggtggaggggccgtctgggcgcgtttctgagcgccggcaagtcccaaagtatcctgggctgtaggtccgaggctgcggtgcgcagcagaggtggctcggaggt

SEQ ID NO: 70380 - DNA, 1535 bp, Homo Sapiens
tgctggctcacctccgagccacctctgctgcgcaccgcagcctcggacctacagcccaggatactttgggacttgccggcgctcagaaacgcgcccagacggcccctccaccttttgtttgcctagggtcgccgagagcgcccggagggaaccgcctggccttcggggaccaccaattttgtctggaaccaccctcccggcgtatcctactccctgtgccgcgaggccatcgcttcactggaggggtcgatttgtgtgtagtttggtgacaagatttgcattcacctggcccaaaccctttttgtctctttgggtgaccggaaaactccacctcaagttttcttttgtggggctgccccccaagtgtcgtttgttttactgtagggtctcccgcccggcgcccccagtgttttctgagggcggaaatggccaattcgggcctgcagttgctgggcttctccatggccctgctgggctgggtgggtctggtggcctgcaccgccatcccgcagtggcagatgagctcctatgcgggtgacaacatcatcacggcccaggccatgtacaaggggctgtggatggactgcgtcacgcagagcacggggatgatgagctgcaaaatgtacgactcggtgctcgccctgtccgcggccttgcaggccactcgagccctaatggtggtctccctggtgctgggcttcctggccatgtttgtggccacgatgggcatgaagtgcacgcgctgtgggggagacgacaaagtgaagaaggcccgtatagccatgggtggaggcataattttcatcgtggcaggtcttgccgccttggtagcttgctcctggtatggccatcagattgtcacagacttttataaccctttgatccctaccaacattaagtatgagtttggccctgccatctttattggctgggcagggtctgccctagtcatcctgggaggtgcactgctctcctgttcctgtcctgggaatgagagcaaggctgggtaccgtgcaccccgctcttaccctaagtccaactcttccaaggagtatgtgtgacctgggatctccttgccccagcctgacaggctatgggagtgtctagatgcctgaaagggcctggggctgagctcagcctgtgggcagggtgccggacaaaggcctcctggtcactctgtccctgcactccatgtatagtcctcttgggttgggggtgcgggggtgccgttggtgggagagacaaaaagagggagagtgtgctttttgtacagtaataaaaaataagtattgggaagcaggcttttttcccttcagggcctctgctttcctcccgtccagatccttgcagggagcttggaaccttagtgcacctacttcagttcagaacacttagcaccccactgactccactgacaattgactaaaagatgcaggtgctcgtatctcgacattcattcccacccccctcttatttaaatagctaccaaagtacttcttttttaataaaaaaataaagatttttattaggtaaaa

SEQ ID NO: 70381 - DNA, 1388 bp, Homo Sapiens
  misc_feature (53)..(74): n is a, c, g, or t
  misc_feature (1229)..(1239): n is a, c, g, or t
tgcgaaattaacctcacttaaagggaataagcttgcggccgcatacgcggtcnnnnnnnnnnnnnnnnnnnnnnctttccagggaggcaacgggtgggtgcgatgttgtcacttaagttgccacctctgcataagagctctctgatcagaaagcagtttctttgttgaccccagccagccttggctctcgggttgggaaatacagtcacggtatccatggagacctcttgaggtggagacgggcgttaaatccttctcaggcagtctgaggtggccagagtctgaagcaagcagcctctatggagcgaggggagcaggtgggcccagcctgagcggggcctctgcacagccagctttcccccacacctgtctccagccagggcacccacaggccctttctctcccaggatgaagcctgctgggagcgtgaatgacatggccctggatgccttcgacttggaccggatgaagcaggagatcctagaggaggtggtgagagagctccacaaggtgaaggaggagatcatcgacgccatcaggcaggagctgagtgggatcagcaccacgtaaggggccggcctcgctgcgctgattcgtcgagcccatccggcgacagaggacagccagaagcccagccagccccagactccagtgcaccagagcacgcacaggagcctgggcgcgctgctgtgaaacgtcctgacctgtgatcacacatgacagtgaggaaaccaagtgcaactcctgggtttttttagattctgcctgacacggaacaccaggtctgctcgtcttttttgtgttttatatttgcttatttaaggtacatttctttgggtttctagagacgcccctaagtcacctgcttcattagacggtttccaggttttctcccaggtgacgctgttagcgcctcagctggcggtgacagccggcccagcgtggcgccaccacacaccgcagagctgtccaggcacagctccgtccccagcgctcatggtgttgaaactgtctgtcatgcaccacggtgtctgtgtccacacagtaataaacggtttactgtccgcaccctcgggctcaggccctcgcattggtccatcacgctccgggctggggatgccccttttcagagaagggcccgggaccacggtgaccaggagtcgtaggagcaagatggcggtcttcgacaggaagctgggctcagaacattcccaagccccgggaaggtnnnnnnnnnnntcctggggctgggcctcaggtcctgcctgtagggaactccctacgggatctccagggaagatggtccctcaagtgcaacccacacccccgaacctcagaggactccacgtgcattctggacgggcagggccctgcgagcgtcctgttca

SEQ ID NO: 70382 - DNA, 1362 bp, Homo Sapiens
  misc_feature (1051)..(1051): n is a, c, g, or t
  misc_feature (1233)..(1296): n is a, c, g, or t
ggcacgaggcctccacccactggggctaccccacctcccccacccccactgccagccggaggagcccaggggtccagccacgacgagagcttcatgtcaggactggccgctgccatagctggggccaagctgagaagagtccaacggccaaaagacgcatctggaggctccagtcccagtgggacctcaaagtccgatgccaaccgggcaagcagcgggggtggcggaggaggcctcatggaggaaatgaacaaactgctggccaagaggagaaaagcagcctcccagtcagacaagccagccgagaagaaggaagatgaaagccaaatggaagatcctagtacctccccctctccggggacccgagcagccagccagccacctaactcctcagaggctggccggaagccctgggagcggagcaactcggtggagaagcctgtgtcctcgattctgtccagaaccccgtctgtggcaaagagccccgaagctaagagcccccttcagtcgcagcctcactctaggatgaagcctgctgggagcgtgaatgacatggccctggatgccttcgacttggaccggatgaagcaggagatcctagaggaggtggtgagagagctccacaaggtgaaggaggagatcatcgacgccatcaggcaggagctgagtgggatcagcaccacgtaaggggccggcctcgctgcgctgattcgtcgagcccatccggcgacagaggacagccagaagcccagccagccccagactccagtgcaccagagcacgcacaggagcctgggcgcgctgctgtgaaacgtcctgacctgtgatcacacatgacagtgaggaaaccaagtgcaactcctgggtttttttagatttctgcctgacacggaacaccaggtctgctcgtctttatgtgcttatatttgcttatttaaggtacatttctttgggtttctagagacgcccctaagtcacctgcttcattagaccgtttccaggttttctcccacgtgacgctgttagcgcctcagctggcggtgacagccgngccagcgtggcgccaccaacaccgcagagctgtccaggcacagctccgtcccccagcgctcatggtgttgaaactggtctgtcatgcaccacggtgtctgtgtcccacaacaggtaattaaaccggggtttaacctggtcccgccaaaaccaccggatagcaaccccaacaaccacaccagnnnnnnnnnnnnnnnnnnnnnnnnnnnnnnnnnnnnnnnnnnnnnnnnnnnnnnnnnnnnnnnnaccagcgccgtcaggcacagcaacgcaaggcaccccaaacgatgcacggcaacaacagaacaacac

SEQ ID NO: 70383 - DNA, 2780 bp, Homo Sapiens
  misc_feature (2145)..(2162): n is a, c, g, or t
  misc_feature (2171)..(2209): n is a, c, g, or t
  misc_feature (2256)..(2328): n is a, c, g, or t
  misc_feature (2381)..(2503): n is a, c, g, or t
  misc_feature (2511)..(2704): n is a, c, g, or t
gcggagtcttgtctcgcagccagctctgagcgggaggcctgagcgggaagcattggcgtccgagcgacttctaggagcctggggttcggcgctatggaggagctcgatggcgagccaacagtcactttgattccaggcgtgaattccaagaagaaccaaatgtattttgactggggtccaggggagatgctggtatgtgaaacctccttcaacaaaaaagaaaaatcagagatggtgccaagttgcccctttatctatatcatccgtaaggatgtagatgtttactctcaaatcttgagaaaactcttcaatgaatcccatggaatctttctgggcctccagagaattgacgaagagttgactggaaaatccagaaaatctcaattggttcgagtgagtaaaaactaccgatcagtcatcagagcatgtatggaggaaatgcaccaggttgcaattgctgctaaagatccagccaatggccgccagttcagcagccaggtctccattttgtcagcaatggagctcatctggaacctgtgtgagattctttttattgaagtggccccagctggccctctcctcctccatctccttgactgggtccggctccatgtgtgcgaggtggacagtttgtcggcagatgttctgggcagtgagaatccaagcaaacatgacagcttctggaacttggtgaccatcttggtgctgcagggccggctggatgaggcccgacagatgctctccaaggaagccgatgccagccccgcctctgcaggcatatgccgaatcatggggggacctgatgaggacaatgcccattcttagtcctgggaacacccagacactgacagagctggagctgaagtggcagcactggcacgaggaatgtgagcggtacctccaggacagcacattcgccaccagccctcacctggagtctctcttgaagattatgctgggagacgaagctgccttgttagagcagaaggaacttctgagtaattggtatcatttcctagtgactcggctcttgtactccaatcccacagtaaaacccattgatctgcactactatgcccagtccagcctggacctgtttctgggaggtgagagcagcccagaacccctggacaacatcttgttggcagcctttgagtttgacatccatcaagtaatcaaagagtgcagcatcgccctgagcaactggtggtttgtggcccacctgacagacctgctggaccactgcaagctcctccagtcacacaacctctatttcggttccaacatgagagagttcctcctgctggagtacgcctcgggactgtttgctcatcccagcctgtggcagctgggggtcgattactttgattactgccccgagctgggccgagtctccctggagctgcacattgagcggatacctctgaacaccgagcagaaagccctgaaggtgctgcggatctgtgagcagcggcagatgactgaacaagttcgcagcatttgtaagatcttagccatgaaagccgtccgcaacaatcgcctgggttctgccctctcttggagcatccgtgctaaggatgcccgcctttgccacgctcgtgtcagacaggttcctcagggattactgtgagcgaggctgcttttctgatttggatctcattgacaacctggggccacccatgatgctcagtgaccgactgacattcctgggaaagtatcgcgagttccaccgtatgtacggggagaagcgttttgccgacgcagcttctctccttctgtccttgatgacgtctcggattgcccctcggtctttctggatgactctgctgacagacgccttgccccttttggaacagaaacaggtgattttctcagcagaacagacttatgagttgatgcggtgtctggaggacttgacgtcaagaagacctgtgcatggagaatctgataccgagcagctccaggatgatgacatagagaccaccaaggtggaaatgctgagactttctctggcacgaaatcttgctcgggcaattataagagaaggctcactggaaggttcctgagaactgcttcaatgtggtatctttgtatggcaatgtatatagatttttttaaaagaataaatgttgttttgcaaatgtnnnnnnnnnnnnnnnnnnctcgaggcnnnnnnnnnnnnnnnnnnnnnnnnnnnnnnnnnnnnnnncatggtcatagctgtttcctgacccagctttcttgtacaaagtggtnnnnnnnnnnnnnnnnnnnnnnnnnnnnnnnnnnnnnnnnnnnnnnnnnnnnnnnnnnnnnnnnnnnnnnnnntgcagtacccgggaatttaacccgcctaatgagcgggcttttttttgtgatcnnnnnnnnnnnnnnnnnnnnnnnnnnnnnnnnnnnnnnnnnnnnnnnnnnnnnnnnnnnnnnnnnnnnnnnnnnnnnnnnnnnnnnnnnnnnnnnnnnnnnnnnnnnnnnnnnnnnnnnnnnnaactggcnnnnnnnnnnnnnnnnnnnnnnnnnnnnnnnnnnnnnnnnnnnnnnnnnnnnnnnnnnnnnnnnnnnnnnnnnnnnnnnnnnnnnnnnnnnnnnnnnnnnnnnnnnnnnnnnnnnnnnnnnnnnnnnnnnnnnnnnnnnnnnnnnnnnnnnnnnnnnnnnnnnnnnnnnnnnnnnnnnnnnnnnnnnnnnnnnngcgggctgtaacggggggggtcctggcaacacagccccagcttgggaacgaaacgacctacaccggaacttgagaa

SEQ ID NO: 70384 - DNA, 885 bp, Homo Sapiens
gggacaagctggccgagtatgtcgccaggaacggcctgaagttcgagaccagtgttcgtgccaagaatgatcaaagatttgagttcctgcagccgtggcaccagtataatgcttattatgagtttaagaagcagttcttcctccagaaagaagggggcgatagcatgcaggctgtgtctgcaccagaagaggctcccacagactctgctcccgagaagccaagtgatgctggggaggatggcgcgcctgaagacgcagccgaggtgggagcacgggcaggctcaggcgggaagaaggaggcatcgtccagtaagaccgtcccggacgggaagctggtgaaagcttcctttgctccaataagctttgcaatcaaggccaaagaaaatgatctgcttcccctggaaaaaaatcgtgttaagctagatgatgacagtgatgatgatgaagaaagcaaagaaggccaagaaagttctagtagtgctgcaaacactaacccagcagttgccccaccctgtgtagttgttgaggagaagaagcctcaacttacccaggaggagctagaagcaaagcaagcaaagcaaaagctggaagatcgcctcgcagctgctgcccgggaaaagctcgcccaggcgtctaaggagtcaaaagagaaacagcttcaagcagaacgtaaaaggaaagcggcgttatttttacagaccctcaaaaatcctctgccggaagcagaagctgggaaaattgaggagagtcctttcagtgtcgaggaatccagcactacgccctgccctctactgactggaggcaggcctctgcctactttagaagttaaaccacccgataggccttcgagcaaaagcaaagatccaccgagagaagaagagaaag

SEQ ID NO: 70385 - DNA, 952 bp, Homo Sapiens
aaaaagcaggctggtaccggtccggatatcccgggatatcgtcgacccacgcgtcctcggagaagaggggagagtggcgggccgctgaataagcttccaaaatgatgcccacaccagttatcctattgaaagaggggactgatagctcccaaggcatcccccagcttgtgagtaacatcagtgcctgccaggtgattgctgaggctgtaagaactaccctgggtccccgtggcatggacaagcttattgtagatggcagaggcaaagcaacaatttctaatgatggggccacaattctgaaacttcttgatgttgtccatcctgcagcaaagactttggtagacattgccaaatcccaagatgctgaggtgggtgatggcaccacctcagtgaccttgctggctgcagagtttctgaagcaggtgaaaccctatgtggaggaaggtttacacccccagatcatcattcgagctttccgcacagccacccagctggcagttaacaagatcaaagagattgctgtgaccgtgaagaaggcagataaagtggagcagaggaagctgctggaaaagtgtgccatgaccgctctgagctccaagctgatctcccagcagaaagctttctttgctaagatggtggtggatgcagtgatgatgctcgatgatttgctgcagcttaaaatgattggaatcaagaaggtacagggtggagccctcgaggattctcagctggtagctggtgttgcattcaagaagactttctcttacgctgggtttgaaatgcaacccaaaaagtaccacaatcccaagattgcccttttgaatgtcgagctcgagttgaaagctgagaaaagacaatgctgagataagagtccaccacagttgaagattatcaggcacattgttgactgctgactggaacaatctctatgacaagttagaagagatccatc

SEQ ID NO: 70386 - DNA, 954 bp, Homo Sapiens
acggcagtaactctaacggttctaaggtagcgaggctgggtggcgaattcggcacgaggtgggcggccggtctcggagaagaggggagagtggagggccgctgaataagcttccaaaatgatgcccacaccagttatcctattgaaagaggggactgatagctcccaaggcatcccccagcttgtgagtaacatcagtgcctgccaggtgattgctgaggctgtaagaactaccctgggtccccgtggcatggacaagcttattgtagatggcagaggcaaagcaacaatttctaatgatggggccacaattctgaaacttcttgatgttgtccatcctgcagcaaagactttggtagacattgccaaatcccaagatgctgaggtgggtgatggcaccacctcagtgaccttgctggctgcagagtttctgaagcaggtgaaaccctatgtggaggaaggtttacacccccagatcatcattcgagctttccgcacagccacccagctggcagttaacaagatcaaagagattgctgtgaccgtgaagaaggcagataaagtggagcagaggaagctgctggaaaagtgtgccatgaccgctctgagctccaagctgatctcccagcagaaagctttctttgctaagatggtggtggatgcagtgatgatgctcgatgatttgctgcagcttaaaatgattggaatcaagaaggtacaggggtggagccctcgaggattctcagctggtagctggtgttgcattcaagaagactttctcttacgctgggtttgaaatgcaacccaaaaagtaccacaatcccaagatggccttttgaatgtcgagctcgagttgaaagctgaagaaagacaatgctgagataacgagtccaccacagttgaggatattcaggcattgtggatgcctgagtggaacatctctatgacacagttg

SEQ ID NO: 70387 - DNA, 739 bp, Homo Sapiens
ggcagtaactataacggtcctaaggtagcgaggcctgggtggcgaattcggcacgagggaagaggggagagtggagggccgctgaataagcttccaaaatgatggtgggtgatggcaccacctcagtgaccttgctggctgcagagtttctgaagcaggtgaaaccctatgtggaggaaggtttacacccccagatcatcattcgagctttccgcacagccacccagctggcagttaacaagatcaaagagattgctgtgaccgtgaagaaggcagataaagtggagcagaggaagctgctggaaaagtgtgccatgaccgctctgagctccaagctgatctcccagcagaaagctttctttgctaagatggtggtggatgcagtgatgatgctcgatgatttgctgcagcttaaaatgattggaatcaagaaggtacagggtggagccctcgaggattctcagctggtagctggtgttgcattcaagaagactttctcttacgctgggtttgaaatgcaacccaaaaagtaccacaatcccaagattgcccttttgaatgtcgagctcgagttgaaagctgagaaagacaatgctgagataagagtccacacagttgaggattatcaggcaattgttgatgctgagtggaacattctctatgacaagttagagaagatccatcattctggagccaaagttgtcttgtccaaactccccattggggatgtgccaccctt

SEQ ID NO: 70388 - DNA, 2699 bp, Homo Sapiens
  misc_feature (2314)..(2314): n is a, c, g, or t
  misc_feature (2324)..(2324): n is a, c, g, or t
  misc_feature (2425)..(2425): n is a, c, g, or t
  misc_feature (2574)..(2574): n is a, c, g, or t
acggcagtaactataacggtcctaaggtagcgaggcctgggtggcgaattcggcacgaggcggagaagaggggagagtggagggccgctgaataagcttccaaaatgatgcccacaccagttatcctattgaaagaggggactgatagctcccaaggcatcccccagcttgtgagtaacatcagtgcctgccaggtgattgctgaggctgtaagaactaccctgggtccccgtggcatggacaagcttattgtagatggcagaggcaaagcaacaatttctaatgatggggccacaattctgaaacttcttgatgttgtccatcctgcagcaaagactttggtagacattgccaaatcccaagatgctgaggtgggtgatggcaccacctcagtgaccttgctggctgcagagtttctgaagcaggtgaaaccctatgtggaggaaggtttacacccccagatcatcattcgagctttccgcacagccacccagctggcagttaacaagatcaaagagattgctgtgaccgtgaagaaggcagataaagtggagcagaggaagctgctggaaaagtgtgccatgaccgctctgagctccaagctgatctcccagcagaaagctttctttgctaagatggtggtggatgcagtgatgatgctcgatgatttgctgcagcttaaaatgattggaatcaagaaggtacagggtggagccctcgaggattctcagctggtagctggtgttgcattcaagaagactttctcttacgctgggtttgaaatgcaacccaaaaagtaccacaatcccaagattgcccttttgaatgtcgagctcgagttgaaagctgagaaagacaatgctgagataagagtccacacagttgaggattatcaggcaattgttgatgctgagtggaacattctctatgacaagttagagaagatccatcattctggagccaaagttgtcttgtccaaactccccattggggatgtggccacccagtactttgctgacagggacatgttctgtgctggccgagtacctgaggaggatctgaagaggacaatgatggcctgtggaggctcaatccagaccagtgtgaatgctctgtcagcagatgtgctgggtcgatgccaggtgtttgaagagacccagattggaggcgagaggtacaatttttttactggctgccccaaggccaagacatgcaccttcattctccgtggcggcgccgagcagtttatggaggagacagagcggtccctgcatgatgccatcatgatcgtcaggagggccatcaagaatgattcagtggtggctggtggcggggccattgagatggaactctccaagtacctgcgggattactcaaggactattccaggaaaacagcagctgttgattggggcatatgccaaggccttggagattatcccacgccagctgtgtgacaatgctggctttgatgccacaaacattctcaacaagctgcgggctcggcatgcccaggggggtacatggtatggagtagacatcaacaacgaggacattgctgacaactttgaagctttcgtgtgggagccagctatggtgcggatcaatgcgctgacagcagcctctgaggctgcgtgcctgatcgtgtctgtagatgaaaccatcaagaacccccgctcgactgtggatgctcccacagcagcaggccggggccgtggtcgtggccgcccccactgagaggcaccccacccatcacatggctggctggctgctgggtgcacttaccctccttggcttggttacttcattttacaaggaaggggtagtaattggcccactctcttcttactggaggctatttaaataaaatgtaagacttcaaaaagaatgaagcccatgctttgcaaaaacatgtcggccgccgtcggccctcgaaaaagctttcctagagccatctcgttagagcgacgacgggccccagccagggcaaagtgaaagatgggcccatagcctgttttccttaaggagaatcacctggctaattggactaaggggccttgggaatttcctccccccacattaaaagaatacgtcccgcggggcggggaacaaaccgaaggggggttttttggaaaaccaaaattccccctggatgtggttaagcttctcttggagagggctccattttcaaccgcgggtttatttccgtattctccacccttagtgggaacgttctccaacacggccgcagaattttcttcgcccgcactaaccctcacatatatatttataaaggtgtcacgcgtcgccggtancctattgggncccatgtatttttcttattttccgcacacgagaacagacctgtgtgttattggctaatactatatgcccctattcgaatagcgccaatctctctctggctncccggacaaacacttgggggcgaccgcgcgtaacgatgcccgcgcagatacgccgctaacattgtgagagtgtaacaatcccctgcggacaatattgcgcccagaagttcggggatactttccaacacgccgctccttttgggcgaccncacctgtgtgggcgggcaacacaacataaccgtcgtctgtccaccatgtgggggccggcaccaaacgcggtggggtggcgcacacaacacacccatgtactccccccctctatgcggtgtgccca

SEQ ID NO: 70389 - DNA, 493 bp, Homo Sapiens
aacggcagtaactataacggttctaaggtagcgaggcctgggtggcgaattcggcacgaggcggagaagccaagtgatgctggggaggatggcgcgcctgaagacgcagccgaggtgggagcacgggcaggctcaggcgggaagaaggaggcatcgtccagtaagaccgtcccggacgggaagctggtgaaagcaaagcaaaagctggaagatcgcctcgcagctgctgcccgggaaaagctggcccaggcgtctaaggagtcaaaagagaaacagcttcaagcagaacgtaaaaggaaagcggcgttatttttacagaccctcaaaaatcctctgccggaagcagaagctgggaaaattgaggagagtcctttcagtgtcgaggaatccagcactacgccctgccctctactgactggaggcaggcctctgcctactttagaagttaaaccacccgataggccttcgagcaaaagcaaagatccaccgagag

SEQ ID NO: 70390 - DNA, 724 bp, Homo Sapiens
gatcgagcatcatcactgcatccacctccatcttaccaaagaaagctttctgctgggagatcagcttggagctcagaccggtcatgccacacttttccagcagcttcctctgctccactttatctgccttcttcacggtcacagcaatctctttgatcttgttaactgccacctgggtgtctgtccggaaagctcgaataatgatccagggctgtaaaccttcctccacatagggtttcacctgcttcagaaactctgcagccagcaaggtcactgagctggtgccatcacccacctcagcatcttgggatttggcaatgtctaccaaagtctttgctgcaggatggacaacatcaagaagtttcagaattgtggccccatcattagaaattgttgctttgcctctgccatctacaataagcttgtccatgccacggggacccagggtagttcttacagcctcagcaatcacctgccaggcactgatgttactcacaagctgggggatcccttgggagctatcagtcccctctttcgaataggataactggtgtgggcatcattttggaagcttattcagcggcccgccactctcccctcttctccgagaccgggccgcccagcaacccaccgaacgcgtgggtcgacgatatcccgagaattccggaccggtaccagcctgcttgttttaaaccacgtgttctatattcactattgctttttc

SEQ ID NO: 70391 - DNA, 696 bp, Homo Sapiens
gtggcgaggacagaacaggacctctgctctctgtacctatctgggcccggtgggctcccttgtcctggcttccatctctgtctcagcgaccattcagccctgcgcaggaacacatgttgcttagaaaagccaaatccagccttgtctctgcctcctctggtctcatgatgtgcatctgttaccttgaaactggaaaccagtctatcaatgtctgtgccaattttttattccctccccaacctccttccccatacgactttttatttatgtaggatgtgtgctgtctaatgatgggatgaccacacttttccatgttctaaaagtgctcctctcctgcagggtcccagggctggtggttgctttgggtctacagctacgtcttacccgcctcctgcctcaacagcctgtgtggtggcaaagccggtgtggggctggggaacgcagcgttctccaggagggggacctggctctccttctgcaatgcaggcgaaggcctagatgccagtgtgacctcccacaaggcgtggcttccagactccccggccggaagtgatgcttttttgcctcgggccctgggtttgaagcagcctggctttctcttggtaagtggctggtgtcttagcagctgcaatctgagctcagccacctacacaccaccgtggccgacactttcattaaaaagtttcctgagaaaaa

SEQ ID NO: 70392 - DNA, 1711 bp, Homo Sapiens
  misc_feature (64)..(98): n is a, c, g, or t
tatgggcgctccgtcgtagtagcgaacgacgagcgcagcgagtagtgagcgaggaagcggccgnnnnnnnnnnnnnnnnnnnnnnnnnnnnnnnnnnncagtcgacggtaccggacatatgcccgggaattcggccattacggccggggaggacccggaagtgagggtgtgagaggcctctctggaagttgtcccgggtgttcgccgctggagcccgggtcgagaggacgaggtgccgctgcctggagaatcctccgctgccgtcggctcccggagcccagccctttcctaacccaacccaacctagcccagtcccagccgccagcgcctgtccctgtcacggaccccagcgttaccatgcatcctgccgtcttcctatccttacccgacctcagatgctcccttctgctcctggtaacttgggttttcactcctgtaacaactgaaataacaagtcttgatacagagaatatagatgaaattttaaacaatgctgatgttgctttagtaaatttttatgctgactggtgtcgtttcagtcagatgttgcatccaatttttgaggaagcttccgatgtcattaaggaagaatttccaaatgaaaatcaagtagtgtttgccagagttgattgtgatcagcactctgacatagcccagagatacaggataagcaaatacccaaccctcaaattgtttcgtaatgggatgatgatgaagagagaatacaggggtcagcgatcagtgaaagcattggcagattacatcaggcaacaaaaaagtgaccccattcaagaaattcgggacttagcagaaatcaccactcttgatcgcagcaaaagaaatatcattggatattttgagcaaaaggactcggacaactatagagtttttgaacgagtagcgaatattttgcatgatgactgtgcctttctttctgcatttggggatgtttcaaaaccggaaagatatagtggcgacaacataatctacaaaccaccagggcattctgctccggatatggtgtacttgggagctatgacaaattttgatgtgacttacaattggattcaagataaatgtgttcctcttgtccgagaaataacatttgaaaatggagaggaattgacagaagaaggactgccttttctcatactctttcacatgaaagaagatacagaaagtttagaaatattccagaatgaagtagctcggcaattaataagtgaaaaaggtacaataaactttttacatgccgattgtgacaaatttagacatcctcttctgcacatacagaaaactccagcagattgtcctgtaatcgctattgacagctttaggcatatgtatgtgtttggagacttcaaagatgtattaattcctggaaaactcaagcaattcgtatttgacttacattctggaaaactgcacagagaattccatcatggacctgacccaactgatacagccccaggagagcaagcccaagatgtagcaagcagtccacctgagagctccttccagaaactagcacccagtgaatataggtatactctattgagggatcgagatgagctttaaaaacttgaaaaacagtttgtaagcctttcaacagcagcatcaacctacgtggtggaaatagtaaacctatattttcataattctatgtgtatttttattttgaataaacagaaagaaattttgggtttttaaa

SEQ ID NO: 70393 - DNA, 548 bp, Homo Sapiens
cctctccagtaaatagaccttcctcagccaccaataaggcactatctccagtcacttcccggaccccaggggtggtggcatctgcccccaccaaaccacagagtcctgctcagaatgccacctcgtcccaagacagttctcaggatacgctgacagaacaaataactctggagaaccaggtgcatcagcgcattgcggagctgaggaaagcaggtctgtggtcccagaggcgtctgccaaagctgcaggaggccccacgacccaagtcccactgggactatctgctggaggagatgcagtggatggccacagactttgcccaggagaggtggaaggtggcctctgtgaagaagatggtcagagctgtggcccggcagctgcaggacaggacgcgcagggaggccggggccaggagggaggagccgagcaggctgaggcagacgtcacctgtactaccagagaaatcgagcgtccctggtctagtactgcgcaggtaaagattccagcatcttggaagcaagtgctccactggaaaataaaagccacgt

SEQ ID NO: 70394 - DNA, 1762 bp, Homo Sapiens
  misc_feature (1531)..(1543): n is a, c, g, or t
  misc_feature (1698)..(1707): n is a, c, g, or t
ctctttatacaccaacatatacggttgtaaaaaccgctgggacggtccggattccgggattcgtcgacccacgcgtccgggcgcggagcggagcggcggcgggcgcagctagcgggtcggccgcggagcggaggtgcagctcggcttcccccggcacccctccccctcgggcgccagccccacccctccgccggccgggccgaccccgccgtactatcccctgcggcgcgagcccggggcggctccaagcgccccccagcagacccccatcatgggcagccagagctccaaggctccccggggcgacgtgaccgccgaggaggcagcaggcgcttcccccgcgaaggccaacggccaggagaatggccacgtgaaaagcaatggagacttatcccccaagggtgaaggggagtcgccccctgtgaacggaacagatgaggcagccggggccactggcgatgccatcgagccagcaccccctagccagggtgctgaggccaagggggaggtcccccccaaggagacccccaagaagaagaagaaattctctttcaagaagcctttcaaattgagcggcctgtccttcaagagaaatcggaaggagggtgggggtgattcttctgcctcctcacccacagaggaagagcaggagcagggggagatcggtgcctgcagcgacgagggcactgctcaggaagggaaggccgcagccacccctgagagccaggaaccccaggccaagggggcagaggctagtgcagcctcagaagaagaggcagggccccaggctacagagccatccactccctcggggccggagagtggccctacaccagccagcgctgagcagaatgagtagctaggtaggggcaggtgggtgatctctaagctgcaaaaactgtgctgtccttgtgaggtcactgcctggacctggtgccctggctgccttcctgtgcccagaaaggaaggggctattgcctcctcccagccacgttccctttcctcctctccctcctgtggattctcccatcagccatctggttctcctcttaaggccagttgaagatggtcccttacagcttcccaagttaggttagtgatgtgaaatgctcctgtccctggccctacctccttccctgtccccacccctgcataaggcagttgttggttttcttccccaattcttttccaagtaggttttgtttaccctactccccaaatccctgagccagaagtggggtgcttatactcccaaaccttgagtgtccagccttcccctgttgtttttagtctcttgtgctgtgcctagtggcacctgggctggggaggacactgccccgtctaggtttttataaatgtcttactcaagttcaaacctccagcctgtgaatcaactgtgtctcttttttgacttggtaagcaagtattaggctttggggtggggggaggtctgtaatgtgaaacaacttcttgtctttttttctcccactgttgtaaataacttttaatggccaaaccccagatttgtacnnnnnnnnnnnnnctaactgctaaaaccattctcttccacctggttttactgtaacatttggaaaaggaataaatgtcgtccctttaggtggtgaacaaaaagcaagaaacgatgaactgaagaaggacggaaataagacgaagaaaaaaatggggggcggttttttnnnnnnnnnnaaacaaaggattaaaaggggcaggggaatgtgttccaggacccttttttgtaaaa

SEQ ID NO: 70395 - DNA, 1065 bp, Homo Sapiens
aattcccgggatatcgtcgacccacgcgtccgacgatggcagcactgcgctctcaatcgccctggaagcaggacacaaggacatcgctgttcttctgtatgcccatgtcaactttgcaaaagcccagtctccgggcacccctaggcttggaaggaagacgtctcctggccccacccaccgaggttcatttgattgattgtatgcaaatagccctttatttacatgccactattaagctgctaattgttcctgttggggtgacagatactgaatgtatacgtattgtgcctgagctcaccagcaaacagaagcatcaagcccaggggtaaaggctgaagctttcacagtgcagagactgctagcctgggcacacacacctcctttctggccgtcttctgtgtagggcacactttaacccagtctctgttgctgttgagtctctgctccgttttgtacagtcacagggaattctgatctgaaggggcaccttctgttcactcccacaaagtggtgtctggttctcactgagacgttttaagatttttccacaaatatttatatgtactaaatgtggaaccattagaaagttcttccaaaatctcattccagcatagttttggatttttcttttgtcttattttaaaataaggaagtcgagatgactttgatcattggtaacttgggcctgggccagacaaagtataaaacttacaaaagaatattctcatttggtcttaactaggtagatgtaatatatgactttttataaaaagggtatctatatgaacttgacacagtattttcagcttttgtattccatactaaagccatgaagaactacacgtaacatcatcatttgtattaattgcacaactccaatgctaaaggttggattgtgttagaggaatcggctctgtatttgcctctagagaaacacagtgttctctttgtatttatggattcctttttaccgtgtcacatttactttggtcctctatgtatttaaatgtttgaagtgccttagactcttgccatattttcaaaataaaattccattaagctcta

SEQ ID NO: 70396 - DNA, 435 bp, Homo Sapiens
caaaaattcaaagcatatttaaataatatataaattaaatgccctcctctcttccaattctgtccctatagttttcctctattaagtgaactacatgcattcttttagtggatagatgcacacaaacacacaagccattatggggaaggatccacgtgtgtggccatattgtaacacatttttctgcaaatcacctctttcatttaacagcccttattcaatggcctttttctttttcagtagtacatacacatctgtgtcatttgttgaatgacgacatgaatgttttgtagataaaatataattaaatgttttaagcatttctcactcatagatatttatgttagcaccaaatttctgtgcaatgaacctccctatatatcagtaattttgcatttgtctataatatcataataaattacttatcagttgaaa

SEQ ID NO: 70397 - DNA, 1330 bp, Homo Sapiens
  misc_feature (1226)..(1260): n is a, c, g, or t
gtcggttgaggctttacttccatcaggtaggcctaaggaagggaccatgctgcaggagcagggcctgtaaaccagtcaatgctgctccttcatgcaacacggggacagctcggggctgagctccacaggcgaggggccaggcaggccctttaaagcagacacaaccactaacaggaaggaaggtcaggctggctttagtgcagggaagggtaatgatgggaggggatgttcacgaaggatagtgggtagctgaggcttcaaagggcctgcatgggacaggggtttagggggagtgaagagggacaatgaagtcttgggagtaaagatgggaataaacaggagaaaggaacgaggaggcaggtgctgggatgcagagtccagctgcgctgcacagcctgggcagcaggctgagtatgggctcctcactcccacctcctggccttcaaggccctacttgttgccccagacagccatctttgtgaacacaggtcttgggaggaagcggctggacttcatgtaggcagagatcttctccaagccctcaaatcgggagatgaagtccttcaggtttgggaaggcatccaggcagctgggctcaaatacttggtttctctcaaggacatcataagcgatgaaatccacaaaggtgatcttgtccccaagaaaccatggctgcttccccagaaactgtgagtagagcttcagcatttcagggagtgcctgcaggtattctggtttcagtttctcaaaatctgggtcatagcagagtttggccagctgcatacggctgtccataaactggttctccaaaatgtcttcgcgaatctgctccttttctgattccccgcacaggttgtgcttgcgggcaatgtaccgcaggatggcgttgctctgggtgatcttgtgagtcccatcaatcaagtagggcagattgggaaagtccaggcccagcttgaatttttcattcagccactggcttctgtcataatcaggagcgtcccccatcgtgtacttcttttcctcgtagcttgagtctgtgtattccaggagcaggcggatggaatgggccagcccgcggatgttccagtaccccagtgtcatgggcatggtgctggttgctgtggattctgcagacaggcctcagcggggcggggctcagcgtttgtgagaggccccccggccgtaatggccgaattcccgggcatatgtccggtaccgtcgactgnnnnnnnnnnnnnnnnnnnnnnnnnnnnnnnnnnncgccgcttcctcgctcactactcgctgcgctcgtcttcggatacaagcgagctacgccctatagtgatcc

SEQ ID NO: 70398 - DNA, 907 bp, Homo Sapiens
tgcgctgcacagcctgggcagcaggctgagtatgggctcctcactcccacctcctggccttcaaggcattacttgttgccccagacagccacccttgtgtacagaggttttgggaggaagcggctggacttcatgtaggcagagatcttctccaagccctcaaagcgggagatgaagtccttcagatttggaaaggcgtccaagcagttgggctcaaatatacggtggaggtcaaggacatcataggcgaggaaatctacaaaggtgatcttgtctccaacaaaccatggcctcttccccaggaactgtgagaagtgctgcatcattgtaggaagttcctccaagtattctggcattcagtttctcaaagtcagggcctgtagcagactctggccagctgattggagacgtccatagcctggttctcctaaatgtccacacgaatcttctcctcttctgtctccccacattgggaaagtccaggcccagcttgaatttttcattcagccactggcttctgtcatagtcaggagcgtcccccatcgtatacttcttttcctcgtagcttgagtctgtgtattccaggagcaggcggatggcgtgggccagcccgcggatgtcccagtaccccagtgtcatggacatgatgctggttggtgtcgattctgcagacaggcctcagctgggctgaactgcgacctcctctggggttcccggcacgcaggggctggacctagcgccagacccgccccctcggccccgctgcgcccgccgatcttcaaggtcgtcacttccaaccggccgatcttcaaggtcgtcacattccaaccaacaggcgcgggaggcacggagcaggttgctggatcctcactggctggaaggagtaagatccaccgccacctccgag

SEQ ID NO: 70399 - DNA, 1020 bp, Homo Sapiens
  misc_feature (948)..(970): n is a, c, g, or t
agtatgtgacatatgaccagtgggtcaaaaaagcaggctggtaccggtccggaattccgggatattgtcgaccacgcgtcgtgctccctgaacactcggaggtggcggtggatcttactccttccagccagtgaggatccagcaacctgctccgtgcctcccgcgcctgttggttggaagtgacgaccttgaagatcggccggttggaagtgacgaccttgaagatcggcgggcgcagcggggccgagggggcgggtctggcgctaggtccagcccctgcgtgccgggaaccccagaggaggtcgcagttcagcccagctgaggcctgtctgcagaatcgacaccaaccagcatcatgtccatgacactggggtactgggacatccgcgggctggcccacgccatccgcctgctcctggaatacacagactcaagctacgaggaaaagaagtatacgatgggggacgctcctgactatgacagaagccagtggctgaatgaaaaattcaagctgggcctggactttcccaatctgccctacttgattgatggggctcacaagatcacccagagcaacgccatcctgtgctacattgcccgcaagcacaacctgtgtggggagacagaagaggagaagattcgtgtggacatttggagaaccaggctatggacgtctccaatcagctggccagagtctgctacaggccctgactttgagaaactgaagccagaatactgggaggaacttctacaatgatgcagcacttctcaccagttccgggggaagaggccatggttgtgggaccagatcacttgttgattctggctatgatgtctgaactcacgtatttgagccaatgtggggggcttccaattgaagggtacccgttgggtggggaaatctcgccaaaggggtccccaaccgtcggggtgggcctagctgcggcnnnnnnnnnnnnnnnnnnnnnnncaccccctgcacccaagggccggggcttccccccgtttggggcggcgggc

SEQ ID NO: 70400 - DNA, 1149 bp, Homo Sapiens
tttaggcctgtctgcggaatccgcaccaaccagcaccatgcccatgatactggggtactgggacatccgcgggctggcccacgccatccgcctgctcctggaatacacagactcaagctatgaggaaaagaagtacacgatgggggacgctcctgattatgacagaagccagtggctgaatgaaaaattcaagctgggcctggactttcccaatctgccctacttgattgatggggctcacaagatcacccagagcaacgccatcttgtgctacattgcccgcaagcacaacctgtgtggggagacagaagaggagaagattcgtgtggacattttggagaaccagaccatggacaaccatatgcagctgggcatgatctgctacaatccagaatttgagaaactgaagccaaagtacttggaggaactccctgaaaagctaaagctctactcagagtttctggggaagcggccatggtttgcaggaaacaagatcacttttgtagattttctcgtctatgatgtccttgacctccaccgtatatttgagcccaagtgcttggacgccttcccaaatctgaaggacttcatctcccgctttgagggcttggagaagatctctgcctacatgaagtccagccgcttcctcccaagacctgtgttctcaaagatggctgtctggggcaacaagtagggccttgaaggccaggaggtgggagtgaggagcccatactcagcctgctgcccaggctgtgcagcgcagctggactctgcatcccagcacctgcctcctcgttcctttctcctgtttattcccatctttactcccaagacttcattgtccctcttcactccccctaaacccctgtcccatgcaggccctttgaagcctcagctacccactatccttcgtgaacatcccctcccatcattacccttccctgcactaaagccagcctgaccttccttcctgttagtggttgtatctgctttaaagggcctacctggcccctcgcctgtggagctcagccccgagctgtccccgtgttgcatgaaggagcagcattgactggtttacaggccctgctcctgcagcatggcccctgccttaggcctacctgatcaaaataaagcctcaaccacatttaa

SEQ ID NO: 70401 - DNA, 934 bp, Homo Sapiens
tgtagtgacatctgggatttgagctttatagagcctcgacttcgcgatcgtataatgttagaagaacggaaccaatgagccttgggtacgagtataggagtagaagaacgcataaaggtagaagtcagctccagcgactcagctcgtcctccaggtcgcaggcagcaaggttggctcctccctcccatcttctggcatcactgggccctatttgctgttccatgtagctgactttccaacaaagacctcggaggaattgggctggacttcatgtaggcagagatcttcttcaaaccctcaaagcgggagatgaagtccttcaagtttaggaaggcgtccaagcacttgggctcaaatatacgcttcatgtcaaggacatcataggcaaggaaatccacaaaggtgatcttgtctcctgcaaaccatggccgcttccccagaaactctgagtagagctttagcttttcagggagttcctccaagtattttggcttcagtttctcaaaatctgggtcatagcacagtctgaccagctccatgtggttatccataacctggttctccaaaatgtccacacgaatcttctcctcttctgtctccccacacaggttgtgcttgcgggcaatgtagcgcaggatggcattgctctgggtgatcttgtgagccccatcaatcaagtagggcagattgggaaagtccaggcccagcttgaatttttcattcagccactggcttctgtcatagtcaggagcgtcccccagcgtgtacttcttttccacatagcttgagtctgtgtattccaggagcaagcggatggcgtgggccagcccacggatgtcccagtaccccagagtcatgggcatggtgctggttggtgcggattctgcagacaggcatcagccggagcggggctcagactttgagaggcccagga

SEQ ID NO: 70402 - DNA, 1198 bp, Homo Sapiens
  misc_feature (1012)..(1074): n is a, c, g, or t
ccagacaaatcctgccagtcattcatcagctggactggagacggatgggagtttaagctcgccgaccccgatgaggcggcccgccggtggggaaagaggaaaaataagcccaagatgaactacgagaagctgagccggggcttacgctactattacgacaagaacatcatccacaagacgtcggggaagcgctacgtgtaccgcttcgtgtgcgacatcaagaacttgctggggttcacgccagaggaactgcacgccatcctgggcgtccagcccgacacggaggactgaggtcgccgggaccaccctgagccggccccaggctcgtggactgagtgggaagcccatcctgaccagctgctccgaggacccaggaaaggcaggattgaaaatgtccaggaaagtggccaagaagcagtggccttattgcatcccaaaccacgcctcttgaccaggctgcctcccttgtggcagcaacggcacagctaattctactcacagtgcttttaagtgaaaatggtcgagaaagaggcaccgggaagccgtcctggcgcctggcagtccgtgggacgggatggttctggctgtttgagattctcaaaggagcgagcatgtcgtggacacacacagactatttttagattttcttttgccttttgcaaccaggaacagcaaatgcaaaaactctttgagagggtaggagggtgggaaggaaacaaccatgtcatttcagaagttagtttgtatatattataataatcttataattgttctcagaatcccttaacagttgtatttaacagaaattgtatattgtaatttaaaataattatataactgtatttgaaataagaattcagacatctgaggttttatttcatttttcaatagcacatatggaattttgcaaagatttaatctgccaagggccgactaagagaagttgtaaagtatgtattattcacatttaatagacttacagggataaggcctgtggggggtaatccctgcnnnnnnnnnnnnnnnnnnnnnnnnnnnnnnnnnnnnnnnnnnnnnnnnnnnnnnnnnnnnnnnggcaaggactttgtacatttgggagtttttatgagaaacttaaatgttattatctgggcttatatctggcctctgctttctcctttaattgtaaagtaaaagctataaagccgtatttttcttg

SEQ ID NO: 70403 - DNA, 1704 bp, Homo Sapiens
  misc_feature (355)..(401): n is a, c, g, or t
tgcaactaggaacagcaaatgcaaaaactctttgagagggtaggagggtgggaaggaaacaaccatgtcatttcagaagttagtttgtatatattattataatcttataattgttctcagaatcccttaacagttgtatttaacagaaattgtatattgtaatttaaaataattatataactgtatttgaaataagaattcagacatctgaggttttatttcatttttcaatagcacatatggaattttgcaaagatttaatctgccaagggccgactaagagaagttgtaaagtatgtattatttacatttaatagacttacagggataaggcctgtggggggtaatccctgcnnnnnnnnnnnnnnnnnnnnnnnnnnnnnnnnnnnnnnnnnnnnnnncttgccttggttgtctggcaaggactttgtacatttgggagtttttatgagaaacttaaatgttattatctgggcttatatctggcctctgctttctcctttaattgtaaagtaaaagctataaagcagtatttttcttgacaaatggcatatgttttccacttctttgcatgcgtttaagtcagtttatacacaaaatggattttattttttagtttaactgtgtttctccgacagctcacctctctctgaccacccagccatttccttcctgtgctccacgttcttctgtgtgattaaaataagaatattatttttggaaatatgcaactccttttcagagatcaggagggatttatgtagcagctatttttactgcaaaagtaattcactgggaaaaaaaatgtaatttgtaagaaagctttatttttatctcagctctatgtaaagttaaagttactgtacagagctgaaggacggggggcggtaggggtcttgatgaaacctcttgaacgaagcacagtttgtcccatctttgttcactcgtgtgtctcaaccatcttaatagcatgctgctcctttttgctcagtgtccacagcaagatgacgtgattcttattttcttggacacagactattctgaggcacagagcggggacttaagatgggaaagagaaagcatcggagccattcattcggagaaaacgttttgatcaaaatggagacttttgtagtcgtttcaaaagagcacctgagtcatgtgtattcccggcctttataaatgacccggtcaagttggtttcaaagtccgacaggcttgtctgtttactagctgcgtggccttggacgggtggctgacatctgtaaagaatcctcctgtgatgaaactgaggaatcgggtggccgggcaagctgggaagagcaaagccagagctgcgctgcctcaatacccacaaaagaccattcccagtatacataagcacaggatgtttttctcaagagggatgtatttatcacttggacatctgtttataatataaacagacatgtgactgggaacatcttgctgccaaaagaatcctaggcagtggctcattgtatgtgaggttgaaccacgtgaaattgccaatattaggctggcttttatctacaaagaaggagtttcatggggttcagcctaacagttatggaaactacagtccttataaaccattggcatggtaataaacagatcttaagtataaaaattttgtaattgggcctttactctctcaataataaagtattttgtttatataaaaaa

SEQ ID NO: 70404 - DNA, 735 bp, Homo Sapiens
ctgcagccggacgagcaagggcctgagggttctctgtcactgttactggcagaagaaacacagcaggtgtttctgtgctcttggttttacgtttctgttcagaatacccttttatcaactccttagttttatttgaacttaagggaaaaaattagtaacaaaattcccagcatcagtatgaacatattttatttgcctaaacaagctttgtgaaagttaagcgttcaaacaccagtgtcagttacctggaaggctactaaggtaaataagcaaagcaggccagttgtcaggaaagcagagattgtgcctggtgctgaatggccttggggcctgatcttggcatggcagagacctggggactgccactgtccccaggtacgtgtacatggagccaaactgtgtgtcctgtggcattgtcagagttatgttgaaatcttatttgaaaatgttagcaacttacttgcatttttaaagaccaaacaagagctggtaacctatggcctcaagcatctgtccttcctaaaaatggaatagtgggatgtagtgcttaatggaaactgctaaatctttttctaaaaactaacagtggatttttaaaatatattgttttttgtgtatttcatttgtcctttgtatttatctaaaagggttgatatgattttatatcttgctctctattcctaatagtattatgacttcttatttaaaataaataacaattgccggttttctgtt

SEQ ID NO: 70405 - DNA, 890 bp, Homo Sapiens
ggtaccggtccggaattcccgggatatcgtcgacccacgcgtccgtagaaagtgtcttttgtcctggggtgagagggtgacgcatgtgccctctggcagtctgctgctgtgtccagagtccgactccagctgggctgtaactgggcttggcccccgccttaggccccgccagcaggcgaagcagggagatgtcagactgctacacggagctggagaaggcagtcattgtcctggtggaaaacttctacaaatatgtgtctaagtacagcctggtcaagaacaagatcagcaagagcagcttccgcgagatgctccagaaagagctgaaccacatgctgtcggacacagggaaccggaaggctgcggataagctcatccagaacctggatgccaatcatgatgggcgcatcagcttcgatgagtactggaccttgataggcggcatcaccggccccatcgccaaactcatccatgagcaggagcagcagagcagcagctagagacccctttggccacaccttccaggcactggcctgatgccccgccctggtgctctccccaggctccctcctcagcctcctgcccacccagggccctttactctcttctccctccagaccttcctctgacccttgctgaactggggtccctttgtgagtgtctcagtctagaggtacctccctccctggggggtctcagctcctggagtcccaggcccttggggcccctctgtgagatctcaatgctgtctggggaccctaagagttttctcacctgttcagtctcatctaacccttcaatgtctgatgttcctgcccaattcctggcctgattctgggtccctcctggacctccaaaggtcagcttgggtgcttgaggtctccctggcc

SEQ ID NO: 70406 - DNA, 1316 bp, Homo Sapiens
cggtccggaattcccgggatatcgtcgacccacgcgtccggggagtaggaatggccacaagtggccaacggaaagcaggtggcaggacaggaggctgtggtggggcctgaccgagcagcctttccttccaaatctgactgtggcttgctcaggcccctatggtggctgtgaccctgttttgtccatctcctttcaccaggacccgccgggtgagggtgactggagcacattcctgggcttgggggtgggaagggagtctgatttgcctggggttgatgtgggggggttttgggcatgggccgtgactcacagagtagatccagatccgcctgctcccctcatatcctgttattcagaaggctgtatccgcttagaaagtgtcttttgtcctggggtgagagggtgacgcatgtgccctctggcagtctgctgctgtgtccagagtccgactccagctgggctgtaactgggcttggcccccgccttaggccccgccagcaggcgaagcagggagatgtcagactgctacacggagctggagaaggcagtcattgtcctggtggaaaacttctacaaatatgtgtctaagtacagcctggtcaagaacaagatcagcaagagcagcttccgcgagatgctccagaaagagctgaaccacatgctgtcggacacagggaaccggaaggctgcggataagctcatccagaacctggatgccaatcatgatgggcgcatcagcttcgatgagtactggaccttgataggcggcatcaccggccccatcgccaaactcatccatgagcaggagcagcagagcagcagctagagacccctttggccacaccttccaggcactggcctgatgccccgccctggtgctctccccaggctccctcctcagcctcctgcccacccagggccctttactctcttctccctccagaccttcctctgacccttgctgaactggggtccctttgtgagtgtctcagtctagaggtacctccctccctggggggtctcagctcctggagtcgcaggcccttggggcccctctgtgagatctcaatgctgtctggggaccctaagagttttctcacctgttcagtctcatctaaccttccaatgtctgatgttcctgccaaatccctgcctgattctgggtccggtcctgacctcccaaagtccagcttggtgcttggaagtctcccctgctccttgggggcagtgggtaaccacaaccgcagccagcagccgccagcaccagcagccaaaaaacctctccacttttcccttaaccccctcggctgggggaa

SEQ ID NO: 70407 - DNA, 1149 bp, Homo Sapiens
  misc_feature (899)..(936): n is a, c, g, or t
accgagccagctcagcgggcagggctgggagggagtgggacagattctgggagtgcagcggggaggagtcccggctgggctgagcgcagggagctgcttggcagtgccagagcccaggccccagagccctgctggagaggaggcagactgaggcagcaggccccgccagcaggcgaagcagggagatgtcagactgctacacggagctggagaaggcagtcattgtcctggtggaaaacttctacaaatatgtgtctaagtacagcctggtcaagaacaagatcagcaagagcagcttccgcgagatgctccagaaagagctgaaccacatgctgtcggacacagggaaccggaaggctgcggataagctcatccagaacctggatgccaatcatgatgggcgcatcagcttcgatgagtactggaccttgataggcggcatcaccggccccatcgccaaactcatccatgagcaggagcagcagagcagcagctagagacccctttggccacaccttccaggcactggcctgatgccccgccctggtgctctccccaggctccctcctcagcctcctgcccacccagggccctttactctcttctccctccagaccttcctctgacccttgctgaactggggtccctttgtgagtgtctcagtctagaggtacctccctccctggggggtctcagctcctggagtcgcaggcccttggggcccctctgtgagatctcaatgctgtctggggaccctaagagttttctcacctgttcagtctcatctaaccttccaatgtctgatgttcctgccaaattcctgcctgattctgggtccgtcctgacctccaaaggtcagcttggtgcttgaggtctccctgctcttggtggcagtggtnnnnnnnnnnnnnnnnnnnnnnnnnnnnnnnnnnnnnnagacctctccactttcccttagcccctctgctgggtagagaggcactttcagggacttccctccagctgcctcttcatctgggaatgagctaagcaaggctgagcctcctcctgttgcttgaaataatgatgatataaaggctggatttggagtttgtatcccctggtccctctgggatgctcattaaaaccttcccactccttggaaaaaaa

SEQ ID NO: 70408 - DNA, 444 bp, Homo Sapiens
gagagtgaaaagggcttggacttaagataggacaatgtggagaatggggggaagaatgcaaaacgatatagtatcccttatggatggtacatgtgcaacagggaactcttacttcatataccctttgcagtaatcattcagggaggaagaaaaacctggaacttgaatgaaggctgatctttgttttgtgcactgtggccctgccaggcatatagtgaaggtaagaatgattgatgttggctgatattggagtgctcattcacatgaagtggatagatacttctcaagacatcacacagcgtgagtcaatcaaggagggaagccacaagcagactgacaacgtttctaggatcaggtgagctgtgtccagaaaaccaacgagaaggagtggaaggaggaatgaacgtttcattctcgttaataaaggcattatcctaattaaaa

SEQ ID NO: 70409 - DNA, 702 bp, Homo Sapiens
  misc_feature (66)..(104): n is a, c, g, or t
  misc_feature (579)..(613): n is a, c, g, or t
  misc_feature (617)..(660): n is a, c, g, or t
ttggtacactttggaaattcagtggcacaaggtacactgccataaacttgagggacattatacagnnnnnnnnnnnnnnnnnnnnnnnnnnnnnnnnnnnnnnnttctcctgttccaaacactgcattacataattttacctgcccaaacagaccatttacaaatattaggtcaataaactgctaacatccataaaaagatagctttcttactaaaatgcaagaatttaaaagattggtatctaaacaagaaaaactaaacaaactggaatgaaagcctaaatatcacatctaaaatcggggttttttgtttgggccttcgtactcttctctccctctaccatatcctgctggagttcttccatgcgtcttaattcttcctgtcgtctcatcagatcttggcgcaaaagatttgcctgatgttcatgataggcatcttccatttcactttccaatttgtcttttgcatctttcatgtttttttcaacttgttccctttgctgtttttccatttcatccaaagacttcccccggccgtaatggccgaattcccgggcatatgtccggtaccgtcgactgnnnnnnnnnnnnnnnnnnnnnnnnnnnnnnnnnnncggnnnnnnnnnnnnnnnnnnnnnnnnnnnnnnnnnnnnnnnnnnnntaaacagcacgctagcgccctatatgatctatacattctttt

SEQ ID NO: 70410 - DNA, 1196 bp, Homo Sapiens
agattacatgcctttctttataagggatgctggcacagaccccctaaaataagcttttggtagtactgtacctttgaagagtggtgaaggatgctaatggataatctcctgaaagttgtggcttttgatacccttactgtggactgtagagttgctaaacgttgtttagcaaataatgttgcttagtttcaaatgacatttgactttcatcactaaaacagcaatgtactcagggttgtaagcttactcaaatagactttcaataagtcttcaatgtatatatgatagtttttagcctaatgtgaatttaaataatcttaatagtttcctaaaagtcgatctgaaacttggggtgggaaaggggaggtagcaatttttgaagtattttagccatttttttcatttaaagaaaccacttgtccccatttcctcttctccactttctcataattttgttttaagaggaacactggttgttttttatacttctcctaatctttaaaaactgcatattgttaagaccccagtgtatttaataggtattttataagcatagcccattggctcatgttagtgaaaccataatcctctttgcttagaacattaaactcataagaagtactacaaaacccaccaatctttatagatgtattgtaccactaatataaacagctaaaaaatggggaaattgtaatgttacgcctgtgcaatttttaagtggcatattatggcagattaaaatttagatacttggcttttcttgggcaagccactaagttgtggcggaatgttttctggtgttcttggactgcaattatgcactattaaagtagtggcctgctacataactgcatttagccagcatttctgcagtgcgtaactgtgaggaacgtagtaccgcaaatggcaatggacattaggacccggatgtagtattcctgcttgctccaagattctcattgccgactgcatacaggtaagaatgattgatgttggctgatattggagtgctcattcacatgaagtggatagatacttctcaagacatcacacagcgtgagtcaatcaaggagggaagccacaagcagactgacaacgtttctaggatcaggtgagctgtgtccagaaaaccaacgagaaggagtggaaggaggaatgaacgtttcattctcgttaataaaggcattatcctaatt

SEQ ID NO: 70411 - DNA, 862 bp, Homo Sapiens
tactgtgcttcaaataaatagaaaaatagttataatattgatcttcaactttgccattcatgcttctatgcatattaggctacgtattccacattgaaagcatgagagtgtctaggcctttgaatggcatatgccatttctgggaaatgcatctggaggctaagtattgctttctacaaataattgccccctttgttttaaaaagaagaaatgcatattgaagtagtttgatgatttgtttggcatataggaagcacgctggtgctaagtattttttaaatggttatgtaagcaaagctgaactgtaaatcttcaggaatatgtattaagattgtggaatgggtgtaagacaattggtagggggtgaaagtgggtttgattaaatggatcttttatggccctatgatctatcctttacttgaaagcttttgaaaagtggaaaggtcattttgttgcatttccccatttcttgtttttaaaagaccaacaaatctcaagccctataaatggcttgtattgaacttttacatttgaattaaagatgttaaacatgaagtcttttcatgtattcaagtgatttataaagatggggtgtagtctaaaaaacaatacttgaaagtaagaaggtttagtaactgagccactgcgccaggccgattaataagatttctttggtattagttcacttgacagttatataatgttatgtttgagaatttggtaactctgattcttgtatcctttggagtaatcataccctttaattagcaggatcaggtgagctgtgtccagaaaaccaacgagaacgagtggaaggaggaatgaacgcttcattctcgttaataaaggcattatccaaatt

SEQ ID NO: 70412 - DNA, 1084 bp, Homo Sapiens
  misc_feature (934)..(934): n is a, c, g, or t
  misc_feature (973)..(973): n is a, c, g, or t
caagtcaggctaggtacgaggcctgggtttgaattcggcacgaggcgtcctcggagcaggcagagcagccgagccagccaagctctactccaggaagtgaaaatgtgctgcctcgagagccgctgattgccacggcagtgaagtttctacagaattcccgggtccgccagagcccacttgcaaccaggagagcatttctaaagaagaaagggctgacagatgaagagattgatatggccttccagcagtcgggcactgctgccgatgagccttcgtccttgggcccagccacacaggtggttcctgtccagccccctcacctcatatctcagccatacagtcccgcaggctcccgatggcgagattacggcgccctggccatcatcatggcaggcattgcatttggctttcaccagctctacaagaaatacctgctccccctcatcctgggcggccgagaggacagaaagcagctggagaggatggaggccggtctctctgagctgagtggcagcgtggcccagacagtgactcagttacagacgaccctcgcctccgtccaggagctgctgattcagcagcagcagaagatccaggagcttgcccacgagctggccgctgccaaggccaccacatccaccaactggatcctggagtcccagaatatcaacgaactcaagtccgaaattaactccttgaaagggcttcttttaaatcggaggcagttccctccatccccatcagccccgaagatcccctcctggcagatcccagtcaagtcaccgtcaccctccagccctgcggccgtggaacaccacagcagcagcgacatctcacctgtcagcaaacgagtccacgtcgtcctccgcccggggaaagagggccacagcccccgagggctccacgggtcacctaccacttgctgggcccccangagaaaggcaaggggggtggttggaacgtcaaggccagntggccgaatggaggtgcaaggcggaaaaggaaaagagggaggacaaggtaggaccaggaagattaagggaggatgattattgtaaccctggtggaccaggaagaacggcct

SEQ ID NO: 70413 - DNA, 1416 bp, Homo Sapiens
tgcggccgcagcgaggagaagatctcggactcggaggggtttaaagccaatttgtctctcttgaggaggcctggagagaaaacttacacacagcgatgtcggttgtttgttgggaatctacctgctgatatcacggaggatgaattcaaaagactatttgctaaatatggagaaccaggagaagtttttatcaacaaaggcaaaggattcggatttattaagcttgaatctagagctttggctgaaattgccaaagccgaactggatgatacacccatgagaggtagacagcttcgagttcgctttgccacacatgctgctgccctttctgttcgtaatctttcaccttatgtttccaatgaactgttggaagaagcctttagccaatttggtcctattgaaagggctgttgtaatagtggatgatcgtggaagatctacagggaaaggcattgttgaatttgcttctaagccagcagcaagaaaggcatttgaacgatgcagtgaaggtgttttcttactgacgacaactcctcgtccagtcattgtggaaccacttgaacaactagatgatgaagatggtcttcctgaaaaacttgcccagaagaatccaatgtatcaaaaggagagagaaacccctcctcgttttgcccagcatggcacgtttgagtacgaatattctcagcgatggaagtctttggatgaaatggaaaaacagcaaagggaacaagttgaaaaaaacatgaaagatgcaaaagacaaattggaaagtgaaatggaagatgcctatcatgaacatcaggcaaatcttttgcgccaagatctgatgagacgacaggaagaattaagacgcatggaagaacttcacaatcaagaaatgcagaaacgtaaagaaatgcaattgaggcaagaggaggaacgacgtagaagagaggaagagatgatgattcgtcaacgtgagatggaagaacaaatgaggcgccaaagagaggaaagttacagccgaatgggctacatggatccacgggaaagagacatgcgaatgggtggcggaggagcaatgaacatgggagatccctatggttcaggaggccagaaatttccacctctaggaggtggtggtggcataggttatgaagctaatcctggcgttccaccagcaaccatgagtggttccatgatgggaagtgacatggtaagaatgattgatgttggctgatattggagtgctcattcacatgaagtggatagatacttctcaagacatcacacagcgtgagtcaatcaaggagggaagccacaagcagactgacaacgtttctagcaggatcaggtgagctgtgtccagaaaaccaacgagaaggagtggaaggaggaatgaacgtttcattctcgttaataaaggcattatcctaat

SEQ ID NO: 70414 - DNA, 981 bp, Homo Sapiens
  misc_feature (246)..(246): n is a, c, g, or t
  misc_feature (378)..(413): n is a, c, g, or t
gaatatttaaggtcaataaaactgcttaacatcccataaaaagatagctttcttacttaaaatgcaagaattttaaaagatgggtatctaaacaaaaaaccaaaaccaaccgggaatgaaagcctaaatatcacatctaaaatcggggttttttgttggggccttcgtactcttctctccctctaccatatcctgctggagttccaggccccattcctctaggaccctgtccacccacaggcccgncacctccctgcccaaagcgctcagtacgcatgtcacttcccatcatggaaccactcatggcagctgcactgcggcctggtggcagtgtggggagtcacacttctgtccacctggcctcctctcgcctggccnnnnnnnnnnnnnnnnnnnnnnnnnnnnnnnnnnnntgcctttggctttgatctcaagtcaggctgaaggcagcgaagcctcggggcccaagcccctccccagccccctctcccggacagacgccttgcccagggtgtgtttgctgagtgtcttgactaccgtgacaccacgcatggccagagctagcgtccctactgcctcccgactcctcagtggaggaggagctgcggtccctctggtgtctgccatccccctccctccctgggcccggccctggacccgtcaggtgcctgtccccagccccaaccccactcatgccccgtcgtcctcccagacaaatgaaaccacgctgcgcttccgatgcccccgcttgccgtgtaatggttcagctaatcccatggcgagatgggggctcactccggaggaggagccaggcagcagggccttcctgaccaacagccagctctgtccttccccccaggaaacacatgttcatttgtgtgatcatgtatagacctcagaacggaagataggactgtatataattgtaataaataccagttgcccctcgtgccgaattcgccacccaggcctcgctacctt

SEQ ID NO: 70415 - DNA, 446 bp, Homo Sapiens
tttttacttaagaaaatgtaggagaaggtcaggcatgggggctttacacctatattcctagcactttgggaggcagaagtggaaggattgcttgagcccagcctgggcaaaatagtgagaccatgtctcgacagaaaaaaatatagccaggtgtggtggtgtgtgcatgtggtcccagctcccttggaggctgaggtgggagggatcgcttgatcctgggaggttgagactgcagtgagcaagttaacattttttgtaacaggtggatagatacttctcaagacatcacacagcgtgagtcaatcaaggagggaagccacaagcagactgacaacgtttctagcaggatcaggtgagctgtgtccagaaaaccaacgagaaggagtggaaggaggaatgaacgtttcattctcgttaataaaggcattatcctaattatcaaaaaa

SEQ ID NO: 70416 - DNA, 1073 bp, Homo Sapiens
  misc_feature (205)..(205): n is a, c, g, or t
agtgaaaagggcttggacttaagataggacaatgtggagaatggggggaagaatgcaaaacgatatagtatcccttatggatggtacatgtgcaacagggaactcttacttcatataccctttgcagtaatcattcagggaggaagaaaaacctggaacttgaatgaaggctgatctttgttttgtgcactgtggccctgcagcnatatagtgaaggtgaatgtcttctccctcagaaaaaaattggttccttgctgtcccagtaaggcatagcttttccagccctaactttaaaactcagtgaggacttagatgggaaagaatgaggtaaatacaaaggattgcaggacaaaaactacagcgttgtgtactgtgggaaggggagttgggcactcttggaggactcctgctgaaggtggtcagcctgcctgacaatggaagacatacttgaatggggagcagggtatgtgctttcatatgaaaaaagagctgatgttaaaactcatttggtgaggtcaacgttgtcacataccttcacataagggatagtatattttgggttgcagtcaaacttgtgctcagactggtgaaactgagagtcaggcttttacattttaaagaaaatacagttttcattctaattcaggtgtctacttattttatgtaagaataattttagatttcccccccaccatgaagtttcttcctatttttttatgctgtaacttacccccaatctttatctctggatttttactctttaaattttgaagttgactagcattttcaaacctttattttatacccttgtcttttatattaactttttcttattattctttaggtaagaatgattgatgttggctgatattggagtgctcattcacatgaagtggatagatacttctcaagacatcacacagcgtgagtcaatcaaggagggaagccacaagcagactgacaacgtttctagcaggatcaggtgagctgtgtccagaaaaccaacgagaaggagtggaaggaggaatgaacgtttcattctcgttaataaaggcattatcctaattaaaaaa

SEQ ID NO: 70417 - DNA, 1699 bp, Homo Sapiens
  misc_feature (20)..(20): n is a, c, g, or t
  misc_feature (40)..(40): n is a, c, g, or t
  misc_feature (86)..(86): n is a, c, g, or t
  misc_feature (91)..(93): n is a, c, g, or t
  misc_feature (316)..(316): n is a, c, g, or t
  misc_feature (1467)..(1469): n is a, c, g, or t
  misc_feature (1473)..(1473): n is a, c, g, or t
tggagccaacctggttggangcacccccacgcctggcaancaccccgcttctatgaggcgggtgaggagctaactggacccgggancttgnnnttgcccgcctctacggtctggaacctgctcaccccttgctctacagccgcttggctcctccaccaccacctgctgcggccccgggaacccctcaccttctcagcaagaccccaccgggagcccttttgggggcaccacctccgcttgtgcccgccccccggcccagttccccacctaggggccctggcccagctcgggctgacaggtgaggggaacggggggnggtcggggcaaagctccatctccccttcctttaaccaggtcctagggctgaggttttaagccagggctggagggcaaaggtcataacctcaccagccacctctgaggtcatggaacctgggaacagaagcctcaacccccacaagaccaagcatcacatggagtgtagggtcactgggagagcagaggtcacagcctctagagaagggagaggggcgtgtgcatgggagtgtggctcatctcgggggccatggggcctcctgaggtacacctttgcccctgtaagggcctctaggccctgggcctgcctccccaagggctcactaagccagaggccaaagtgccccctcccgttcacctaccacccaagtcctcatgccctccgagggctgggggaggaggggctcaaggaaggggggttccatgtacatatttatcacccctttcacatagccccaagaccttttgtacatttttacaggggtgcgccctcccaacagttcccttcctggttaattaaaccctcagactggtgctgtgttcctagcctctggcctctctgtggggaaaggggactgcagggggaagagccgggaagggacagtcaggcttctccctgggaaggtggggccagcaggagatgaccaacagggggcaggacctggggacctgggctggagggaagggcagaagcttcctacttggctgacagccccggttcccccaacatgttcccgttcactctgcccccacccccaaaggctcagcctctaaatctcagactccaccacctcttaatggctcagtccccttcaccccatttccaagtgcccccaggactcctgggccctgcttccctgaaccctgttctccaaaaccctgccccaggctaagggtggccagagaaggtcaccatgtaccacacaccaaagaagggggtcggcccaggggtgggcgacacaggcagcttcttcggcagcctcacggcagcaaccccagccttcccaaagcagcaggcgcctccaggctggggcccaacctagaaggcaggggtcaatctaacaaaaccctaacgttgacttttttccctggtggggcttcttctgtaacatgacttgcgaatatttatataaaaacgagtgttacaatgcnnncccnttcccccgcccacccgaaaacaccatggtcggcccgccttcggccccctcaaaaagcttttctaaaaccattccgtttggcggcccgggcccccagtaagtaaaatgaacctgggcccaaaactggtttcccaaggaaaaacccggggccattgaacaaagggctttgggattccccccccaattaaaaaaccgccccggggcgggaaaccccgggcgggttcttg

SEQ ID NO: 70418 - DNA, 1543 bp, Homo Sapiens
ctcagtacgagactgggtggcgaattcggtacgaggcaagaacgatgacctttggccgcaagggtgtgagccacgggcagttctttgaccagcacctcaagtttatcaagctgaaccagcagtttgtgcacttcacccagctggacctgtcttacctgcagcgggaggcctatgaccgagatttcctcgcccgcgtctacggtgctccccagctgcaggtggagaaagtgaggaccaatgaccggaaggagctgggggaggtgcgggtgcagtatacgggcagggacagcttcaaggctttcgccaaggctctgggtgtcatggatgaccttaagtcgggggttccgagagctggctaccggggtattgtcaccttccagttccggggccgccgtgtccacctggcgcccccaccgacgtgggagggctatgatcctagctggaattagcacctgcctgtccttcctgggcccctccttgccacatcatgagctgaggtgggaccacagtccccaggctgcatcggcctgcctgtgtttccctcttaggtgcatttatctttttgatttttccgagtggcatttaagtgcacaaatgataacaagaggattattctcccgttctcaagggagtcagatcaggggaactattctagggtatgttgcggggtattaagcaggaaaccactgtgtggtggggggcactgggcttgttggggccagaaatgtccacgtcctgagctttctcctggagcatgtgcagagagtttggcaacgttcgctctcttgaccagaccccttctccctgacctggctcttccagccagggcacgagccctccttctatacctgctccccttcccccagtggggactgagttatgggagaaggggacatatttgtggccaaaatgatactaaccaaaggggcttccttgtcagggcctggtggagttggtgggtcatcggggctcactgcctcctgcccttctctcctgtctgacccccacttagcccttctctccttgcagcctagcagtttatagttctgagatggaaagttgaagggggcaagcaagacctctcctcagcccatgcccagctgtcaggagagaggtgcagggaggaaggccttgtgctgggacaacctctctcttgccttacctcagagagggactatgccctgacccctcctttctgaaaatcagtgccctccctgttgctctaggaggctcctgctggcttggtagaagacagaattcgatctgcctgtccctttttcccctggggtttgacacacaggctcctctcagcatgaggtggagcagtgaccaggtggagcagtgaccaggacgcctctggcccagtgctgcccagcctccccgcccgctcccaggcgccccatgtcctcacaggccaggacgccatggcaggatggagaggacttggtggatttttgtttcttgcctgacctcagtttcatgaaagaaagtggaagctacagaattattttctaaaataaaggctgaattgtctgaaaattat

SEQ ID NO: 70419 - DNA, 1062 bp, Homo Sapiens
cagtcgacggtaccggacatatgcccgggaattcggccattactgccgagggaggatcccaccatacgaggttctcatcccgctgatcgttatactccagtctggctgactgtggccacttgactggacttgtgtggtgtgactcatgataggctccgaaacgcatgcatagtgacagcggtgcgcggtgagcatgggcagttggtgtcaacacacatcgcgcgaatcgtgggtatactagaagttccaccttgagtggattgcggatcatcgggtggtgctcgcatgccgaatccctccaagacttacttgtgagcccaccagccctagcattggtcattgggcagacccctcccttcctgggctgacctgctccctcgaggccagcctgctccctggctgaggctcaggctatccgcccaagctctttgctcattctagggccagtggaggaaaatgtgataaggccagagcttgtgtgctgggcacagaaatcacctgctgcatcctgtgctccgcaggctgggccggagcctctgcccgcaggtttctatgctgtttcttagcacagaatccagcctagccttagccgcagtctaggccctgcttggactaggactccttgcttgaccccatctctggttcctgccctggctcctgcaccagccccagctcctgcctacatccaggcagaaagataggcaggggctcttggaagacgttccgtgctgtgacctccgagccctcctggtgggaagacagctggaaaggctgggaggagaagggaggggttgggggttcccaggagccatgcgtggcctgcagagtccattccatcatgatgctgtgcccgctatgggctgtgtccatgaccagaggctggagtgggggtgtgttagagcccctcaccgggacttgctgtgcggatggggcctgggcctccttcctacaggggctcctctgtgggtgaggggccctctggaatggcatcccatgagcttgtggcctctatctgctaccatctgtgttttatctgagtaaagttaccttacttctggaaaa

SEQ ID NO: 70420 - DNA, 999 bp, Homo Sapiens
  misc_feature (109)..(151): n is a, c, g, or t
  misc_feature (272)..(353): n is a, c, g, or t
  misc_feature (904)..(904): n is a, c, g, or t
acacaccttggccgtttatgtatacagaagtggggtgccgggcgggaagggcgcggggaatgagggaacctagaggccgatgacgtcgttcagctcgaggtccgcgttnnnnnnnnnnnnnnnnnnnnnnnnnnnnnnnnnnnnnnnnnnnttccgcgtcgggcttggcggcagccgcctccgggcgcgccgcgtccatgacgcccagcaccgcgtccagcatggagggccccagatccaggtggaaggacagcagcgggtcggcaggcgannnnnnnnnnnnnnnnnnnnnnnnnnnnnnnnnnnnnnnnnnnnnnnnnnnnnnnnnnnnnnnnnnnnnnnnnnnnnnnnnnccgccgccgtggcggctcaggaacgaggtgtccccgaaggcgtcgccgccgcgccccacgtgcagcgtgtgccggaagtcgccgagcggcgcggagatggacagggcgccgcgatcaggccgcttcttgggctgcgcggggcccagctgcttcagcacgggcatctcgcggtcctcccagagcggggcgggcgcgcgctcacgactccagctctagcccggacccctggttccctggctccgagtccgcctccgtctcctaatccccggcccgcgccttccttcttcctccgggcgggttctcacctgcaccgggagctaaagtgtcagcccctctcgggggccatggcaggagcccaggcagaagcggaatcaccgcccagtccccaggcagagagggttttggcacaggcccctcccaggctttcttatcccccaaaagtttgcctctaggagttaaaggactagaaagcatggtggaaaactgaggccctctgggcgcctcgtgcgaatcctggctcgaggcaattcctaaatgagtcgtataatcgnatctgtctagctgttctgtgtgaatgtatcgtcacattcaaaaatagagcggacatagtgaagctgggtgctaggtgacatccaatatggtgccc

SEQ ID NO: 70421 - DNA, 512 bp, Homo Sapiens
  misc_feature (148)..(224): n is a, c, g, or t
  misc_feature (365)..(365): n is a, c, g, or t
  misc_feature (429)..(429): n is a, c, g, or t
caactgggcccagggcaacccaataaacggcctatacacggcgccctgtccatttccgagccgctcggtgacttccggcacacgctgcacgtggggccgtcgagctacgccttcggggacacctcgttcctgagccgccacggtggcnnnnnnnnnnnnnnnnnnnnnnnnnnnnnnnnnnnnnnnnnnnnnnnnnnnnnnnnnnnnnnnnnnnnnnnnnnnnnagcgccctcgcctgccgacccgttgctgtccttccacctggatatggggccctccatgctggacgcggtgctgggcgtcatggacgcggcgcgcccggaggcggctgccgccaagcccgacgcggaaccccgccccgggangcagcccccccaggcccgctgccgccccaacgcggacctcgagctgaacgacgtcatcggcctntaggttccctcattccccgcgcccttcccgcccggcaccccacttctgtatacataaacggccaaggtgtgtgcccggaaaaa

SEQ ID NO: 70422 - DNA, 463 bp, Homo Sapiens
  misc_feature (79)..(79): n is a, c, g, or t
  misc_feature (83)..(174): n is a, c, g, or t
atctccgcgccgctcggcgacttcgggcacacgctgcacgtggggccgggcggcgacgccttcggggacacctcgttcntgannnnnnnnnnnnnnnnnnnnnnnnnnnnnnnnnnnnnnnnnnnnnnnnnnnnnnnnnnnnnnnnnnnnnnnnnnnnnnnnnnnnnnnnnnnngcgccctcgcctgccgacccgctgctgtccttccacctggatctggggccctccatgctggacgcggtgctgggcgtcatggacgcggcgcgcccggaggcggctgccgccaagcccgacgcggaaccccgccccgggacgcagcccccccaggcccgctgccgccccaacgcggacctcgagctgaacgacgtcatcggcctctaggttccctcattccccgcgcccttcccgcccggcaccccacttctgtatacataaacggccaaggtgtgtgcccggaaaaaaa

SEQ ID NO: 70423 - DNA, 1171 bp, Homo Sapiens
  misc_feature (14)..(14): n is a, c, g, or t
  misc_feature (38)..(38): n is a, c, g, or t
  misc_feature (89)..(89): n is a, c, g, or t
  misc_feature (97)..(110): n is a, c, g, or t
  misc_feature (942)..(942): n is a, c, g, or t
tctgtcttctgctnatgtgtgtactttgcagctgcttntgcagaaatcacaattttcctgtggaataaagatgtcccaaaaatagtcanaaattaannnnnnnnnnnnnntagtaatttatatagatgtcagcaattaggcagatcaaggtttagtttaacttccactgttaaaataaagcttacatagttttcttcctttgaaagactgtgctgtcctttaacataggtttttaaagactaggatattgaatgtgaaacatccgttttcattgttcacttctaaaccaaaaattatgtgttgccaaaaccaaacccaggttcatgaatatggtgtctattatagtgaaacatgtactttgagcttattgtttttattctgtattaaatattttcagggttttaaacactaatcacaaactgaatgacttgacttcaaaagcaacaaccttaaaggccgtcatttcattagtattcctcattctgcatcctggcttgaaaaacagctctgttgaatcacagtatcagtattttcacacgtaagcacattcgggccatttccgtggtttctcatgagctgtgttcacagacctcagcagggcatcgcatggaccgcaggagggcagattcggaccactaggcctgaaatgacatttcactaaaagtctccaaaacatttctaagactactaaggccttttatgtaatttctttaaatgtgtatttcttaagaattcaaatttgtaataaaactatttgtataaaaattaagcttttattaatttgttgctagtattgccacagacgcattaaaagaaacttactgcacaagctgctaataaatttgtaagctttgcataccttacaaaaaaacctcgtgccgaattcttgtgctcgagggccaaattcctatagtgagtcgtattaattcgtaacatgtcaanctgtttctgtgtgaattgtatcgctcaatttcacaacatacgagcggagcataagtgaaacctggggtgctatgagggagtactcacatattgggtggggcacagcccgttcacagggaaacctgctgcactgattatgatcgcacccccggagagggttggtatgggtctcccctccgccacgaccctcgctggttggtggtggatgttcaccccatggtgacagtac

SEQ ID NO: 70424 - DNA, 2473 bp, Homo Sapiens
  misc_feature (449)..(449): n is a, c, g, or t
  misc_feature (603)..(603): n is a, c, g, or t
  misc_feature (628)..(628): n is a, c, g, or t
  misc_feature (1982)..(1995): n is a, c, g, or t
gggtccggaattctcgggatcggaggggcccaaaggagaccgcggacctcagggccagcctggcctgccaggacttccgggacccatggggcctccagggcttcctgggattgatggagttaaaggtgacaaaggaaatccaggctggccaggagcacccggtgtcccagggcccaagggagaccctggattccagggcatgcctggtattggtggctctccaggaatcacaggctctaagggtgatatggggcctccaggagttccaggatttcaaggtccaaaaggtcttcctggcctccagggaattaaaggtgatcaaggcgatcaaggcgtcccgggagctaaaggtctcccgggtcctcctggccccccaggtccttacgacatcatcaaaggggagcccgggctccctggctcctgagggccccccagggctgaaaggctgntcttcagggactgccagccccgaaaggcaagcaaaggtgttacaggattggtgggtatacctggacctccaggtattcctgggtttgacggtgcccctggccagaaaggagagatgggacctgccgggcctactggtccaagaaggatttccanggtccaccaggccccgatgggttgnccaggatccatggggcccccaggcaccccatctgttgatcacggcttccttgtgaccaggcatagtcaaacaatagatgacccacagtgtccttctgggaccaaaattctttaccacgggtactctttgctctacgtgcaaggcaatgaacgggcccatggccaggacttgggcacggctggcagctgcctgcgcaagttcagcacaatgcccttcctgttctgcaatattaacaacgtgtgcaactttgcatcacgaaatgactactcgtactggctgtccacccctgagcccatgcccatgtcaatggcacccatcacgggggaaaacataagaccatttattagtaggtgtgctgtgtgtgaggcgcctgccatggtgatggccgtgcacagccagaccattcagatcccaccgtgccccagcgggtggtcctcgctgtggatcggctactcttttgtgatgcacaccagcgctggtgcagaaggctctggccaagccctggcgtcccccggctcctgcctggaggagtttagaagtgcgccattcatcgagtgtcacggccgtgggacctgcaattactacgcaaacgcttacagcttttggctcgccaccatagagaggagcgagatgttcaagaagcctacgccgtccaccttgaaggcaggggagctgcgcacgcacgtcagccgctgccaagtctgtatgagaagaacataatgaagcctgactcagctaatgtcacaacatggtgctacttcttcttctttttgttaacagcaacgaaccctagaaatatatcctgtgtacctcactgtccaatatgaaaaccgtaaagtgccttataggaatttgcgtaactaacacaccctgcttcattgacctctacttgctgaaggagaaaaagacagcgataagctttcaatagtggcataccaaatggcacttttgatgaaataaaatatcaatattttctgcaatccaatgcactgatgtgtgaagtgagaactccatcagaaaaccaaagggtgctaggaggtgtgggtgccttccatactgtttgcccattttcattcttgtattataattaattttctacccccagagataaatgtttgtttatatcactgtctagctgtttcaaaatttaggtcccttggtctgtacaaataatagcaatgtaaaaatggttttttgaacctccaaatggaattacagactcagtagccatatcttccaaccccccagtataaatttctgtctttctgctatgtgtggtactttgcagctgcttttgcagaaatcacaattttcctgtggaataaagatggtccaaaaatagtcaaaaattaannnnnnnnnnnnnntagtaatttatatagatgtcagcaattaggcagatcaaggtttagtttaacttccactgttaaaataaagcttacatagttttcttcctttgaaagactgtgctgtcctttaacataggtttttaaagactaggatattgaatgtgaaacatccgttttcattgttcacttctaaaccaaaaattatgtgttgccaaaaccaaacccaggttcatgaatatggtgtctattatagtgaaacatgtactttgagcttatggttttattctgtattaaatattttcagggttttaaacacataaatcacaaactgaatgacttgacttcaaaagcaacaaccttaaaggccgtcatttcattagtatcctcaattctggatctggcttgaaaaacagctcgttgattcacagtatcagtatttcacacggtaagcacatccgggcatttccggggttctcatgagtgtgtcacagactta

SEQ ID NO: 70425 - DNA, 1117 bp, Homo Sapiens
  misc_feature (182)..(183): n is a, c, g, or t
gtacgattatagatccttaggattgcctgagccagaatcgcacagtcatcacgttgtaaaggaactcgcataaatctctcgatgtttctgatgctcaaggaactgtaccagagtgagagacccagtatggcatgcatcatcatgttgtgcatccagtaagagcacacatttcagaaaatcanngatgcctgtattaaaccagacatagccaactgggagctctcagtaaaattgcatgataaagttcataccgtagtagcatcaaacaatgggtcagtgttctcggtggaagttgatgggtcgaaactaaatgtgaccagcacgtggaacctggcttcgcccttattgtctgtcagcgttgatggcactcagaggactgtccagtgtctttctcgagaagcaggtggaaacatgagcattcagtttcttggtacagtgtacaaggtgaatatcttaaccagacttgccgcagaattgaacaaatttatgctggaaaaagtgactgaggacacaagcagtgttctgcgttccccgatgcccggagtggtggtggccgtctctgtcaagcctggagacgcggtagcagaaggtcaagaaatttgtgtgattgaagccatgaaaatgcagaatagtatgacagctgggaaaactggcacggtgaaatctgtgcactgtcaagctggagacacagttggagaaggggatctgctcgtggagctggaatgaaggatttataacctttcagtcatcacccaatttaattagccatttgcatgatgctttcacacacaattgattcaagcattatacaggaacacccctgtgcagctacgtttacgtcgtcatttattccacagagtcaagaccaatattctgccaaaaaatcaccaatggaaattttcattgatataaatacttgtacatatgatttgtacttctgctgtgagattccctagtgtcaaaattaaatcaataaaactgagcatttgtctaaatattagtttgccctttctttgaatgaagacaatgtacacataggcgaccaggctctgccagtagactaccagcatttctttgtgatccttttaagagattgatataaatgtcagtcagttct

SEQ ID NO: 70426 - DNA, 1034 bp, Homo Sapiens
attaatcaaatgatacaaaacaaccatcattctgtcaatgcccaagcacccagctggtcctctccccacatgtcacactctcctcagcctctcccccaaccctgctctccctcctcccctgccctagcccagggacagagtctaggaggagcctggggcagagctggaggcaggaagagagcactggacagacagctatggtttggattggggaagagattaggaagtaggttcttaaagacccttttttagtaccagatatccagccatattcccagctccattattcaaatcatttcccatagcccagctcctctctgttctccccctactaccaattctttggctcttacacaatttttatccctcaaatattcatccctggcccaaccagtcccctgagcctccctctggtggagactcctccacccatgagctccccagagcatccaagacagagtgcacagagacctggggaaggaagctgaactttgcagagatgaggacaggtgcaggctagggtacagggtggtggtagaggagacaagttttatctccaggcccacagtctctccccaacaccccccaagaattccagagggagttctcagtgcccccggacaggcctctccagcttcacactcttggccgcttctccaatcagctcccagaaactcctgaactccagtttagagtcattgcagctgcccaggttggcaattttctcttccaggccacagttgctcggcatgagatggggcagctgctgggtgaccaggtcccgtagctcagaaggggtcagcgtctccttcccaccctccacggagtactggtgaaagttcttgatgagggtctcaatggccctctccacatcactgaattcctgagcatcctctgcgttggctgaccgacactgtcccatggtgctcactgtgtctggtcctttggtgagagttctgttgtcctatagctggccccagaggagctgatggctcatgatctgttggcagccgctgagacaagacaggagcccc

SEQ ID NO: 70427 - DNA, 1839 bp, Homo Sapiens
aggctaggtagcgaggccgggtgttaatcggcacgagggtccgtgcaccggctcccagatcgcgcgagacagcggaaggagcaagagtgggaggcgcgcgcggaggccgcgacggacgcaagatggcgacggcgaccatagctctcggcacagactccatcaagatggagaacgggcagagcacagccgccaagctggggctgcctcccctgacgcccgagcagcaggaggcccttcagaaggccaagaagtacgccatggagcagagcatcaagagtgtgctggtgaagcagaccatcgcgcaccagcagcagcagctcaccaacctgcagatggcggctcagcggcagcgggcgctggccatcatgtgccgcgtctacgtgggctctatctactatgagctgggggaggacaccatccgccaggcctttgccccctttggccccatcaagagcatcgacatgtcctgggactccgtcaccatgaagcacaagggctttgccttcgtggagtatgaggtccccgaagctgcacagctggccttggagcagatgaactcggtgatgctggggggcaggaacatcaaggtgggcagacccagcaacatagggcaggcccagcccatcatagaccagttggctgaggaggcacgggccttcaaccgcatctacgtggcctctgtgcaccaggacctctcagacgatgacatcaagagcgtgtttgaggcctttggcaagatcaagtcctgcacactggcccgggaccccacaactggcaagcacaagggctacggcttcattgagtacgagaaggcccagtcgtcccaagatgctgtgtcttccatgaacctctttgacctgggtggccagtacttgcgggtgggcaaggctgtcacaccgcccatgcccctactcacaccagccacgcctggaggcctcccacctgccgctgctgtggcagctgctgcagccactgccaagatcacagctcaggaagcagtggccggagcagcggtgctgggtaccctgggcacacctggactggtgtccccagcactgaccctggcccagcccctgggcactttgccccaggctgtcatggctgcccaggcacctggagtcatcacaggtgtgaccccagcccgtcctcctatcccggtcaccatcccctcggtgggagtggtgaaccccatcctggccagccctccaacgctgggtctcctggagcccaagaaggagaaggaagaagaggagctgtttcccgagtcagagcggccagagatgctgagcgagcaggagcacatgagcatctcgggcagtagcgcccgacacatggtgatgcagaagctgctccgcaagcaggagtctacagtgatggttctgcgcaacatggtggaccccaaggacatcgatgatgacctggaaggggaggtgacagaggagtgtggcaagttcggggccgtgaaccgcgtcatcatctaccaagagaaacaaggcgaggaggaggatgcagaaatcattgtcaagatctttgtggagttttccatagcctctgagactcataaggccatccaggccctcaatggccgctggtttgctggccgcaaggtggtggctgaagtgtacgaccaggagcgttttgataacagtgacctctctgcgtgacagtggtccctctccccggacttgcacttgttccttgtttcctctgggttttatagtgatacagtggtgtccccggggccaggcgcgctctgcccagcccagcctacagtgcggataaaggtgcggatgctgctggccctgaacgtccgtgtgtctgccgtcggtcctgtcaccg

SEQ ID NO: 70428 - DNA, 955 bp, Homo Sapiens
tagggcatggtcggtgtgacagccttgcccacccgcaagtactgcccacccaagtcaaagaggttcatggaagacacagcattcttgggacgactgggccttctcgtactcaatgaagccgtagcccttgtgcttgccagttgtggggtcccgggccagtgtgcaggacttgatcttgccaaaggcctcaaacacgctcttgatgtcatcgtctgagaggtcctggtgcacagaggccacgtagatgcggttgaaggcccgtgcctcctcagccaactggtctatgatgggctgggcctgccctatgttgctgggtctgcccaccttgatgttcctgccccccagcatcaccgagttcatctgctccaaggccagctgtgcagcttcggggacctcatactccacgaaggcaaagcccttgtgcttcatggtgacggagtcccaggacatgtcgatgctcttgatggggccaaagggggcaaaggcctggcggatggtgtcctcccccagctcatagtagatagagcccacgtagacgcggcacatgatggccagcgcccgctgccgctgagccgccatcgattgcaaaggtgagagaggatctccaaagcccattgtcactgctgccatctgcaggttggtgagctgctgctgctggtgcgcgatggtctgcttcaccagcacactcttgatgctctgctccatggcgtacttcttggccttctgaagggcctcctgctgctcgggcgtcaggggaggcagccccagcttggcggctgtgctctgcccgttctccatcttgatggagtctgtgccctgtggaggtttccatttgtctcccgctgccaccactgccgccgccgccgccggctcggacccccctccttgctggccattgacctgctagcggacaggaacgcaaccccgccaggctcgcccgatcccgggaattcgg

SEQ ID NO: 70429 - DNA, 669 bp, Homo Sapiens
taggctaggtacgaggccgggtgttgaattcggcacgaggggcgacggcgaccatagctctccaggtcaatggccagcaaggaggggggtccgagccggcggcggcggcggcagtggtggcagcgggagacaaatggaaacctccacagggcacagactccatcaagatggagaacgggcagagcacagccgccaagctggggctgcctcccctgacgcccgagcagcaggaggcccttcagaaggccaagaagtacgccatggagcagagcatcaagagtgtgctggtgaagcagaccatcgcgcaccagcagcagcagctcaccaacctgcagatggcagcagtgacaatgggctttggagatcctctctcacctttgcaatcgatggcggctcagcggcagcgggcgctggccatcatgtgccgcgtctacgtgggctctatctactatgagctgggggaggacaccatccgccaggcctttgccccctttggccccatcaagagcatcgacatgtcctgggactccgtcaccatgaagcacaagggctttgccttcgtggagtatgaggtccccgaagctgcacagctggccttggagcagatgaactcggtgatgctggggggcaggaacatcaaggtgggcagaccagcaacatagggcaggc

SEQ ID NO: 70430 - DNA, 1154 bp, Homo Sapiens
aaactatagagctaggtacgaggccgggtgttaattcggcacgagggggaggcgcgcgcggatggccgcgacggacgcaagatggcgacggcgaccatagctctccaggtcaatggccagcaaggaggggggtccgagccggcggcggcggcggcagtggtggcagcgggagacaaatggaaacctccacagggcacagactccatcaagatggagaacgggcagagcacagccgccaagctggggctgcctcccctgacgcccgagcagcaggaggcccttcagaaggccaagaagtacgccatggagcagagcatcaagagtgtgctggtgaagcagaccatcgcgcaccagcagcagcagctcaccaacctgcagatggcagcagtgacaatgggctttggagatcctctctcacctttgcaatcgatggcggctcagcggcagcgggcgctggccatcatgtgccgcgtctacgtgggctctatctactatgagctgggggaggacaccatccgccaggcctttgccccctttggccccatcaagagcatcgacatgtcctgggactccgtcaccatgaagcacaagggctttgccttcgtggagtatgaggtccccgaagctgcacagctggccttggagcagatgaactcggtgatgctggggggcaggaacatcaaggtgggcagacccagcaacatagggcaggcccagcccatcatagaccagttggctgaggaggcacgggccttcaaccgcatctacgtggcctctgtgcaccaggacctctcagacggatgacatcaagagcgtgtttgaaggccttgggcaagaattcaagtcctggacacttggcgcgggaccccacatctgggaagcacacaggctacgggtccatgcgagtcgaaaaggcccagtcgtcccagatgtgtgtcttccataaccctctttgacctgcggtgcacgacatgcgggtgggcaagcttgtaacccgccagtccttaatcaaaagaacgcctggtggggacccccctgcgcgttgtatacgtattatacacgccagaacacacagacatgtccacaaagaacggtgcacgagaccaagtagagtgctcataatcgacacacgtggacatactgcatagagatga

SEQ ID NO: 70431 - DNA, 1169 bp, Homo Sapiens
acccgttgggggtaaatcggacgaggtcggcacagactccatcaagatggagaacgggcagagcacagccgccaagctggggctgcctcccctgacgcccgagcagcaggaggcccttcagaaggccaagaagtacgccatggagcagagcatcaagagtgtgctggtgaagcagaccatcgcgcaccagcagcagcagctcaccaacctgcagatggcagcagtgacaatgggctttggagatcctctctcacctttgcaatcgatggcggctcagcggcagcgggcgctggccatcatgtgccgcgtctacgtgggctctatctactatgagctgggggaggacaccatccgccaggcctttgccccctttggccccatcaagagcatcgacatgtcctgggactccgtcaccatgaagcacaagggctttgccttcgtggagtatgaggtccccgaagctgcacagctggccttggagcagatgaactcggtgatgctggggggcaggaacatcaaggtgggcagacccagcaacatagggcaggcccagcccatcatagaccagttggctgaggaggcacgggccttcaaccgcatctacgtggcctctgtgcaccaggacctctcagacgatgacatcaagagcgtgtttgaggcctttggcaagatcaagtcctgcacactggcccgggacccccacaactggcaagcacaagggctacggcttcattgagtacgagaaggcccagtcgtcccaagatgctgtgtctttccatgaactctttgacctgggtggggccatactggcggctggggcaagggtgttcaccacggccatgggcccttatctcgaaccaggcacgctcgggagggtcccacttggcgtgctgtgtgcgcctgtgtgcggccctggcgacgatatcaagttcaaggaaggaatgggccgggcaacactagtgggtgaaccccgcgcaccccgggctggtgggtccaccactgagatcgtgccaaccccgcggtatttgcccacgatggtgatggccgagccggaagcaactagtgatcacacgagtacttgcacacacacacggagggggagactacaacacacagccctacatagccagagtacgacagctactcaagacacacaactaacgaggaag

SEQ ID NO: 70432 - DNA, 924 bp, Homo Sapiens
cggcagtactatacggtctaaggtagcgaggcctgggtggctgaattcggcacgagggtgggaggcgcgcgcggaggccgcgacggacgcaagatggcgacggcgaccatagctctccaggtcaatggccagcaaggaggggggtccgagccggcggcggcggcggcagtggtggcagcgggagacaaatggaaacctccacagggcacagactccatcaagatggagaacgggcagagcacagccgccaagctggggctgcctcccctgacgcccgagcagcaggaggcccttcagaaggccaagaagtacgccatggagcagagcatcaagagtgtgctggtgaagcagaccatcgcgcaccagcagcagcagctcaccaacctgcagatggcggctcagcggcagcgggcgctggccatcatgtgccgcgtctacgtgggctctatctactatgagctgggggaggacaccatccgccaggcctttgccccctttggccccatcaagagcatcgacatgtcctgggactccgtcaccatgaagcacaagggctttgccttcgtggagtatgaggtccccgaagctgcacagctggccttggagcagatgaactcggtgatgctggggggcaggaacatcaaggtgggcagacccagcaacatagggcaggcccagcccatcatagaccagttggctgaggaggcacgggccttcaaccgcatctacgtggcctctgtgcaccaggacctctcagacgatgacatcaagagcgtgtttgaggcctttggcaagatcaagtcctgcacactggcccgggaaccccacaactggcaagcacaagggctacggcttcattgagtacgagaaggcccagtcgtcccaagaatgctgtgtcttccatgaacctctttgactgggtgg

SEQ ID NO: 70433 - DNA, 1543 bp, Homo Sapiens
ctgggtcatcggttccctggaaggagaaaaagctgccaattgaacggggcctcccggtcccaggaatgtcgcgacgcggggacgacgcatctcacgacgtcagcctgaaacacgcgggcctttcatcacccgagactcctccagcccaggagggccccgctctttcgcctgcctcctgggggagagcctctggacgacgcacgcgacagcgttttctccaaaaaaggcagagaagagaagcgtagcagtggccgcaagggcgacgggcggcgaagggtactacgcacgcccgcgtcggccacgcggagagatacgcccgactcgagtcccgcggcgcacgcccctagacgcccgaggtgcgcgggccacgcccctcgcccggccaagagcacgccccttccgtcgcccctcccgggggcgtttaccgttcctccccgccccggaagcgcgttcttacctccttcctcgcgagagttccgtgcaccggcacccagatcgcgcgagacagcggaaggagcaagagtgggaggcgcgcgcggaggccgcgacggacgcaagatggcgacggcgaccatagctctccaggtcaatggccagcaaggaggggggtccgagccggcggcggcggcggcagtggtggcagcgggagacaaatggaaacctccacagggcacagactccatcaagatggagaacgggcagagcacagccgccaagctggggctgcctcccctgacgcccgagcagcaggaggcccttcagaaggccaagaagtacgccatggagcagagcatcaagagtgtgctggtgaagcagaccatcgcgcaccagcagcagcagctcaccaacctgcagatggcagcagtgacaatgggctttggagatcctctctcacctttgcaatcgatggcggctcagcggcagcgggcgctggccatcatgtgccgcgtctacgtgggctctatctactatgagctgggggaggacaccatccgccaggcctttgccccctttggccccatcaagagcatcgacatgtcctgggactccgtcaccatgaagcacaagggctttgccttcgtggagtatgaggtccccgaagctgcacagctggccttggagcagatgaactcggtgatgctggggggcaggaacatcaaggtgggcagacccagcaacatagggcaggcccagcccatcatagaccagttggctgaggaggcacgggccttcaaccgcatctacgtggcctctgtgcaccaggacctctcagacgatgacatcaagagcgtgtttgaggcctttggcaagatcaagtcctgcacactggccccgggaccccacaactgggcaagcacaaagggctacgggcttcattgagtacgaggaggccccagtcgtccccaagatgctgtgggtcttccatggaacctctttggaccctgggttggccagaaaccttggcgggttggggcaaaggcctgttcccaaccggcccaatgccccccttacttcacacccaaccccccgcccttgggaaggg

SEQ ID NO: 70434 - DNA, 1978 bp, Homo Sapiens
  misc_feature (718)..(728): n is a, c, g, or t
  misc_feature (1308)..(1359): n is a, c, g, or t
cgccgtcctcttttcctcagatgccctctgctgcaggtgtagagaggagagagagtgaacagggagcggggcttttgtctgttggtctccctggactgaagagagggagaatagaagcccaagactaagattctcaaaatggtttattacccagaactctttgtctgggtcagtcaagaaccatttccaaacaaggacatggagggaaggcttcctaagggaagacttcctgtcccaaaggaagtgaaccgcaagaagaacgatgagacaaacgctgcctccctgactccactgggcagcagtgaactccgctccccaagaatcagttacctccactttttttaatcgtaacacctccatttgtattacatatggtgtatgggtattgatgaggtcatggtatcatatatgggatttttttctgtgtaaatcatcaagtataagaagaaactatgggactctgagccttgctttagagaatttacagtggacaaataggtgtcatcaaaccagtttttaatcattctgactcaagtgaaaacgctcagaatttcacactgtgaatccacgtttacaacccttacaggtgggccttcaggcctggttcgctacaacaatgtcttccacaactcaaactcccaccgcgctcacacaaccggtccactcctgccttttcactcacacagctcccgactgcttcttgcagaggctgagagtnnnnnnnnnnnaccttttttttcatttagatgtaacaaacctagtagtttatgttcatcaattgtctgtatatctctatattttatccatgtactcttttgatgtatagaagtagtttgaaactcattgtttccttgtggtaagtgaccgagatgctgccacaggacctgagacactgatgaatggtgctattttggactttcaacatgctccttggcgaggtagctctgatggagttattttttatttccatgttctaagaaggtgttggtactctgtttccctgaatgttgttctctagactggattgacttgttttccttgtgtcttcagtgtggctttcttcctcagtgttgtaggttgagcgaatgctaccagagtgtgagagaccattgtctcgttggctggcgctcacggacatgcagtcacggtagcgggagcaatcacaaaactgtaatttacttaccaaatctcttcctttccgtagcctcgcctgcctgacttacttagagaaagaaaagcaataattttacaggcattttgaggtgtctctttctttgggttctttctgtttgaaaggatatttgtcgnnnnnnnnnnnnnnnnnnnnnnnnnnnnnnnnnnnnnnnnnnnnnnnnnnnnacactggcatctgagtaggaatatgaaaatgacaccttttccaaatattaaattggaaaacaaggtctacaaaatcatgatacttttttaaaaggcagagcattcttttttcggcaattttgataagcaaggtgtagatttacatttttgtccttgctcccaacgaaatggataaacaaaaataaattaccatctactcatggaatgttgttgtgttagccagtctgaaagcccaccttaatttttatataactgtctttagctcttcttttgacagggcaggccttgttctgaactgtttcgcttctgactgttaaacaccgatgacgcatgcactgcacttcttcgttttcttcttgctcccccattggcctgagtttcttgtgcattactcctctccctccttcgttagaataggtatatcagctgtgtaaatagagcaagaaaacagtattctgcatctgtggcatttatgtagagttgcagttgtgtactgctgaaaatgcaggcttttgtaacagtgtgatctttactgatgcactcatgacaagtacccaatgtattttagctattttagtagtatttgttcaataaatacgcaagctgtaaggtaactgtc

SEQ ID NO: 70435 - DNA, 513 bp, Homo Sapiens
aaaaaagtggaggtaactgattcttggggagcggagttcactgctgcccagtggagtcagggaggcagcgtttgtcccatcgttcttcttgcggttcacttcctttgggacaggaagtcttccctgcaaagcaggcagacccacacacagacagacacacataaaagaaaaattagtcatgcttctgaaaccattttttaaaattttgcttttcctgcccagcccacattatacccttgaactcttgctgttttgcaaaacagagtttacatattaaacacagttcacctgaatgtaaatattaggtctgtgaggaaatgaagtaattaaacactgggccacctttgcttcagtagaatgaagtgcttctgttacggtggtgccagccatgtgtgaggcagcattccccagtgtcaggtttcttgggacagtttctagtatcagatagggcccaaccttagactgggtgattgatagatactcacaggagtgtcagttgataattataaaaaa

SEQ ID NO: 70436 - DNA, 570 bp, Homo Sapiens
ccatagaatttggatcctttggtcgggttctcccaaattcttttgaggtgtccatggtcaactgcttcagctttgttttggcaaccccctgcccgaagtcgcatataggctgttcttcaccttgtttccaaggctgaggaacagaaagtagcctctgttttgaggaggtggaagttaagtatacatttattttttactgtgacttgttcaggaccacattttacaaaatgccttgtttccttcattgtttctggaaaggaaagttctattaatattgttttactttgaatatagaatagtttttttaattagggcttattttgaaaaattctgagtttaattcaaatgtatgccaataccttccaaagtaaggtaatattcagagacagttgttgtgatcagatggcttagagaaatttctggaatattcacattcgaagattccttattaatgaatgtctttgacttaaatctaaccaaaaactgcaacattattctttgtacattttcattatatagtgttaacaagcttagttgcaaacaaataaaatacttaagctatttgtttaa

SEQ ID NO: 70437 - DNA, 1921 bp, Homo Sapiens
  misc_feature (80)..(114): n is a, c, g, or t
  misc_feature (1719)..(1732): n is a, c, g, or t
agaatgataatcactatagggcgctcctcttcatagccgaacgacgagcgcagcgagtctgtgagcgaggaagcggccgnnnnnnnnnnnnnnnnnnnnnnnnnnnnnnnnnnncagtcgacggtaccggacatatgcccgggaattcggccattacggccggggacagcgcgcggggcgagccagcgagagggcgcgagcggcggcgctgcctgcagcctgcagcctgcagcctccggccggccggcgagccagtgcgcgtgcgcggcggcggcctccgcagcgaccggggagcggactgaccggcgggagggctagcgagccagcggtgtgaggcgcgaggcgaggccgagccgcgagcgacatgggggaccgggagcagctgctgcagcgggcgcggctggccgagcaggcggagcgctacgacgacatggcctccgctatgaaggcggtgacagagctgaatgaacctctctccaatgaagatcgaaatctcctctctgtggcctacaagaatgtggttggtgccaggcgatcttcctggagggtcattagcagcattgagcagaaaaccatggctgatggaaacgaaaagaaattggagaaagttaaagcttaccgggagaagattgagaaggagctggagacagtttgcaatgatgtcctgtctctgcttgacaagttcctgatcaagaactgcaatgatttccagtatgagagcaaggtgttttacctgaaaatgaagggtgattactaccgctacttagcagaggtcgcttctggggagaagaaaaacagtgtggtcgaagcttctgaagctgcctacaaggaagcctttgaaatcagcaaagagcagatgcaacccacgcatcccatccgggtgggcctgggcctcaacttctccgtgttctactatgagatccagaatgcacctgagcaagcctgcctcttagccaaacaagccttcgatgatgccatagctgagctggacacactaaacgaggattcctataaggactccacgctgatcatgcagttgctgcgagacaacctcaacctctgggacgaccgaccaccaggatgaagaagcaggagaaggcaactgaagatccttcaggtcccctggcccttccttcacccaccacccccatcatcaccgattcttccttgccacaatcactaaatatctagtgctaaacctatctgtattggcagcacagctactcagatctgcactcctgtctcttgggaagcagtttcagataaatcatgggcattgctggactgatggttgctttgagcccacaggagctccctttttgaattgtgtggagaagtgtgttctgatgaggcattttactatgcctgttgatctatgggaaatctaggcgaaagtaatggggaagattagaaagaattagccaaccaggctacagttgatatttaaaagatccatttaaaacaagctgatagtgtttcgttaagcagtacatcttgtgcatgcaaaaatgaattcacccctcccacctctttcttcaattaatggaaaactgttaagggaagctgatacagagagacaacttgctcctttccatcagctttataataaactgtttaacgtgaggtttcagtagctccttggttttgcctctttaaattatgacgtgcacaaaccttcttttcaatgcaatgcatctgaaagttttgatacttgtaacnnnnnnnnnnnnnnggttgcaattgtttaagaatcatggatttattttttgtaactctttggctattgtccttgtgtatcctgacagcgccatgtgtgtcagcccatgtcaatcaagatgggtgattatgaaatgccagacttctaaaataaatgttttggaattcaatgggtaaataaatgctgctttggggatattaaaaa

SEQ ID NO: 70438 - DNA, 697 bp, Homo Sapiens
accctcattccccgacaccctgagccagtccccgcccagctcatcagtctgaatggagttgccttaaattggcaggtggtaccgtactcactgcccttggagctgtgaccggctcctgcctgtccaccccttcccgaggtggctcctgcttaccttatcatcccagggctctgattagccaggcctggtcagggtcctggggacggcacccagatatgcagagtcaccctgacactggtgccgggctgacctcagctcccgaaggctcgcacagcctccccatccttccttcccggcccttgtggctctgtccacctgatcccaataccagcttcccccagcccctgccaccccagagggcggccacgacagggagaggtgtagatgccaccatctgagggagaggaacgtggaacaggagcaggctctgatgctgagaggcttgcctccgggggctggaagcctgggtggccggggcccctgaagaaggctcccctctgtatcccccaggtctcctcaacactgggctgatcctgaatggcacaggccaaggggaggccagcctcgcctttctacccaggccccctgccctgcccacctcaggcccccaccctccactcctccccacggtactgtgaacgtcgtgtgactcagtgcagagacagataatatatttaattcatgtacagaaaaaaaa

SEQ ID NO: 70439 - DNA, 1202 bp, Homo Sapiens
gggctcgcagcgttgctcacagaacagagtagaggcggcggcggcggcggccggacccagactggtagtgaggcgttggaccccgagccgctgcaatgccgctggagctggagctgtgtcccgggcgctgggtgggcgggcaacacccgtgcttcatcattgccgagatcggccagaaccaccagggcgacctggacgtagccaagcgcatgatccgcatggccaaggagtgtggggctgattgtgccaagttccagaagagtgagctagaattcaagtttaatcggaaagccttggagaggccatacacctcgaagcattcctgggggaagacgtacggggagcacaaacgacatctggagttcagccatgaccagtacagggagctgcagaggtacgccgaggaggttgggatcttcttcactgcctctggcatggatgagatggcagttgaattcctgcatgaactgaatgttccatttttcaaagttggatctggagacactaataattttccttatctggaaaagacagccaaaaaaggtcgcccaatggtgatctccagtgggatgcagtcaatggacaccatgaagcaagtttatcagatcgtgaagcccctcaaccccaacttctgcttcttgcagtgtaccagcgcatacccgctccagcctgaggacgtcaacctgcgggtcatctcggaatatcagaagctctttcctgacattcccatagggtattctgggcatgaaacaggcatagcgatatctgtggccgcagtggctctgggggccaaggtgttggaacgtcacataactttggacaagacctggaaggggagtgaccactcggcctcgctggagcctggagaactggccgagctggtgcggtcagtgcgtcttgtggagcgtgccctgggctccccaaccaagcagctgctgccctgtgagatggcctgcaatgagaagctgggcaagtctgtggtggccaaagtgaaaattccggaaggcaccattctaacaatggacatgctcaccgtgaaggtgggtgagcccaaaggctatcctcctgaagacatctttaatctagtgggcaagaaggtcctggtcactgttgaagaggatgacaccatcatggaagaattggtagataatcatggcaaaaaaatcaagtcttaaaaataaagtgccattctctgaattctc

SEQ ID NO: 70440 - DNA, 634 bp, Homo Sapiens
  misc_feature (54)..(146): n is a, c, g, or t
gaaaaagaaaaggaaaaggttctactgctgtattatctataactgccaaggctnnnnnnnnnnnnnnnnnnnnnnnnnnnnnnnnnnnnnnnnnnnnnnnnnnnnnnnnnnnnnnnnnnnnnnnnnnnnnnnnnnnnnnnnnnnnncctgagccaaacttccagttattggataacccagcccgagttatgcctgcccagcttaaggtcctaaccatgccggagacctgtagataccagcctttcaaaccactctctattggaggcatcatcattctgaaggataccagtgaagacattgaggagctggtggaacctgtggcagcacatggcccaaaaatcgaggaggaggaacaagagccagaacccccagaaccatttgagtatattgatgattaagggccagaggatctcacttgcttatctgaagaagattgtccaggctcatattgggaatgcttatgaggaaattcatgccgagacctgctattcaatgcatgtatcgttgcctctgcactgacctgaagaaccctgtctccaagtctttggttgaagagaagatatatgactgttgagtgtgctctttcacagaacttggttttcaaataaatataagatctccagatggacaagac

SEQ ID NO: 70441 - DNA, 1411 bp, Homo Sapiens
  misc_feature (229)..(229): n is a, c, g, or t
  misc_feature (1389)..(1389): n is a, c, g, or t
aaggtagcgaggcctgggtggcgaattccgacgaggctgaggaggcgactgactgagcagcgcacccggggagcaaggaggcgcggtgaactgagcggcccctgagctgacagatacactgcgcagctggaacggcgagcgagccgacgggcgagtgaggggcgcagccatgatcacctcggccgctggaattatttctcttctggatgaagatgaaccacagcttaanggaatttgcactacacaaatttgaatggcagttgttaaatgacttctggggcagaaatttccgagtccgtagacaaaatagaggttttatacgaagatgaaggtttccggagtcggcagtttgcagccttagtggcatctaaagtattttatcacctgggggcttttgaggagtctctgaattatgctcttggagcaggggacctcttcaatgtcaatgataactctgaatatgtggaaactattatagcaaaatgcattgatcactacaccaaacaatgtgtggaaaatgcagatttgcctgaaggagaaaaaaaaccaattgaccagagattggaaggcatcgtaaataaaatgttccagcgatgtctagatgatcacaagtataaacaggctattggcattgctctggagacacgaagactggacgtctttgaaaagaccatactggagtcgaatgatgtcccaggaatgttagcttatagccttaagctctgcatgtctttaatgcagaataaacagtttcggaataaagtactaagagttctagttaaaatctacatgaacttggagaaacctgatttcatcaatgttgtcagtgcttaattttcttagatgatcctcaggctgtgagtgatatcttagagaaactggtaaaggaagacaacctcctgatggcatatcagatttgttttgatttgtatgaaagtgctagccagcagtttttgtcatctgtaatccagaatcttcgaactgttggcacccctattgcttctgtgcctggatccactaatacgggtactgttccgggatcagagaaagacagtgactcgatggaaacagaagaaaagacaagcagtgcatttgtaggaaagacaccagaagccagtccagagcctaaggaccagactttgaaaatgattaaaattttaagtggtgaaatggctattgagttacatctgcagttcttaatacgaaacaataatacagacctcatgattctaaaaaacacaaaggatgcagtacggaattctgtatgtcatactgcaaccgttatagcaaactcttttatgcactgtgggacaaccagtgaccagtttcttagagataatttggaatggttagccagagccactaactgggcaaaatttactgctacangccagtttgggtgtaattcata

SEQ ID NO: 70442 - DNA, 1241 bp, Homo Sapiens
  misc_feature (511)..(511): n is a, c, g, or t
  misc_feature (1152)..(1183): n is a, c, g, or t
cagtcgacggtaccggacatatgcccgggaattcggccattacggccggggagtggccgggagatgatggctgatgaagaggaagaagtcaagccgatcttgcagaaattgcaggaactcgtggatcagctctactcatttcgagactgctatttcgagacacatagtgttgaggatgctgggaggaagcaacaggatgtgcagaaggagatggagaaaaccctacagcagatggaagaagtagtgggttctgtccaggcaaggcacaagttctaatgctaactgggaaagcactaaatgtgactcctgactatagccctaaggctgaggagcttctgtcaaaggctgtgaagctgtcagtcagcctctgggcagaaagtgaccctggagctcaagccactgagtacgcttcagcctggggtgaacagcggtgccgtcatcctgggaaaggtggtatttagcctcaccacagaggagaaagtcccctttacatttggcctggtagattcangatggaccttgctatgcagtgatggtgtacaatatagtgcagagctggggagtgctcattggagactctgtagccattcctgagcccaacctgcggcttcaccgaattcagcacaaaggaaaggactattccttttccagtgttcgagtggagacgcccctcctgctagtggtgaatgggaagcctcagggatccagcagccaggctgttgccacagtggcatcgcgaccacagtgtgaatgacctttgacttgcatgctcaacagggagtggaggagaggagacaaggctctggacagccggtccagccacatccagtgattcagcagggatgggaggaatgttttaaatgaagactttctctttccctgcctgtattacacttcgtatctcttctctctcctctgtcctcatcatgttccagctctctacagggccacatactcttctggcatatctctcctgtctcttccactgctctctatgttttaagcaaagagcatggaattggtagaagtcttgggatcttgccatgggacagagtccccaaggttcctgttgttgcctccttcctaagcctcatatgtatatatcagttcagtatttattgctaaaggagggggcttaattttgtaatggcnnnnnnnnnnnnnnnnnnnnnnnnnnnnnnnngaactttaggtccttcctcttctttggggctggaacagaattaaatttgtttggaaaa

SEQ ID NO: 70443 - DNA, 1533 bp, Homo Sapiens
  misc_feature (1256)..(1285): n is a, c, g, or t
gctagtggacctatgaacagtggtacaaaaagcaaggctggtacggtccggaatcccgggatatcgtcgacccacgcgtccgattcatgccaatcatggtggtgatataattgactatctgcttaatcagcttaagaacgccagcaatgatatcgttagacacggtggcagtctgggccttggtttggcagccatgggaactgcacgtcaagatgtttatgatttgctaaaaacaaacctttatcaggatgatgcagtaacaggggaagcagctggcctggccctaggtttggttatgttgggctctaaaaatgctcaggctattgaggacatggttggttatgcacaagaaactcaacatgagaagattctgcgtggtcttgcagttggcatagctttagtaatgtatgggaggatggaagaggctgatgctctcattgaatctctctgtcgtgacaaggacccaattcttcgaaggtctggaatgtatactgtagccatggcttattgtggctctggtaacaacaaagcaattcgacgcctgctacatgttgctgtaagtgatgttaatgatgatgtcaggagggcagcagtagaatcacttgggttcattctattcagaacccctgaacagtgcccaagtgttgtctctttgttgtcagagagttacaaccctcatgtgcgctacggagctgcaatggccttggggatatgctgtgctggtacaggaaacaaggaagccattaatttgctagaaccaatgacaaacgaccccgtgaactacgtgaggcaaggggcactcatagcttcagctctcatcatgatccagcagactgaaatcacttgtccaaaggtgaatcagttcagacagctgtattccaaagtcatcaatgataagcatgatgatgtcatggccaagtttggcgctattctggcccagggcatactggatgcaggtggtcataatgtcacaatctccttgcagtccaggactgggcatactcatatgccttctgtggttggcgtccttgtatttacccagttttggttctggtttcctctttcacacttcctgtcattggcttatacccctacctgtgtcattggccttaacaaggacttaaagatgccgaaagttcagtataaatcgaactgtaaaccatccacatttgcatatcctgcccctctggaagtaccaaaagaaaaagaaaaggaaaaggtttctactgctgtattatctataactgccaaggctnnnnnnnnnnnnnnnnnnnnnnnnnnnnnnataagatgagtaggagggcaggtccaaaagaagtgattcagcaaaatgaaaggggtcctcagggattaaaggggatgaatttacctgtcatccctaagaatctacaaaggagatgctcaggacagaaactgtatcaacacaactagtagcaagaagttactcggatgatatcagatgtttatttgggaaacttgctagtagagaaagctacatataatattagatgcaaagggacacagaagtccagt

SEQ ID NO: 70444 - DNA, 1368 bp, Homo Sapiens
catgtggaatatagacgagttggttaaaaaaagcaggctggtaccggtcggaatcccgggatatcgtcgacccacgcgtccggggctggtgaggctcacgttggagggcttcgcgtctgcttcggagaccgtaaggatattgatgaccatgagatccctgctcagaacccccttcctgtgtggcctgctctgggccttttgtgccccaggcgccagggctgaggagcctgcagccagcttctcccaacccggcagcatgggcctggataagaacacagtgcacgaccaagagcatatcatggagcatctagaaggtgtcatcaacaaaccagaggcggagatgtcgccacaagaattgcagctccattacttcaaaatgcatgattatgatggcaataatttgcttgatggcttagaactctccacagccatcactcatgtccataaggaggaagggagtgaacaggcaccactaatgagtgaagatgaactgattaacataatagatggtgttttgagagatgatgacaagaacaatgatggatacattgactatgctgaatttgcaaaatcactgcagtagatgttatttggccatctcctggttatatacaaatgtgacccgtgataatgtgattgaacactttagtaatgcaaaataactcatttccaactactgctgcagcattttggtaaaaacctgtagcgattcgttacactggggtgagaagagatcaagagaaatgaaagagaagagaaatgggacatctaatagtccctaagtgctattaaataccttattggacaaaggcttgctttttaaagcatcctttcaagaatattgaataattggagctgagaactcaggagcttcactgtagtagaatactgctagtttcttaattttaattcatgttaccttaaaagtaaaacaacaggctttgccaattggacgtttttcagtaacagtgaaggagtggagtgaatgccaaatatttgccctgggtggttcctatctcttcagttaaacatggtgcagtattctctaaaagttcccctgtgctaaaagactacttgctccggggcaatgggtatttttttagactctttcccacagacacacggcttaggaaggacaattccatctttggggttcggtagccccagaggtttaaaatttggggtctccaggccttagcttttcgggatgatacacggttgcttagagatgaacttcagacattcggattataaacctatgccgaccctgatataattggcgcgcaccgggggaacgcgtaaggttcaacacacgtcacgaccatccggaggctcttccgaagcagtaccggggaaccccgacgaaac

SEQ ID NO: 70445 - DNA, 1080 bp, Homo Sapiens
  misc_feature (804)..(804): n is a, c, g, or t
tggaccggtccggaattcccgggatgggagatgatggctgatgaagaggaagaagtcaagccgatcttgcagaaattgcaggaactcgtggatcagctctactcatttcgagactgctatttcgagacacatagtgttgaggatgctgggaggaagcaacaggatgtgcggaaggagatggagaaaaccctacagcagatggaagaagtagtgggttctgtccagggcaaggcacaagttctaatgctaactgggaaagcactaaatgtgactcctgactatagccctaaggctgaggagcttctgtcaaaggctgtgaagctggagcccgagctggtggaagcctggaaccagctgggtgaggtgtactggaaaaaaggggatgttgcagctgcccacacctgcttctcaggagccctcacccattgcaggaacaaagtctccttgcaaaacctgtcaatggtgcttcgtcagctgcggactgacactgaagatgaacattctcaccatgtcatggacagtgtccgacaggctaagttggctgttcagatggatgtccatgatggccgctcctggtatattcttgggaattcatatctttccctttacttctctactggccagaaccctaagatctcccagcaagccctcagtgcctatgcccaagcagagaaagttgacagaaaagcgtctagcaatcctgaccttcatctgaacagggcgacgttgcataaatatggaagaaagttatgggggaagcccctggaagggccttctctcggggctgcagccctgggaccctgncctggccagagcccccgggcaacgagaagcaacaacttcttggaattcctgggaaagattaacccccctccctttgagaataaagggaaaagggggaaaacccaaaaagtctgcaaaaccatggcttgggaaagctttggccccccaaccccatcttaggcccccttggacggtgggtggggcaccaattcaattacaaccctttgtgggccaaaaaaatggacccccttgggagtctcccagcccccctgtggagtaccccctttctcaacccct

SEQ ID NO: 70446 - DNA, 1387 bp, Homo Sapiens
  misc_feature (307)..(398): n is a, c, g, or t
gaggagttcagacagctgtattccacagtcatcaatgataagcatgatgatgtcatggccaagtttggcgctattctggcccagggcatactggatgcaggtggtcataatgtcacaatctccttgcagtccaggactgggcataatcatatgccttctgtggttggcgtccttgaatttacccagttttggttctggtttcctctttcacacttcctgtcattggcttataccccgacctgtgtcattggccttaacaaggacttaaaggtttctactgctgtattatctataactgccaaggctnnnnnnnnnnnnnnnnnnnnnnnnnnnnnnnnnnnnnnnnnnnnnnnnnnnnnnnnnnnnnnnnnnnnnnnnnnnnnnnnnnnnnnnnnnnnacctgagccaaacttccagttattggataacccagcccgagttatgcctgcccagcttaaggtcctaaccatgccggagacctgtagataccagcctttcaaaccactctctattggaggcatcatcattctgaaggataccagtgaagacattgaggagctggtggaacctgtggcagcacatggcccaaaaatcgaggaggaggaacaagagccagaacccccagaaccatttgagtatattgatgattaaggaccagaggatctcacttgcttatctgaagaagattgtccaggctcatattgggaatgcttatgaggaaattcatgccgagacctgctattcaatgcatgtatcgttgcctctgcactgacctgaagaaccctgtctccaagtctttggttgaagagaagatatatgactgttgagtgtgctctttcacagaacttggttttcaaataaatataagatctccaaaaaaacaaccccacccgaggacacaaaaagggcgggccgctcctagagtatcccctcgaggggccccaagcttacgcggtaccccggcttttcttgtaacaaaggtgggcccctaaaggcgaggccggaattataaagctagggccctgggccgcgcggttttacaaacgtccgcggaccggggaaaaacttgctagcccttggggaacttttggtgaagggaaaccttaacttccggtggggggggtaccataattcgggaccaaacctaaccttacaggggattttaagagcccctaaggggtaaaaatacaaactttttcaagagggaataaaggggggtgaaaactaagctggcaaaaaggactggcctggcttgagagaaatttttcctttacggggaacaggaattttttggaaaaaaatttcttcacccggggaggctagagggtatctacacatagggtctggggcgcattttaagagatatcaagggcccccgagggggtct

SEQ ID NO: 70447 - DNA, 421 bp, Homo Sapiens
atacacgagcaaagaaaacaaaaacaagaaacccagaaatcaggatttcaaaaagaaattcaaaagcactgtttcagttacagctatccatgtaatgtgacgatttattcttaagcagcttggggcaatccagcatcgcagaatgagggagtactgggaagcttagtatggcaagtttactcttacagatcacatggcacttgtatttttacagctgttacataaattctgcggcgagggaaaacagtctggcgccaagaaagaactgaccccattggctgtgggctttaccttgtttcctgtaccagcacagcatatccccaaggccatcgcagctccgtagcgcacatgagggttgtaactctctgacaacaaagagacaacacttgggcactgttcaggggttctgatacggttttga

SEQ ID NO: 70448 - DNA, 848 bp, Homo Sapiens
  misc_feature (40)..(40): n is a, c, g, or t
caagtaacagctgcccacttagtgaatactctctcatgtntcaacactcagttctagtgtagcctcttctataaagcctttcttttccagataaaattggttaatgtgtcctgtgttaggctgattgttttgatgatccctattcatggtctcccctgtatccatctctttttgcctataacattgtagtcccatctcactctgatgctgggaccagacatgtgacttgttttagccaatgagatgtcgataaacatgaagcaaacagaagctttaaaggaggcctgccctcttgctctttgccagtgccatgagaacatggctgatcagctggagggttatgagatgtgtaggtgagagacatgcgaaagagccagagataccagctgaagccatcctagactagcccacagtcagcctacccccagtcaagatcaggagagtcacccaacccacagatgactgccgacacatgagtaagcccagccaaagcagaagaaccctccagctgactctaagacttagaagcaataataaatgtttattatcttaagccactgtgttttgggatggtttattacacggcaatagctaacttctgcatgcccccactgtacttcaaacaaaattttattacagcttgtttactcatctgtgaaatggagacaaaccctaccttgagaactattgtacatctggcatcaggtgctcaataaatggaagcagttgtattctctgttaatttcattataaccaactttgtttactccctataagcttgaggacagggacaagactcagacttctttctcccttctcatcattaccctgcattgagcctggccaaa

SEQ ID NO: 70449 - DNA, 449 bp, Homo Sapiens
attacatacgagcagctaaagaggcttcaaatctaagaactgaattatatgtgagcccagccctgccagcctttctactcctttgcccttttcccgtgttctaatgtattttgacaatgttgtaagtgtttaccaagccgttggtctcctaagggcctcctgatggaagaacagtggggtggttcaaagttatttctatgtttgtgttaccatgttaacttttccccgagagaaagtgttaacattgagactctggccccagattggtatcttctatgaagatggatactgatgggtgacattgaaaacggcctgctttccaaatgtggttaaatgtaattggttagccccagacttgggctagagcagaaggcataggccagggtggttattgctatatgtgttacagacctcggttctcattaaagtatttattggcagaaaaaaaa

SEQ ID NO: 70450 - DNA, 1025 bp, Homo Sapiens
  misc_feature (46)..(46): n is a, c, g, or t
  misc_feature (128)..(128): n is a, c, g, or t
  misc_feature (180)..(180): n is a, c, g, or t
  misc_feature (186)..(186): n is a, c, g, or t
  misc_feature (217)..(217): n is a, c, g, or t
  misc_feature (234)..(236): n is a, c, g, or t
  misc_feature (298)..(298): n is a, c, g, or t
  misc_feature (324)..(324): n is a, c, g, or t
  misc_feature (331)..(331): n is a, c, g, or t
  misc_feature (927)..(983): n is a, c, g, or t
aaccactcacaaaaagcaggtacataacaaaagattcctgttcatntgattcacatcgaaaaagaagcgatatgttatgagaatggttctgtggagaaaatgtgagaaaaacaagatgatgatatgtntcagcagcaattgccctcagagtaagtaggagaatatatgtatttccttttntatacntatctgccattcatgtatgtatgtctgattnggatctgttcactctcnnntaggccggggtaaacgcagggccgggttagacgacagatgaaacaacccgcagcttctcatntgacagtaactcgatgcaattcactntgtgganccaagccacaaagtgaaaagcatcgaattgcagagaacagtgtatcacatccctacccaacattgggccctccctgcacttgtgggaaggtagtccaaggtacaactatttagcttcccgatttgcttcaaggctctatagctctagattttggtggtagcaaatttatcgggtggagggattgatcggagagggcagatcctcaggttcaacacaagaactggattggaaaaggtcattgtaggttgatgtgagcatcttgggtacatagcccattgcccttaatgatggtttcttactgtttctctgggttgtttgtcagatagcctttaattttaattatttttccttccctttgctaccttggcccttttaaattcttgtgtttaacctaatgctcagccttggtactccattcccttctccttcccctctttgctactattaaaagtcggagaagtggaattcaaacgttgaaatttccacggggctatagttgtatcttaataatgccaagtgtcaaaacaaccccattaaaatgccgcctgattaaataatgtgctgctaaatatagtgcacatgaaaacagcaagacnnnnnnnnnnnnnnnnnnnnnnnnnnnnnnnnnnnnnnnnnnnnnnnnnnnnnnnnngtacctttgctgtatcttttaataaacagtttacttttattt

SEQ ID NO: 70451 - DNA, 567 bp, Homo Sapiens
gatggagaaacagaagagtttatagtaacatgaacatgcctgttaaacatttgaataaatgatcagtttctcataacatagaaatagaaatgaaattataaattgtgctgtcttgtttgatcaaaagtttgataaaacatttaatagtatacatattccagggaagatgtttcctgttctatctcccaacacatacagtgttattaccacaatatagtgtcaaaccgtcaatgcaaaaatctttaatctccttgccctgatgatatctgtctctacaatatccagtactcccacgtcaataaaatttatacacccattttctgttcccacctaccacactaaattcttgggatctttctactctgcactctgaaatccacagtaacttattagcataatgcccccaccttttaaaaaagcattcttaatttgccttttattgtttcttaattataggtttaggaagttacaagggcagttgtgttacatacacatatagtgtagtggggaaagtgttggcttttaatggactcattacctaaataatgtaccttgtactaaatagga

SEQ ID NO: 70452 - DNA, 1421 bp, Homo Sapiens
gggcgaacggcgtgagctggcgccgaaatgggagaaagcagcgagtgagaggggaaggggcgccaggcgagcacccgggagccagcgggacctgggcaggggcgcccggagcaggcgcgcatggcgggccccgcgcggggatccggctggaagagagcgtagcacggctcgcacgagtccggggccgatgtaccaggtgagcggccagcgcccctctggctgcgacgcgccctatggagcccccagcgcagccccgggcccaggccagcctcaggggaaccccttgggctgcaccccacttctgccgaatgactctggccacccctcagagctgggcggcaccagacgggcggggaatggtgccctgggtggccccaaggcccaccggaagttgcagacacacccatctctcgccagccagggcagcaagaagagtaagagcagcagcaaatccaccacctcccagatccccctccaggcacaggaagactgctgtgtccactgcatcctgtcctgcctgttctgcgagttcctgacgctgtgcaacatcgtcctggactgcgccacctgtggctcctgcagctcggaggactcgtgcctctgctgctgctgctgtggctctggcgagtgtgccgactgcgacctgccctgcgacctggactgcggcatcctggatgcctgctgcgagtccgcggactgcctggagatctgcatggagtgctgtgggctctgcttctcctcctgagcctctgtcgggggctaagccagcctggcgcccctgcagattccagcagggtccctctgagtggggccaggcccaggactgtcacacaaggcttgagaagccccctctccctggtcctctcctacccacccatgtcctctcagaaccccagccttgaaaatagtggggggcactcagaggggccacctcctcagccgtgggtggtgggcccatggcagagaagcctgaactctttactgggttaccaggttcatacattgctgaggacctgacaggacaacctaggggcagggctggggtggggaccgcagggggcagccagggctggggaacactgtgaaagttacttggggagggtgggccggtggggccgtagctctctacctctccctgctcctggtgcctgcctctctcctccaccccaggcttagaggacagaaaaatgtgaagagacgccccacccaccctcagccagccctctccagtctcctttcctaggcttttttgggggcctaacccacgcagtgaccccagagggcagggctaggcgagagcctggggtggggcgggagggggaacagtatggaaaagactggaaggggaaaggaagggaagggagggagggtctgttctatctgttgctgtaaataaagatatttgtccatctcaaaaaaaa

SEQ ID NO: 70453 - DNA, 862 bp, Homo Sapiens
tagaataacagtgtccccataccaaaggaagcctgctagctcatttcatgtataaatttcccatcttcaaacagtttaggtgtatttgttgctctggtcacattctgcataaaagaaatcctcttaagcctatggttaagaaaagccttgaagtttatattcagttaaaatatatgtcggtggagatagccagtgcttctaattttgacttagtttcatacagtaaagcctaaatgtgaaacgcacacgctggaagatattgttcctatcaatattttgctttttataacaagggtttgttcatattgatgccatttttgcaggatttcttcgtgatttctgtccatatgaaaatgctgacattaaacattaacacatggagaccgtgccctgtggccctgccgtggctgccagcatggtctgtgtttccttgtggattcacctgtggccctgctgtggccaccagcatggtctgtgtcctcgtggattcactgcagctgtcggatgcgagtttctgtcataatcatttgtttcctgatacaattgttcttattcttttccaaaactgtaaaataatctcctccctcaaatgcaaaggttgtttttgttctgtttctgttttctttgaaataaaattataacgctaacggggcccccctcctatatttacccgcctcccactgttcggctcgccctcgggccctcgaaaaagcttctcccagaccattccggtttgcggcgcgcgccgccccattcaggccaatttggaaccatggggcccatcagcctggtttcccctaggaacaaaccctcgggtccatggaacctagggcggctttgggactctcctcccacccaaatc

SEQ ID NO: 70454 - DNA, 1370 bp, Homo Sapiens
  misc_feature (332)..(357): n is a, c, g, or t
tgacagtaaatcttaaaaatcattgtctctttatgaacatttcctcagtttcttctctgctgaaaatgtaagccatgctactttttaatgtattttgaattttgtgctcattggaaattgatatgctaatgcctcccccaccccccgccagacttttctttttatactttgtcttgtttttactggggtaggctgggcatgcgtgcgtgcctttagggcagcattttaaacctttgccaaaattgcaaatgggacatgtacattcttctgctccatcctacttaaacacctatcagctatttttatctttaaccttttctgtatgtttgaannnnnnnnnnnnnnnnnnnnnnnnnnaaagagcgagagaatgatgtcatctaaagttttttgaagaattatttggttttcattgcattaaaattctatcactcccagctttgttttcatttaaaaaaatatacaaagagctttgtaaatacaacacattttatttctcccccttcttttaatgtacagcttttttgccacttatatatacttaaaatattcccatgaattatgtccagttcttcttggaaaaaaatttggttttgaatgaacctgcaaagcatcctgcagcgtgagcagctcctccacctggagctccgaagcatcttctcaggccaaagcggcattacccgtgaatctgtcttctccgccacagcatggtttgaggcgcagtctgttaatatagctgggccatgtcagtgactgttgtgtttgtggggtcaggtggggggcatggtatttgcaaaaaaaacaaattatggctaatttattattttgttgcagtggggttaactgtaaactcatgtaagagtctgtgatttcctcattggttgatctctctctctgtaatcctcattgcaaattttcaccaggacagcgttttttgattagaggggagctctggcacagtatgctttaatttagcaggaacttccagatgatttaaattctcgatgctgtgatgacacacatatgatctttcgtgtttctgagcgactctactttcattgtttgccagcgtggctcgttgctgttgcccaataaagcttgtgtacgttctgccttgggggattattttaatttgtacagaaacatgaattctggtatcaaaatgaggactttttattataacgctcctattttttctttatttcatggtacatgaaatgtaaagaaaactctttccagttcagaaaattattttgattttggcaaaaaaaaccccaaatcaatgcatgttatttattattttgtactattgtccatcccagacgtgtcagaatttcaaaaggtgatagatataaatggaaaataagatg

SEQ ID NO: 70455 - DNA, 1015 bp, Homo Sapiens
  misc_feature (57)..(57): n is a, c, g, or t
  misc_feature (82)..(82): n is a, c, g, or t
  misc_feature (99)..(99): n is a, c, g, or t
  misc_feature (108)..(203): n is a, c, g, or t
  misc_feature (219)..(219): n is a, c, g, or t
  misc_feature (227)..(227): n is a, c, g, or t
  misc_feature (279)..(279): n is a, c, g, or t
  misc_feature (284)..(284): n is a, c, g, or t
  misc_feature (290)..(290): n is a, c, g, or t
  misc_feature (327)..(327): n is a, c, g, or t
cattatgcagctggacgacagtttcccgactgaaagcggccatgagcgcacgcattnaatgtgagtagctcactcattagcnaccccagctttacactnttgctccgnnnnnnnnnnnnnnnnnnnnnnnnnnnnnnnnnnnnnnnnnnnnnnnnnnnnnnnnnnnnnnnnnnnnnnnnnnnnnnnnnnnnnnnnnnnnnnnntgcccctcgagcccangaattcgncacgaggatgattttgagttattcatgaagaataagaagaggcttcatagtnacatnttcctnttctatgccacaggcatgatgatattgggtgtgtagngaagaaaatatcctagcttatactaggctcccagtaagaagtatttaaatagccaaaataatgtggatatcatttattagtattcaatgttcagatcagcctattaacaaagtgtgaaaggtttcattttttattcagaactgaagttgaaagtaattaatgctgacaaagggaaagaaagcagaaagagattgagaattagaggaagagaagtggaatcaaaggtagagatacttatatattcaaagtggggatgaaaagatcttcagttaatggaacaagaactagaggattagtgtattgttcaaagctataaaatcaaaccaatagatgtattaaaaagtgatgtaactatcagacatttggagagagatggacaaaggaaagtggcgatagtgtaagttaaatccttatcttttgtaatggggaattattaaagatgttgtaaagtcagtaagtcaagaaattattgctcaaacatattatttaaagttagaaagttaccagacgatctaaaataaatattgttaaaagcattacctctagggaatgggatttagatttaaaaagggtgggatgggaaactgtgtttttcattttaagtccttctgtactatttaattttttaccttgtgcatgtattactttgaaaaaatttttaataaacccaaataaaaatcttccagtg

SEQ ID NO: 70456 - DNA, 1626 bp, Homo Sapiens
  misc_feature (101)..(101): n is a, c, g, or t
  misc_feature (256)..(256): n is a, c, g, or t
  misc_feature (1064)..(1170): n is a, c, g, or t
  misc_feature (1180)..(1195): n is a, c, g, or t
  misc_feature (1244)..(1258): n is a, c, g, or t
  misc_feature (1299)..(1311): n is a, c, g, or t
  misc_feature (1369)..(1378): n is a, c, g, or t
  misc_feature (1484)..(1493): n is a, c, g, or t
  misc_feature (1551)..(1559): n is a, c, g, or t
ttcaacccttgcacgtggtgttcttgagcagtaaattcagccgcccccagcccagtcccacaggatggcctcatgatggaatccagccccccgccatgtcntatggcgggttggagttctcgccttgcccttcaaacgtcggtacgaggagatgggatcattgccagactcgcagatcattggtgcccattgagatcaagcttgcatctcccttgcaactgtctcgccgtgctgcacaccaaagatacaaagcacntgcttcagccccctcctcggcccgcccagcccacgagcgggaagaagagaaaagcgggtgagcgatgacgtaccagactgcaaagtcctgaagcctttgttgagcggttccatccctgtggagcagttcgtgcagaccctggagaagcatggcttcagtgatattaaggtggaggacacagccaagggccatatcgtcctgctccaggaggctgagacgctcatccagattgaagaagactcgacccatatcatctgcgacaatgacgagatgctcagagtgcgactgcgggaccttgtcctcaaattcttacagaagttctgagtgggccatctgagctacttccctgaaatcctgcagtccctcactggctgccctcacaagccacctgaggagtggcatgagaggccattaactgtgtctttgtggtgtcctctggcttaaggagtgaagaggtggctcttgagggaaatggtctggacttattcccagcactgtttcaggcaagaactttccctttcaacttcaggctcattttcttctcaactctggctctctcaaggagctggagggtggcagaagtgggacaggagaagttttccaagaggttcatgggaggcggaggtgactggctggctgtcttgcatcagtcccaggcctcggccaggggagccagcctttggtttcgtttacttgcctacagtgctgtacgcaataagatgatgatcccaaaatatggtaaagtgaacccatctgtctgcattttctactctgagcccatttgttaataaacacttatttttatatnnnnnnnnnnnnnnnnnnnnnnnnnnnnnnnnnnnnnnnnnnnnnnnnnnnnnnnnnnnnnnnnnnnnnnnnnnnnnnnnnnnnnnnnnnnnnnnnnnnnnnnnnnnttgatgaccnnnnnnnnnnnnnnnnttgatgtgaacaaacaacagcaagctaaacaaaaagtggtgtgttccgnnnnnnnnnnnnnnngaaactcttttaaaaccttttcgggggcgggggcccccccnnnnnnnnnnnnnggggatacatctgttttcccaaaaaacaccgggaataaaggaggttggtgaacccccnnnnnnnnnncccccggggaaaaccccgggattttaaaacaacccaagggggacctggggggtactattgggttgcctccacgggggatccccagggggctcttatatattttctnnnnnnnnnnggggcccttcgggggaggaggggggaataaatataaacatcctcccgcacaagaggannnnnnnnnacaaggcgttagataaaacctttaaacccccgcggggggttctccaccccccggggcccccgctggg

SEQ ID NO: 70457 - DNA, 1839 bp, Homo Sapiens
  misc_feature (1803)..(1803): n is a, c, g, or t
cacaaggggacggcctgcacagttcacagaagcctgcggagcccgtcaagaggcagccgaggtcccagtgcctgtccacgctggtccggcccgtcttcggagagctcaaagagaagcacaagcagagcggcgggagcgtgggtgcgctggaggagctggagaacgccttcagcctggccgaggagtcctgccccggcatctcagacaagctgatggtgcacctggtggagcgagtgcagaggttttcacacaacagaaaccacctgacatccacccgctgaagcgcactgctgttcagataggggacggaaggtcgtttgtttttgttctgagctccataagaactgtgctgacttggaaggtgccctgtgctatgtcgtgcctgcagggacacgtcggatcccgtgggcctcacatgccaggtcaccaggtcaccgtctccttccacccctgcagtgtgctgttgtgcacgtcagggacgctgttctctatgcccactgccctcctccctctcctggcccagcagtattgctcacgggggctccagccgccggcgtggccctcatgagctacgcctgggtcttctgcagactcatgcagccctatggccgctcagaccaaggcgcagagcaactatcagggcagctctgcctcctcctcccatgaggtggggagaggcaacagggcagcccccagaggagtgtcctggccgctgtcctcccggggcccatgatggccatagatttgccttgtggtgttggatcaggtactgtgtctgctcataagtacttgtgtcatccagaatgttttgttttttaagaaaattgaattacttgtttcctgaaatattctgaggttaatatgttagttttcatagaacattgagaggcccctgccactttcaataaagacctgacttggagacatgcaggtgtgtgtggtggggcccgggccatgcggggctgcagcgtccctggtcccgagtcctcatcacagcacgcagagacggcagcccagccccccttcgaaacttccctgtgacggattcctgggctctgcttggcccaccggaagaacagagcaggcagaggagaatgcaggtggggagatgctgtttgtttatttttaatcaaatgtgtgtgaacaaagcagtcgcccatctacttcccgttggaaggaatgctgggcagtaataaattagacggccccaccctcccagggcacagggggactttggtttctgcttctctagaggtacatggggaacaagcgtggcttctgccagacttgtttagctgtgacctgcagggcaggcccctggggctgccacttggttcaccagatggaaggtcagcatggctgtgccacgcttgtctgagagggtcctggcagtgggtacgcagggtgtatggcagggcctcttttccagtgcttgctctaggccagtcctcggcagggaccctgctctggggagagaggcagggtgtgcccaggctttggtccgatgccgagagcactgctcaggccttgtctgcgtctttgagccaggggcctgggagctgtggcttgagcggctccgcgctcaagactcgcacatttttcccagggccccagatagctgctggcatgcactaggtcctgggtggggggatgaagcccctcccagatgttacatgaggcccacccacactgctggtgccagtggggatccagtgagaccacagccacttcccatctgttgagaagctcaggacagaggtcacctctgtgtcctgctgttctttgtagttgtgtccaaactgngcaggttgagcgtcatcctcctccccctgacatccc

SEQ ID NO: 70458 - DNA, 958 bp, Homo Sapiens
  misc_feature (918)..(918): n is a, c, g, or t
actccgccccctatacggtcctaagtagcgaggcctgggtggcgaattcggcacgagggtcagtgcgacagcccctacatcacccgctactttggctcctacctaaagccctgtaggactggatcagcagcctggtttttgatggggtcttggtgaagtggagtcagccactgctgtgtgtactcaacctgtcctctgagcatctgtagcagtagtgtggcaggaggggaagatgggcaaggccgagagagccctttcctgttcagggttcttggcagggatgggaccggtggggcctgggccctggctgactccggcctgtgactcccaccctggagcatgcccttcctcttgctgccaaatgctgatgggtttgtctccggtcccagagcaccaagctatggatcatcatggagtacctgggcggcggctcagcactggacttgcttaaaccaggtcccctggaggagacatacattgccacgatcctgcgggagattctgaagggcctggattatctgcactccgaacgcaagatccaccgagacatcaaagctgccaacgtgctactctcggagcagggtgacgtgaagctggcggactttggggtagcagggcagctcacagacacgcagattaagaggaacacattcgtgggcacccccttctggatggcacctgaggtcatcaagcagtcggcctacgacttcaaggctgacatctggtcccctgggggatcacaggccatcgagcttggcccaaggggggaagcctccaaaactctgaacctccaccccatgcgccgtcctgttcctgattcccaagaacagcccaccccacactgggagggccagcacagcaagccctttcaaggagttcgtggaggcctgcctcaacaaaagacccccgattccgggnccacggcccaaggagctcctgaaagcacaagttcatcaca

SEQ ID NO: 70459 - DNA, 1603 bp, Homo Sapiens
  misc_feature (1320)..(1320): n is a, c, g, or t
ggtagcgaggcctgggtggcgaattcggcacgaggctggattatctgcactccgaacgcaagatccaccgagacatcaaagctgccaacgtgctactctcggagcagggtgacgtgaagctggcggactttggggtagcagggcagctcacagacacgcagattaagaggaacacattcgtgggcacccccttctggatggcacctgaggtcatcaagcagtcggcctacgacttcaaggctgacatctggtccctggggatcacagccatcgagctggccaagggggagcctccaaactctgacctccaccccatgcgcgtcctgttcctgattcccaagaacagcccacccacactggagggccagcacagcaagcccttcaaggagttcgtggaggcctgcctcaacaaagacccccgattccggcccacggccaaggagctcctgaagcacaagttcatcacacgctacaccaagaagacctccttcctcacggagctcatcgaccgctataagcgctggaagtcagaggggcatggcgaggagtccagctctgaggactctgacattgatggcgaggcggaggacggggagcagggccccatctggacgttcccccctaccatccggccgagtccacacagcaagcttcacaaggggacggccctgcacagttcacagaagcctgcggagcccgtcaagaggcagccgaggtcccagtgcctgtccacgctggtccggcccgtcttcggagagctcaaagagaagcacaagcagagcggcgggagcgtgggtgcgctggaggagctggagaacgccttcagcctggccgaggagtcctgccccggcatctcagacaagctgatggtgcacctggtggagcgagtgcagaggttttcacacaacagaaaccacctgacatccacccgctgaagcgcactgctgttcagataggggacggaaggtcgtttgtttttgttctgagctccataagaactgtgctgacttggaaggtgccctgtgctatgtcgtgcctgcagggacacgtcggatcccgtgggcctcacatgccaggtcaccaggtcaccgtctccttccacccctgcagtgtgctgttgtgcacgtcagggacgctgttctctatgcccactgccctcctccctctcctggcccagcagtattgctcacgggggctccagccgccggcgtggccctcatgagctacgcctgggtcttctgcagactcatgcagccctatggccgctcagaccaaggcgcagagcaactatcagggcagctctgcctcctcctcccatgnaggtgggggagaagcaacagggcagcccccagagggagtgtcctggccgcttgtcctcccggggcccatgatggccatagatttgcccttgtgggggtgggatcaaggactggggtctgctccataagtactgggggcatcccaaaagggtttggttttttaagaaaaatgaaattacttggtttcccggaaatattccgaagggttattatggtaagtttttcctaaaaccattgagggggccccgggccacttttccataaagaaccctgaccttgggggg

SEQ ID NO: 70460 - DNA, 1313 bp, Homo Sapiens
  misc_feature (51)..(51): n is a, c, g, or t
  misc_feature (121)..(121): n is a, c, g, or t
  misc_feature (154)..(154): n is a, c, g, or t
  misc_feature (157)..(157): n is a, c, g, or t
cttcttgacgggcctcccgcagggcttctgtgaactggtgcaggggccgtnccccttgtgaagcttgctgtgtggactcggccgatgggtaggggggaacgtccagatggggccctgctcnccgtcttccgcctcgccatcaatgtcagagtcntcnagagctggactcctcgccatgcccctctgacttccagcgcttatagcggtcgatgagctccgtgaggaaggaggtcttcttggtgtagcgtgtgatgaacttgtgcttcaggagctccttggccgtgggccggaatcgggggtctttgttgaggcaggcctccacgaactccttgaagggcttgctgtgctggccctccagtgtgggtgggctgttcttgggaatcaggaacaggacgcgcatggggtggaggtcagagtttggaggctcccccttggccagctcgatggctgtgatccccagggaccagatgtcagccttgaagtcgtaggccgactgcttgatgacctcaggtgccatccagaagggggtgcccacgaatgtgttcctcttaatctgcgtgtctgtgagctgccctgctaccccaaagtccgccagcttcacgtcaccctgctccgagagtagcacgttggcagctttgatgtctcggtggatcttgcgttcggagtgcagataatccaggcccttcagaatctcccgcaggatcgtggcaatgtatgtctcctccaggggacctggtttaagcaagtccagtgctgagccgccgcccaggtactccatgatgatccatagcttggtgctctttaggtaggagccaaagtagcgggtgatgtaggggctgtcgcactgactgaggacagtgatctcctgctggatgtcctcgatctcatcctcggcctcctccaggtcgatgatcttgatggccaccacctcctttgtgtggttatcgatgcccttgtagacctccccaaacgagcccttgccaatgcggtcgagcttggtgaagagctcctcagggtccactcgagagtgctggttggcaaatccccggaggtgagccatggccgcgccgcctcagaccctccgccagcagccccaggaggcgtctggatcccgcggagaggcgcggagccggctagctcgcccctgcggcgtcagtccactccgcggggctccatcccggcctcccccggcccgctctgcagcgcccgcgaaggctcccacccgcagcctctgttcgcccggggaccccgggcctcccagcccgcgaagcaacggtggtggcggcagcgaccggagaaagcccgaggcgacg

SEQ ID NO: 70461 - DNA, 734 bp, Homo Sapiens
  misc_feature (114)..(122): n is a, c, g, or t
gaagctgccttggaagaggtgggggcggcgacgggaggggcggcgagcccccgggagcctgggcgttacgcccgggcgtggcggggccccggcggcctggggggtctcctgggnnnnnnnnnacccatggagcccgccgccccggaggtcggtctcagatgactgaactgggcaccgagcgcccctggtgtccctcgcagtggactgacgccgcaggggcgagctagccggctccgcgcctctccgcgggatccagacgcctcctggggctgctggcggagggtctgaggcggcgcggccatggctcacctccggggatttgccaaccagcactctcgagtggaccctgaggagctcttcaccaagctcgaccgcattggcaagggctcgtccggggaggtctacaagggcatcgataaccacacaaaggaggtggtggccatcaagatcatcgacctggaggaggccgaggatgagatcgaggacatccagcaggagatcactgtcctcagtcagtgcgacagcccctacatcacccgctactttggctcctacctaaagagcaccaagctatggatcatcatggagtacctgggcggcggctcagcactggacttgcttaaaccaggtcccctggaggagacatacattgccacgatcctgcgggagattctgaagggcctggattatctgcactccgaaccgcagatccaccgagacatcaaagctgccaa

SEQ ID NO: 70462 - DNA, 1565 bp, Homo Sapiens
ccctattgggggtgtgctctgtgtcgtggcggggggttggattgctcgtctcgccagttagccgttgtttgccttttgtggtccgttctgtggttctgtcgtccccccgtttttctctctttgctggcgcttttttctcgttctggtctcctgtgtgtggctgtgtgttggtcccccttgcgtggatcgtgtgcattggtgactatgttttgttgctgggttcatcttttgctcttttgtttccatccattgtccgttgtatggttaatgtgctgtgtcgtcccagtccatgtctgctatggtgcggaatccttctgtgtttgttcacgaggttcatttctccatggggtgcctacaggtgctgccctgagtctgccgcagacctgattggcctccatcgtgccagggaaggcagatgggcctggcatgggtggacatctttactttctgggccagcttcagcagagctatgtcatcaccatagaactccaggattccctggttctttttggcaaagacatcaaaccctggggagatcaccgccttctcaataaggaattctttgccccactgggatttggggtctcccacattgaccctccacagggagtgctcgttgccatcgcggaagcaatgagctgctgtcaggacccattggtcggagatgagggccccccggcaggtctcttggctcttgggcttaatagtgacatgccagggtgtcctctcctggtcagaggcgtttgctgacatgttccccaccccgcagatggtgtctgtgagcttggagacatccagcatatgttcaaaggacctggtgcagaggcctttgtgtccttgcagaatgaaggcatgcctctcaccatccttcttggaccctagctcattcagttctctccagtccacatccagcttgcccaccccgatggcatagatgtccagatagtcattcctcttctggttgatgttcaggatctctctgatatggtcaacagctgtcttgggagagccacccatattggactttccatctgtcagaaggatgatggcatgtcggatttcctgccaggccatcgtttccatgccgaggagtcgcatttggttgttcatcatgagatagacactgtttaaggccgcataggtgttagtcccagttccattttcatgatctttatagttggcattttccaggctgctgatcacctcagtcatatcccgggagttgtcgttcaggacagacatgaggactttgggctctgaggcaaaggtgataatggcaacgctcacattgatctcaaagctgaagatcctgtccaccatgagggaggcgctctccttgaagatgagaaagtcattttccgacacactctgcgaacagtccaggagcaggtagaggttcagatgaccagagcgctggatttggattttacggcccaggctttcctttgtcttctgggtgggattggtggccccaagcatgtgggagaaggaagtgcccagggcagggcccacgtcctcagggaagtcataagagtagggttggcggcagatgggctccgttccac

SEQ ID NO: 70463 - DNA, 1145 bp, Homo Sapiens
  misc_feature (432)..(432): n is a, c, g, or t
  misc_feature (916)..(982): n is a, c, g, or t
cagagcttgaaatgtgttcttgaaagtcaagttggggtggcggtggtggggtgatggaagggcatcctgacatcttgaaaagtcctccatgtgcaaatagacaggtggatgaactcaccgaagttctcagcccttggagaatggggaattgcgcttggtaatgtggtcgccaccccttggtaatgaggtcactattgctgacagagagcacacctggcagagcagcttctccagtcgggaccagcctagcgggatccttcctccatggccaggcagagggctccacccgcgaagccgcctgtggggttggtggaagggcggagaagctcccgctccaggtaccaaactccaaggtcaggacgcggtggttccacataagcggctcgcggtcaccacttctttcaggtcactctcgggtttcccggccaccantaaagggccacgtcaggttgaccgggtgaatgtacccgttctcgtatttgtcgttagccaggatctgcctcaagtgggcgatgtagctggacgccagcctgagcgtgtccagcttggagagcttggtgtcggggggcacccagggcagggtggtcttgagtctggagaaggccttgctcagcactcgcatgcgggcccgctctcgcgcgttggcggcgttgcgctggacctgcttcccctcctggctgaccccgctcagggggctcttcttggtgggcgccttcctcctcttgcccaggccgccgcggcccttctggggagacccattctcgcagttggagctctcctcggtgctctcgttggaagtcacaaattccttgttcgaatccattttcaacccgtcacattccaacatctccacctcttgaaggtcctccacatcgctgagggagccggtggacatgtttgggggagtggacgaggnnnnnnnnnnnnnnnnnnnnnnnnnnnnnnnnnnnnnnnnnnnnnnnnnnnnnnnnnnnnnnnnnnncctgaaaccaagaggcctcccgagtgtggcgcagccacctcctgctgggagctggagttggggtctggttgggtctcacaaccctttccccttcgcagagttgtgagaaggaaccccgaggacttctgcagcagaggaaccggctctctgtttccccactccc

SEQ ID NO: 70464 - DNA, 1332 bp, Homo Sapiens
  misc_feature (171)..(237): n is a, c, g, or t
  misc_feature (1249)..(1266): n is a, c, g, or t
cgactctgggagtggggaaacagagagccggttcctctgctgcagaagtcctcggggttccttctcacaactctgcgaaggggaaagggttgtgagacccaaccagaccccaactccagctcccagcaggaggtggctgcgccacactcgggaggcctcttggtttcaggnnnnnnnnnnnnnnnnnnnnnnnnnnnnnnnnnnnnnnnnnnnnnnnnnnnnnnnnnnnnnnnnnnncctcgtccactcccccaaacatgtccaccggctccctcagcgatgtggaggaccttcaagaggtggagatgttggaatgtgacgggttgaaaatggattcgaacaaggaatttgtgacttccaacgagagcaccgaggagagctccaactgcgagaatgggtctccccagaagggccgcggcggcctgggcaagaggaggaaggcgcccaccaagaagagccccctgagcggggtcagccaggaggggaagcaggtccagcgcaacgccgccaacgcgcgagagcgggcccgcatgcgagtgctgagcaaggccttctccagactcaagaccaccctgccctgggtgccccccgacaccaagctctccaagctggacacgctcaggctggcgtccagctacatcgcccacttgaggcagatcctggctaacgacaaatacgagaacgggtacattcacccggtcaacctgacgtggccctttatggtggccgggaaacccgagagtgacctgaaagaagtggtgaccgcgagccgcttatgtggaaccaccgcgtcctgaccttggaggtgcgagtctgggaaaggcgcgctcccggggggagcgggccccgggaaggcgacccctgccctcagtgctctctgtctctgcttccccctcgcaatgctcctctctctgtcccaccccgcgagaacactttacaacgacgaggagattcgtttccaaaccagaggagatcaattgtacttacaaagattcccatctatttaactttattaacttctaccgtgaatgactctgcaagccttgctggtccaagtgcaatatgtaattataaatatataaatagataagagcctatcaatgtatcttttgtacaatatgttgtaaaatgtagatcataggatagctgactttgacagtcacatttataaagtaattcacttaaagatatatatttttttcaaacaagttttgctacttttgaaaataaatctttctttatattgctnnnnnnnnnnnnnnnnnngaccgcgtatgcggccgcaagcttattcccgtttagtgagggttaattttagcttggcactggccg

SEQ ID NO: 70465 - DNA, 786 bp, Homo Sapiens
  misc_feature (164)..(230): n is a, c, g, or t
  misc_feature (666)..(666): n is a, c, g, or t
gggagtggggaaacagagagccggttcctctgctgcagaagtcctcggggttccttctcacaactctgcgaaggggaaagggttgtgagacccaaccagaccccaactccagctcccagcaggaggtggctgcgccacactcgggaggcctcttggtttcaggnnnnnnnnnnnnnnnnnnnnnnnnnnnnnnnnnnnnnnnnnnnnnnnnnnnnnnnnnnnnnnnnnnncctcgtccactcccccaaacatgtccaccggctccctcagcgatgtggaggaccttcaagaggtggagatgttggaatgtgacgggttgaaaatggattcgaacaaggaatttgtgacttccaacgagagcaccgaggagagctccaactgcgagaatgggtctccccagaagggccgcggcggcctgggcaagaggaggaaggcgcccaccaagaagagccccctgagcggggtcagccaggaggggaagcaggtccagcgcaacgccgccaacgcgcgagagcgggcccgcatgcgagtgctgagcaaggccttctccagactcaagaccaccctgccctgggtgccccccgacaccaagctctccaagctggacacgctcaggctggcgtccagctacatcgcccacttgaggcagatcctggctaacgacanatacgagaacgggtacattcacccggtcaacctgacgtggccctttatggtggccgggaaaccgagagtgacctgaaagagtggtgacgcgagcgcttatgtggaacacgcgtctgacct

SEQ ID NO: 70466 - DNA, 738 bp, Homo Sapiens
  misc_feature (177)..(243): n is a, c, g, or t
acggcacgactctgggagtggggaaacagagagccggttcctctgctgcagaagtcctcggggttccttctcacaactctgcgaaggggaaagggttgtgagacccaaccagaccccaactccagctcccagcaggaggtggctgcgcaacactcgggaggcctcttggtttcaggnnnnnnnnnnnnnnnnnnnnnnnnnnnnnnnnnnnnnnnnnnnnnnnnnnnnnnnnnnnnnnnnnnncctcgtccactcccccaaacatgtccaccggctccctcagcgatgtggaggaccttcaagaggtggagatgttggaatgtgacgggttgaaaatggattcgaacaaggaatttgtgacttccaacgagagcaccgaggagagctccaactgcgagaatgggtctccccagaagggccgcggcggcctgggcaagaggaggaaggcgcccaccaagaagagccccctgagcggggtcagccaggaggggaagcaggtccagcgcaacgccgccaacgcgcgagagcgggcccgcatgcgagtgctgagcaaggccttctccagactcaagaccaccctgccctgggtgccccccgacaccaagctctccaagctggacacgctcaggctggcgtccagctacatcgcccacttgaggcagatcctggcgtacgacacatacgagaacgggtacattcacccggtcacctgacgtggcctttatggtggccgggaac

SEQ ID NO: 70467 - DNA, 1254 bp, Homo Sapiens
ggtccggaattcccgggatcaaaggtttcacccttcagttcagtccccaatccctgcttattatttccctaacagaagaccatcccccttgccactccctggtttttcttctctggcagcaatgaagcagctgctgacccagctctagttttcgggaagtcagatgaccttttccctcccgcggctctctacctctcgccgcccctagggaggacaccatgggcccactgatggttcttttttgcctgctgttcctgtacccaggtctggcagactcggctccctcctgccctcagaacgtgaatatctcgggtggcaccttcaccctcagccatggctgggctcctgggagccttctcacctactcctgcccccagggcctgtacccatccccagcatcacggctgtgcaagagcagcggacagtggcagaccccaggagccacccggtctctgtctaaggcggtctgcaaacctgtgcgctgtccagcccctgtctcctttgagaatggcatttataccccacggctggggtcctatcccgtgggtggcaatgtgagcttcgagtgtgaggatggcttcatattgcggggctcgcctgtgcgtcagtgtcgccccaacggcatgtgggatggagaaacagctgtgtgtgataatggggctggccactgccccaacccaggcatttcactgggcgcagtgcggacaggcttccgctttggtcatggggacaaggtccgctatcgctgctcctcgaatcttgtgctcacggggtcttccgagcgggagtgccagggcaacgggggtctggagtggaacggagcccatcagccgccaaccctactcttatgactttccctgaagacgtggcccctgccctggggcacttcccttctcccacatgcttggggccaccaatcccacccagaagacaaaggatcttcagctttgagatcaatgtgagcgttgccattatcacctttgcctcagagcccaaagtcctcatgtctgtcctgaacgacaactcccgggatatgactgaggtgatcagcagcctggaaaatgccaactataaagaacatgaaaatggaaactggaactaacccctaatgcagccttaaacaagggcctatctcatgatgaacaaccaaaatgccgactccctccggaatgggaaaacgaatgggcctggcaaggaaaattccgaaaatggccattcaatcctttctgaaaagaagggaaaagtttcaattat

SEQ ID NO: 70468 - DNA, 1129 bp, Homo Sapiens
  misc_feature (177)..(243): n is a, c, g, or t
cggccacgactctgggagtggggaaacagagagccggttcctctgctgcagaagtcctcggggttccttctcacaactctgcgaaggggaaagggttgtgagacccaaccagaccccaactccagctcccagcaggaggtggctgcgccacactcgggaggcctcttggtttcaggnnnnnnnnnnnnnnnnnnnnnnnnnnnnnnnnnnnnnnnnnnnnnnnnnnnnnnnnnnnnnnnnnnncctcgtccactcccccaaacatgtccaccggctccctcagcgatgtggaggaccttcaagaggtggagatgttggaatgtgacgggttgaaaatggattcgaacaaggaattgtgacttccaacgagagcaccgaggagagctccaactgcgagaatgggtctccccagaagggccgcggcggcctgggcaagaggaggaaggcgcccaccaagaagagccccctgagcggggtcagccaggaggggaagcaggtccagcgcaacgccgccaacgcgcgagagcgggcccgcatgcgagtgctgagcaaggccttctccagactcaagaccaccctgccctgggtgccccccgacaccaagctctccaagcgtggacacgctcaggcgtggcgtccagctacatcgcccacttgaggcagatcctggctaacgacaaatacgagaacgggtacattcacccggtcaacctgacgtggccctttatggtggccgggaaacccgagagtgacctgaaagaagtggtgaccgcgagccgcttatgtggaaccaccgcgtctgaccttggagtttggtacctggagcgagagcttctccgcccttccaccaaccccacaggccgcttcgcgggtggagcccctctggcctggccatggaggaaggatcccgctaggctggtcccgactggagaagctgctctgccaggtgtgctctctgtcagcaatagtgacctcattaccaagggggtggcgacacattaccaagcgcattccccattctccaaggggctgagaacttcggtgaacttcatccacctggtctatatgcacctgggaggactttcaagatgtctaggatgcccttcattaaccccaacaacggcaccaa

SEQ ID NO: 70469 - DNA, 894 bp, Homo Sapiens
ctggaaggtgggggaggcacagtgccaagggagacactggtcgggacagcaatgataatggtgacagcctgccaaatgtcaaggctaacgaggcaccaggcagtgactgggagccgcgaccggacagtgaaggagtgggacctcgtctgtgcctattgctccaggaccatcaatgtcctttcctactgtaatgacgtggtgtgtggggaccatatcatcattagtggccacaatgaccagaagatccggttctgggacagcagggggccccactgcacccaggtcatccctgtgcagggccgggtcacctccctgagcctcagccacgaccaactgcacctgctcagctgttcccgagacaacacactcaaggtcatcgacctgcgtgtcagcaacatccgccaggtgttcagggccgatggcttcaagtgtggttctgactggaccaaagctgtgttcagcccggacagaagctatgcactggcaggctcctgtgatggggccctttacatctgggatgtggacaccgggaaactggagagcagactacagggaccccattgcgctgccgtcaacgccgtggcctggtgctactccgggagccacatggtgagcgtggaccagggcaggaaggttgtgctctggcagtagggccacgacctgcctgcctgggctggagctcttgcccgaagcctgaagcttccttcggcgccatgcaggggttggggttgggactggagctggccttgggatttaatggggaagaaggcctggcaggacctggcctgtttgtttaaaaatgaagtatgggttgggggattacgctagtttttctttgtatttttatctctatctcctcactttttctcccaaagtagaaaaaaatgttttctg

SEQ ID NO: 70470 - DNA, 2581 bp, Homo Sapiens
  misc_feature (1640)..(1729): n is a, c, g, or t
  misc_feature (1823)..(1823): n is a, c, g, or t
  misc_feature (1887)..(1896): n is a, c, g, or t
  misc_feature (2045)..(2045): n is a, c, g, or t
tggaccggtccggaattcccgggatatcgtcgacccacgcgtccgctctgcagcccccaagaagaagggatttgaagaggagcacaaggacagtgatgatgacagcagtgatgacgagcaggaaaagaagccagaagcccccaagctgtccaagaagaagttgcgccgaatgaaccgcttcactgtggctgaactcaagcagctggtggctcggcccgatgtcgtggagatgcacgatgtgacagcgcaggaccctaagctcttggttcacctcaaggccactcggaactctgtgcctgtgccacgccactggtgttttaagcgcaaatacctgcagggcaaacggggcattgagaagccccccttcgagctgccagacttcatcaaacgcacaggcatccaggagatgcgagaggccctgcaggagaaggaagaacagaagaccatgaagtcaaaaatgcgagagaaagttcggcctaagatgggcaaaattgacatcgactaccagaaactgcatgatgccttcttcaagtggcagaccaagccaaagctgaccatccatggggacctgtactatgaggggaaggagttcgagacacgactgaaggagaagaagccaggagatctgtctgatgagctaaggatttccttggggatgccagtaggaccaaatgcccacaaggtccctcccccatggctgattgccatgcagcgatatggaccacccccatcgtatcccaacctgaaaatccctgggctgaactcgcccatccctgagagctgttcctttgggtaccatgctggtggctggggcaaacctccagtggatgagactgggaaaccgctctatggggacgtgtttggaaccaatgctgctgaatttcagaccaagactgaggaagaagagattgatcggaccccttggggggaactggaaccatctgatgaagaatcctcagaagaagaggaagaggaagaaagtgatgaagacaaaccagatgagacaggctttattacccctgcagacagtggccttatcactcctggaggcttttcatcagtgcctgctggaatggagacccctgaactcattgagctgaggaagaagaagattgaggaggcgatggacggaagtgagacacctcagctcttcactgtgttgccagagaagagaacagccactgttggaggggccatgatgggatcaacccacatttatgacatgtccacggttatgagccggaagggcccggctcctgagctgcaaggtgtggaagtggcgctggcgcctgaagagttggagctggatcctatggccatgacccagaagtatgaggagcatgtgcgggagcagcaggctcaagtagagaaggaggacttcagtgacatggtggctgagcacgctgccaaacagaagcaaaaaaaacggaaagctcagccccaggacagccgtgggggcagcaagaaatataaggagttcaagttttaggtcccctcacactagccctttttttggccctacgtctggatgcctgggcttcacacaagaaccacctctcccgcagttcccaaggacttgtcatttcatgttcttattttagacctgttttgtaaataaagctgtttcccaaggaaagagnnnnnnnnnnnnnnnnnnnnnnnnnnnnnnnnnnnnnnnnnnnnnnnnnnnnnnnnnnnnnnnnnnnnnnnnnnnnnnnnnnnnnnnnnnccttgtccgggcgcccccggccccggaaaaagtttatctaaaccatttcttttcggcgccggcggccccgagacacgaaagaggaaaccgggcncatggccggtttctcctagcgaaatcccggagcccgggactaagggttttgggtttcgccaccnnnnnnnnnncacccccgggggcaaccgcgaaccgttttttgaaataaaaaccccaaactgcgaattcgggggaggcccatttaacctggtaaacccgatcaccaaaaaggaaacccccaaagcccacaaccccccgaattttccaaaatatttcaggnccccgcgcccccccgggcccttgtgtattcgccaaaaaaaagcgggggggaagaaatttctccaattataaacacatatctccgggaccccgcaacggcgcgggaaacaagcgccattaccccacctatcacggcacaatgtgggaatgaaaaccccgtggaaatctctcgcccatacgcggtgctatatcggaacccaacccttgtggctccctcctttgccgccaaatataaacaatattagacgccccctgggcgcccaaaacaacccgggaagccccaaaagaaacaaatataacctattttttgcgccccacgggctccacattctcaaaaactggggggagagattccccacccccacggctctaggggttggggcccccacaacacaaaaatatctcttattccaaacccctcttccggggaaaaaggggaaccaggttttcttcttttgttacacaccacaacaaaccttcggccgaaattatatgatttacacgccctgtcagccgaaacgcgcattgtcctatccc

SEQ ID NO: 70471 - DNA, 987 bp, Homo Sapiens
aagggcgaagagtatgaagtcacggcgcgccgaattcggcacgaggggcgacggagcatcccgagcctcccaaagcagaattgcagctgccgccgccgccacctccaggccactatggcgcctgggctgcccaggagcttcaggccaagttggcagagatcggagctccgatccagggtaatcgcgaggagctggtggagcggctgcagagctacacccgccagactggcatcgtgctgaatcggccggttttgagaggggaagatggggacaaagccgctccacctcccatgtcggcacagctccctggaattcccatgccaccaccacctttgggactcccccctctgcagcctcctccgccacccccaccacctccaccaggccttggccttggctttcctatggcccacccaccaaatttggggcccccgcctcctctccgtgtgggtgagccagtggcactgtcagaggaggagcggctgaagttggctcagcagcaggcggcattgctgatgcagcaggaggagcgtgccaagcagcagggagatcattcgctgaaggaacatgagctcttggagcagcagaagcgggcagctgtgttactggagcaggaacgacagcaggagattgccaagatgggcaccccagtccctcggcccccacaagacatgggccagattggtgtgcgcactcctctgggtcctcgagtagctgctccagtgggcccagtgggccccactcctacagttttgcccatgggaacccctgttccccggcctcggggtcccccaccgccccctggagatgagaacagagagatggatgaccctctgtgagcctcagatcccccagccttggaaagatcctgcgttgaagaagcccccggaaaattattctcacaggagaagagaatgaaacgagccgcgtcctgggcttcactcaaactatgagaatgtctataaagaaaaccgagctgtccaaaaa

SEQ ID NO: 70472 - DNA, 806 bp, Homo Sapiens
gagtatgaagtcgacggcgcgccgaattcggcacgagggcggctaagatggcgacggagcatcccgagcctcccaaagcagaattgcagctgccgccgccgccacctccaggccactatggcgcctgggctgcccaggagcttcaggccaagttggcagagatcggagctccgatccagggtaatcgcgaggagctggtggagcggctgcagagctacacccgccagactggcatcgtgctgaatcggccggttttgagaggggaagatggggacaaagccgctccacctcccatgtcggcacagctccctggaattcccatgccaccaccacctttgggactcccccctctgcagcctcctccgccacccccaccacctccaccaggccttggccttggctttcctatggcccacccaccaaatttggggcccccgcctcctctccatgtgggtgagccagtggcatctgtcacaggaggagcggctgaagtcggctcagcagcaggcggcattgcagatgcagcaggaggagcgtgccaagcagcagggagatcattcgctgaaggaacatgagctcttggagcagcagaagcgggcagctgtgttactggagcagggacgacagcaggagattgccaagatgggcaccccagtccctcggcccccacaagacatgggccagattggtgtgcgcactcctctgggttctcgagtagctgctcaagtgggcccagtgggcccaactctacagttttgccatgggagccctgttcccggctcctggtcccaccgccccttgaatga

SEQ ID NO: 70473 - DNA, 2160 bp, Homo Sapiens
agggcgaaagagtatgaagtcacggcgcgccgaattcggcacgagggcatcccgagcctcccaaagcagaattgcagctgccgccgccgccacctccaggccactatggcgcctgggctgcccaggagcttcaggccaagttggcagagatcggagctccgatccagggtaatcgcgaggagctggtggagcggctgcagagctacacccgccagactggcatcgtgctgaatcggccggttttgagaggggaagatggggacaaagccgctccacctcccatgtcggcacagctccctggaattcccatgccaccaccacctttgggactcccccctctgcagcctcctccgccacccccaccacctccaccaggccttggccttggctttcctatggcccacccaccaaatttggggcccccgcctcctctccgtgtgggtgagccagtggcactgtcagaggaggagcggctgaagttggctcagcagcaggcggcattgctgatgcagcaggaggagcgtgccaagcagcagggagatcattcgctgaaggaacatgagctcttggagcagcagaagcgggcagctgtgttactggagcaggaacgacagcaggagattgccaagatgggcaccccagtccctcggcccccacaagacatgggccagattggtgtgcgcactcctctgggtcctcgagtagctgctccagtgggcccagtgggccccactcctacagttttgcccatgggagcccctgttccccggcctcgtggtcccccaccgccccctggagatgagaacagagagatggatgacccctctgtgggccccaagatcccccaggctttggagaagatcctgcagctgaaggagagccgccaggaagagatgaattctcagcaggaggaagaggaaatggaaacagatgctcgctcgtccctgggccagtcagcgtcagagactgaggaggacacagtgtccgtatctaaaaaggagaaaaaccggaagcgtaggaaccgaaagaagaagaaaaagccccagcgggtgcgaggggtgtcctctgagagctctggggaccgggagaaagactcaacccggtcccgtggctctgattccccagcagctgatgttgagattgagtatgtgactgaagaacctgaaatttacgagcccaactttatcttctttaagaggatctttgaggcttttaagctcactgatgatgtgaagaaggagaaagagaaagagccagagaaacttgacaaactggagaactctgcagcccccaagaagaagggatttgaagaggagcacaaggacagtgatgatgacagcagtgatgacgagcaggaaaagaagccagaagcccccaagctgtccaagaagaagttgcgccgaatgaaccgcttcactgtggctgaactcaagcagctggtggctcggcccgatgtcgtggagatgcacgatgtgacagcgcaggaccctaagctcttggttcacctcaaggccactcggaactctgtgcctgtgccacgccactggtgttttaagcgcaaatacctgcagggcaaacggggcattgagaagccccccttcgagctgccagacttcatcaaacgcacaggcatccaggagatgcgagaggccctgcaggagaaggaagaacagaagaccatgaagtcaaaaatgcgagagaaagttcggcctaagatgggcaaaattgacatcgactaccagaaactgcatgatgccttcttcaagtggcagaccaagccaaagctgaccatccatggggacctgtactatgaggggaaggagttcgagacacgactgaaggagaagaagccaggagatctgtctgatgagctaaggatttccttggggatgccagtaggaccaaatgcccacaaggtccctcccccatggctgattgccatgcagcgatatggaccacccccatcgtatcccaacctgaaaatccctgggctgaactcgcccatccctgagagctgttcctttgggtaccatgctggtggctggggcaaacctccagtggatgagactgggaaaccgctctatggggacgtgttggaacaatgctgctgatttcagacagactgagaagagaaatgatcgacccctggggaactgactc

SEQ ID NO: 70474 - DNA, 857 bp, Homo Sapiens
  misc_feature (686)..(686): n is a, c, g, or t
  misc_feature (779)..(780): n is a, c, g, or t
  misc_feature (789)..(789): n is a, c, g, or t
aggggggagagagtatgaagtcgacggcgcgccgaattcggcacgaggcggagcatcccgagcctcccaaagcagaattgcagctgccgccgccgccacctccaggccactatggcgcctgggctgcccaggagcttcaggccaagttggcagagatcggagctccgatccagggtaatcgcgaggagctggtggagcggctgcagagctacacccgccagactggcatcgtgctgaatcggccggttttgagaggggaagatggggacaaagccgctccacctcccatgtcggcacagctccctggaattcccatgccaccaccacctttgggactcccccctctgcagcctcctccgccacccccaccacctccaccaggccttggccttggctttcctatggcccacccaccaaatttggggcccccgcctcctctccgtgtgggtgagccagtggcactgtcagaggaggagcggctgaagttggctcagcagcaggcggcattgctgatgcagcaggaggagcgtgccaagcagcagggagatcattcgctgaaggaacatgagctcttggagcagcagaagcgggcagctgtgttactggagcaggaacgacagcaggagattgccaagatgggcaccccagtccctcggccccccaagacatgggccagattggtgtgncactcctctgggtctcgagtagctgctcagtgggccagtgggcccactctacagtttgccatgggaccctgtcccggctcgtgtccccacgcnnctgagatanacgaagatgagacctctgtggccagatcccagctgagaatcgcctagaacgcagaagtatctccgaga

SEQ ID NO: 70475 - DNA, 958 bp, Homo Sapiens
  misc_feature (14)..(14): n is a, c, g, or t
  misc_feature (125)..(125): n is a, c, g, or t
  misc_feature (132)..(132): n is a, c, g, or t
  misc_feature (139)..(139): n is a, c, g, or t
  misc_feature (220)..(220): n is a, c, g, or t
  misc_feature (252)..(252): n is a, c, g, or t
  misc_feature (667)..(700): n is a, c, g, or t
gtatcatcaactcntcacccagcagtcattatccagagtctactgctgcagagcatttttcatcaggtcagacttcagatcatgaggttcacctcccccaggctgcacatccggtttagcaggtnttgaggntgggcancagcatcagagcaaagaccacctaccattgcttgaggggcagagaaaagaagaacctcatccttatttacaagcattgatnctgcatagctctcatagagaccatgtgctccntgctcagtcaaaactgatgatttacttgctgtagatgaatggtaacacgagctagttaaacagtgccattgttgtgccagtgaagcctccaaccctaagccactgggacggtggccagagatgccagcagcctctgtcgcccttagtcatataaccaaaatccagaccttatccacaacccggggcttggaaaggaaggtattttggaatcacaccctccggttatgttgctccagtaaaatcttgcctggaaagaggcagtcttcttagcatggtgagctgagttcatggcttttttttgtagccagtcctgtccctggccatccatgtgatggttttggatggagttaaacttgatgccagtgggcagtgcatgtggaaagtatcagagtaagcctctcccctccagagcccnnnnnnnnnnnnnnnnnnnnnnnnnnnnnnnnnnatcagaattgtagccagtttctttggccagaaggatgaatacttggatattactgaaagggaggggtggagatgggtgtggcagtgtatggtgtgtgatttttattttcttctttggtcatgggggccaaggagaaaggcatgaatcttccctgtcaggctcttacagccacaggcactgtgtctactgtttggaagacatgtccccgtggctgtggggccgctgcttctgtttaaataaaagtggcctggaagctgg

SEQ ID NO: 70476 - DNA, 3491 bp, Homo Sapiens
  misc_feature (2393)..(2420): n is a, c, g, or t
  misc_feature (2445)..(2461): n is a, c, g, or t
  misc_feature (3069)..(3070): n is a, c, g, or t
  misc_feature (3073)..(3073): n is a, c, g, or t
  misc_feature (3077)..(3080): n is a, c, g, or t
  misc_feature (3086)..(3087): n is a, c, g, or t
  misc_feature (3089)..(3089): n is a, c, g, or t
  misc_feature (3104)..(3105): n is a, c, g, or t
  misc_feature (3108)..(3108): n is a, c, g, or t
  misc_feature (3119)..(3120): n is a, c, g, or t
  misc_feature (3151)..(3151): n is a, c, g, or t
  misc_feature (3163)..(3163): n is a, c, g, or t
  misc_feature (3186)..(3187): n is a, c, g, or t
  misc_feature (3209)..(3209): n is a, c, g, or t
  misc_feature (3405)..(3405): n is a, c, g, or t
  misc_feature (3416)..(3416): n is a, c, g, or t
tcattagttgaaagggatagtaatacctacttgcaggttgttgtcatctgagttgagcactggtcacattgaaggtgctgggtaagtggtagctcttgttgcttcccgttcagcgtcacatctgcagtggagcctgaaaaggctccacattaggtcacctgtgcacagccatggctggaatgatgaaggggatacgctggagttgccctgccatcgcctccatcagccagacgaggtcctcacaggagaaggacagctcttccccaccctgggatctcaggagggcagccacggagtggggaggccccagatgcgctgtgccaaagccaggtccgaggccaaagttctccctgccatccttggtgccgtcctgccccttcctccttcatgcctgggcctgcaggcccaccccagccaccactgagtccactcggagtgccctgtgttcctggagaaggcattccagggttgaatcttgtcccagcctcagcctgggacacctaggtggagagagtggtctccgctctgaattggatccaggggacctgggctcattcttcttggctcaccaaccctgcaggcctcatctttcccaaaacccactttgtcttggtgggagtgggtccgcgctgctctgcagcaggggctggggagtggacagcatcaggtgggaaagtggagtccaccctcatgtttctgtaggattctcaccgtggggctggaagaaaagagcatcgacttgatttctccaaccactcatccctctttttctttcttccaccactccccaccccagctgtagttaatttcagtgccttacaaatcctaagctcagagaaagttccatttccgttccagagggaagggaacctccctaggtccttccctggcttgttataacgcaaagcttggttgtttatgcaactctatcttaagaactgcccagcctcagctgaaaacccgaatctgagaaggaattgcgtcatgtaagggaagctggaattaagggagctgagccagtcatggttgtggcgtgtgagtcaggagacctaggtttcagcccctctctactgtcagcgagctgtgcaacgtgggcaagtcattgtcctctgagctgcagtttcctcatctgtcacatcgctacagacaagacctccctggaacccttctgattgtcttagacactgtggttgcaaaacccacggaaagcctcatttgtgtggaaagtcacgaggacaaaatgatccagtggacacttggggattatctgtcattcaagatccttccttcaaccccaaggccagctcccatctcatttccagaaaggctcatacctggcttgcagggaagcatctgtcttgtcattccaggtgccagaatcctctcagagtcattgaagggtgttcacccatcccacccaaggcttggcacactgccagtgtcttagcagggtcttgtgagggctgggggcatccaggcactcagaaggcaaaggaaccaccctacccatttggcctctggagggggcagaagaaagaaagaaacctcatcctatattttacaaagcatgtgaattctggcattagctctcataggagacccatgtgcttccttgctcagtgcaaaactgatgattctacttgctgtagatgaatggttaacacgagctagttaaacagtgccattgttttgccagtgaagcctccaaccctaagccactgggacggtggccagagatgccagcagcctctgtcgcccttagtcatataaccaaaatccagaccttatccacaacccggggcttggaaaggaaggtattttggaatcacaccctccggttatgttgctccagtaaaatcttgcctggaaagaggcagtcttcttagcatggtgagctgagttcatggcttttttttgtagccagtcctgtccctggccatccatgtgatggttttggatggagttaaacttgatgccagtgggcagtgcatgtggaaagtatcagagtaagcctctcccctccagagccctgagtttcttggctgcatgaaggttttctttagaatcagaattgtagccagtttctttggccagaaggatgaatacttggatattactgaaagggaggggtggagatgggtgtggcagtgtatggtgtgtgatttttattttcttctttggtcatgggggccaaggagaaaggcatgaatcttccctgtcaggctcttacagccacaggcactgtgtctactgtctggaagacatgtccccgtggctgtggggccgctgcttctgtttaaataaaagtggcctggaacagaaatcttattttatgcgacacaccgtagtagatttattttgcccgcggccggcaccgccgccaatgtacctgnnnnnnnnnnnnnnnnnnnnnnnnnnnnggcgatgaaggatttttttgtcggnnnnnnnnnnnnnnnnnaaaaaccttgtttacaccactttgtgggggcggcgccgccccacccaatgtggcagggggtgagttgggggaacagcgagtgagctgacctaaacaaacaccctcgggggcctccccaccatgggcgtttgcgcgttgtgcttgaccatgccaaaaaaaagaagattgggggtggggggtacccccagcggggtttcgccggaaaaccgacacgccccagaacggcggcggccctaccggggtgggccggtttggcacggcgcgcttatctatccgaaagaggggggggtgcgcgcaacggatcggcaggtctgggggataatctatacacacgtgaggctcgcgcccgccgcccctttgtatgctcctataccgcacgctcccccgcaaactcgccgcgccggagcgtgcagaagatcatatctcgtgtagggacacgcgcgtgacccgtggtcggtcgctcacagcctcagcgtccgacaaacgatctccgcctgctcgaaacgcatagcgactgcgcggatgccgattgatatcatcttggctgccactccactcgttatgcgtgttactcggcgcagcttcgcggcagagataaacatacgacnntcncctnnnnacgggnncnaatatcgacccgtcnnttntcacgcccggnncggggacgaggacgagacccttcttttttcntccccctcgagngtcatctcaaaaaaagagtctcnngagagggggcgggcgccggggncgacgtactttgtttcccacgcgccgcggcttgtgattcgtggggggcccgccacagcgacacgtctgtagtgatccgtccccactcctccccgccgtgcgctgagccgagcgagatctcactccgacgcgctggcctctagctagtcctcgcgccaccttagatccaagctggatatacaaaatataagggatcntgctacgcatnttgcctcagatgagcaccccgacccccggcgttgattagtcgggacataaattaacaggatgggcgcgcgcctgc

SEQ ID NO: 70477 - DNA, 581 bp, Homo Sapiens
  misc_feature (132)..(272): n is a, c, g, or t
tcttcccttcactcaagcttggctgctttcctagatccacactttcaaagagaaacccctccagaactcccaccctgacagcccaacaccaccttcatcctggcttccagggggcagcccagtggaatggannnnnnnnnnnnnnnnnnnnnnnnnnnnnnnnnnnnnnnnnnnnnnnnnnnnnnnnnnnnnnnnnnnnnnnnnnnnnnnnnnnnnnnnnnnnnnnnnnnnnnnnnnnnnnnnnnnnnnnnnnnnnnnnnnnnnnnnnnnnngcaggttgttgtcatctgagttgagcactggtcacattgaaggtgctgggtaagtggtagctcttgttgcttcccgttcagcgtcacatctgcagtggagcctgaaaaggctccacattaggtcacctgtgcacagccatggctggaatgatgaaggggatacgctggagttgccctgccatcgcctccatcagccagacgaggtcctcacaggagaaggacagctcttccccaccctgggatctcaggagggcagccacggagtggggaggccccagatgcgctgtgccaaagccaggtccgaggcca

SEQ ID NO: 70478 - DNA, 2120 bp, Homo Sapiens
cgcggagctggctgcagtgacaggaggcgcgaacccgcagcgcttaccgcgcggcgccgcaccatggagcccgccgtgtcgctggccgtgtgcgcgctgctcttcctgctgtgggtgcgcctgaaggggctggagttcgtgctcatccaccagcgctgggtgttcgtgtgcctcttcctcctgccgctctcgcttatcttcgatatctactactacgtgcgcgcctgggtggtgttcaagctcagcagcgctccgcgcctgcacgagcagcgcgtgcgggacatccagaagcaggtgcgggaatggaaggagcagggtagcaagaccttcatgtgcacggggcgccctggctggctcactgtctcactacgtgtcgggaagtacaagaagacacacaaaaaacatcatgatcaacctgatggacattctggaagtggacaccaagaaacagattgtccgtgtggagcccttggtgaccatgggccaggtgactgccctgctgacctccattggctggactctccccgtgttgcctgagcttgatgacctcacagtggggggcttaatcatgggcacaggcatcgagtcatcatcccacaagtacggcctgttccaacacatctgcactgcttacgagctggtcctggctgatggcagctttgtgcgatgcactccgtccgaaaactcagacctgttctatgctgtaccctggtcctgtgggacgctgggtttcctggtggccgctgagatccgcatcatccctgccaagaagtacgtcaagctgcgtttcgagccagtgcggggcctggaggctatctgtgccaagttcacccacgagtcccagcggcaggagaaccaccttcgtggaagggctgctctactccctggatgaggctggcattatgacaggggtcatgacagatgaggcagagcccagcaagctgaatagcattggcaattactacaagccgtggttctttaagcatgtggagaactatctgaagacaaaccgagagggcctggagtacattcccttgagacactactaccaccgccacacgcgcagcatcttctgggagctccaggacatcatcccctttggcaacaaccccatcttccgctacctctttggctggatggtgcctcccaagatctccctcctgaagctgacccagggtgagaccctgcgcaagctgtacgagcagcaccacgtggtgcaggacatgctggtgcccatgaagtgcctgcagcaggccctgcacaccttccaaaacgacatccacgtctaccccatctggctgtgtccgttcatcctgcccagccagccaggcctagtgcaccccaaaggaaatgaggcagagctctacatcgacattggagcatatggggagccgcgtgtgaaacactttgaagccaggtcctgcatgaggcagctggagaagtttgtccgcagcgtgcatggcttccagatgctgtatgccgactgctacatgaacccgggaggagttctgggagatgtttgatggctccttgtaccacaagctgcgagagaagctgggttgccaggacgccttccccgaggtgtacgacaagatctgcaaggccgccaggcactgagctggagcccgcctggagagacagacacgtgtgagtggtcaggcatcttcccttcactcaagcttggctgctttcctagatccacactttcaaagagaaacccctccagaactcccaccctgacagcccaacaccaccttcctcctggcttccagggggcagcccagtggaatggaaagaatgtgggatttggagtcagacaagcctgagtccagttccccgtttagaactcattagctgtgtgactctgggtgaagtccattaaccctctgagccggcccttcatcagtcgaccgggaagaaagaaccactgcagggggggcactgagcgagcccggcctgacggggcgggaccggtaccctggggcgcccggaagagaaatttcgggagcccgaagggcccaatgtgccggtggccccgggcactaaaggggcgtggcgcgccccacaaaaggggccaagagggcccccgttatagggagggggcacgcaccagagcgaga

SEQ ID NO: 70479 - DNA, 1085 bp, Homo Sapiens
  misc_feature (126)..(126): n is a, c, g, or t
aaagtgtacccatctcctgtcctgtgtgtgatcatcgaatgagatacatgtcagaggccatgcacatcacagacacacaatacacactggctatcatcaactagttatcatacatgttcccaggcncaggtcattgtcagaatgttccctcccatctctattcctgtgtatagactctgtagtttctgtaatgatcagatggctgcccctcctctgattatcttcttctcatacccctacaggacaagaggaccctgccttggtgtgagagtgagggaagaggaagctggaacgagggttaaggaaaaccttccagtctggacagtgactggagagctccaaggaaagcccctcggtaacccagccgctggcaccatgaacccagagagcagtatctttattgaggattaccttaagtatttccaggaccaagtgagcagagagaatctgctacaactgctgactgatgatgaagcctggaatggattcgtggctgctgctgaactgcccagggatgaggcagatgagctccgtaaagctctgaacaagcttgcaagtcacatggtcatgaaggacaaaaaccgccacgataaagaccagcagcacaggcagtggtttttgaaagagtttcctcggttgaaaagggagcttgaggatcacataaggaagctccgtgcccttgcagaggaggttgagcaggtccacagaggcaccaccattgccaatgtggtgtccaactctgttggcactacctctggcatcctgaccctcctcggcctgggtctggcacaccttcacagaaggaatcagttttgtgctcttggacactggcatgggtctgggaacagcagctgctgtggctgggatttacctgcagtgtggtagaactagtaaacaaatttgcgggcacgagcccaagccccgcaacttggaccaaagcggcaccaatgtaccaaaggtgatgaaggaagtttgtggctgggtacacacccaatgttcttaccttgtttgactatttgtaccaagtcacacaagggattgggaggaacatccgtgccatcagacgagccagagccaccctcagc

SEQ ID NO: 70480 - DNA, 667 bp, Homo Sapiens
acagctttagtgttataattcattttttaataaaatatagactgttttatcaaaaatatttatacattctgttacaatatattgcttttgccctcaataactgccaatataaaatctggatccagtggcctaaaatgtacaaatgcacttaatgtaaatgctggagtttgaggtgtctgcttggccactgtacaaaagtgatgaagtggtaaaattaaataataagcctacaacatagaatacattaaaacttgcacatatacatgttcacagcatgtatacaatgataatccctacggtttaaccaagttatggttcccttctacagcagacacaaaaccaaggtgaactaggttggcagatgtagagtgaataccaaaaaaagggtaatcggttcactgattctgaaagatatgactgaacatactgagcatctagactttgggaatgcatacaggtaacaatatcttggttcggctgattaaaagtcctcattcttaacatcttaagtaaatgctgatcctgtttgtttcagcactgtttaataaacaaaaaaaattgtttggcaagcagctctgttggaaagctataagcctgttacatgattgataaaaaaggcaatataaagttttctcctaataaatatagaacatttataaaataaaaa

SEQ ID NO: 70481 - DNA, 1103 bp, Homo Sapiens
  misc_feature (103)..(114): n is a, c, g, or t
  misc_feature (934)..(943): n is a, c, g, or t
tttttttcccttctttataaacacaagtacatgaggtttatttgaaattccaatttattacaagttcaccctttaatggggcccttcctctttgaagacaatnnnnnnnnnnnncaacaacaaacaattcaggtgtcactgaagtgggaacacaggattctcactatgaacaagaacagactggatgtaggaggcaggggaagctggcggtggtggggttatgaagctgtgatgtcagtgccaactccatgcctatagaagggacggtaaactacccagcagccctggagcaatcctcgtcgtccttgggcaggaggacggaggaagcagaggccacattccgcagtttaaaattaagaggcttgattctcatgttctaggagctgcagtccccttggtggactttaaataggtacagaagagcttgggtgctcaaaatttccaaattcaaaggtgataaaaaagaaaaaccctgttttgtacttttatcaaaatccatcataaaagggaaagaagactacaaagttttgcctaaatataacaactagagctagatttgttgtgggggaaggggctctcagagcttctctgccgctctctcctcccaccccccaccgacactgaccactggaatcttcaggttcttgaggagttccaaggctgaggtcagaacgggcatgggaggcagcagacacagcactgccctgctccccctccaatgttgctgcttgcctcaatgagcctccaacccaactgctctagaggagagtggatgggctgaaggagaagccagggaagttagagcaaacacattatcatagaaactgtactgtacatgtgctaaagcaagatgtcaggagtatcttacaagatgttctttatacaatatcactgctgaaacaagcaacttttaataactagaaaagtcaatttnnnnnnnnnnttaaacatttaaattcttcctgcttttcttctgctcccctaagagcttgactggtatgtgggtgggctgggctccaacacccctctggccagatccatcaaagtaaaggttatatgcatgattataagcaggactccagtctctaagtgaagtgccttag

SEQ ID NO: 70482 - DNA, 1615 bp, Homo Sapiens
  misc_feature (673)..(689): n is a, c, g, or t
  misc_feature (1183)..(1277): n is a, c, g, or t
  misc_feature (1523)..(1557): n is a, c, g, or t
agctgctcaccaccattgcccgcaccatcaacgaggtggagaaccagatcctcacccgcgacgccaagggcatcagccaggagcagatgcaggagttccgggcgtccttcaaccacttcgacaaggatcatggcggggcgctggggcccgaggagttcaaggcctgcctcatcagcctgggctacgacgtggagaacgaccggcagggtgaggccgagttcaaccgcatcatgagcctggtcgaccccaaccatagcggccttgtgaccttccaagccttcatcgacttcatgtcgcgggagaccaccgacacggacacggctgaccaggtcatcgcttccttcaaggtcttagcaggggacaagaacttcatcacagctgaggagctgcggagagagctgccccccgaccaggccgagtactgcatcgcccgcatggcgccataccagggccctgacgccgtgcccggtgccctcgactacaagtccttctccacggccttgtatggcgagagcgacctgtgaggccccagagacctgacccaacacccccgacggcctccaggaggggcctgggcagccccacagtcccattcctccactctgtatctatgcaaagcactctctgcagtcctccggggtgggtgggtgggcagggaggggctggggcaggnnnnnnnnnnnnnnnnnttgtgggttggccaggaggttcccccgaccaggttggggagacttggggccagcgcttctggtctggtaaatatgtatgatgtgttgtgcttttttaaccaaggaggggccagtggattcccacagcacaaccggtcccttccatgccctgggatgcctcaccacacccaggtctcttcctttgctctgaggtcccttcaaggcctccccaatccaggccaaagccccatgtgccttgtccaggaactgcctgggccatgcgaggggccagcagagggcgccaccaccacctgacggctggggacccacccagcccctctcccctctctgctccagactcacttgccattgccaggagatggccccaacaagcaccccgcttttgcagcagaggagctgagttggcagaccgggcccccctgaaccgcaccccatcccaccagccccggccttgctttgtctggcctcacgtgtctcagattttctaagaaccnnnnnnnnnnnnnnnnnnnnnnnnnnnnnnnnnnnnnnnnnnnnnnnnnnnnnnnnnnnnnnnnnnnnnnnnnnnnnnnnnnnnnnnnnnnnnnnctttcagagaattactatttactttattaacttacggatttattatataaatatatattcacctagcaacatatctctgccgtctctcctgctctcataatgaagacatagccgattctctgcccgggccccttgctgatgctcctccgggtctgcgtcgggcgtgggtctctggggaccctccagaggtggaggtgggctgatggcctggctgcctggtggttgatggttttgctccccctaccnnnnnnnnnnnnnnnnnnnnnnnnnnnnnnnnnnncttggtttctggataaaccaccctctggggacaggataataaaacatgtaatattttt

SEQ ID NO: 70483 - DNA, 500 bp, Homo Sapiens
  misc_feature (60)..(155): n is a, c, g, or t
  misc_feature (401)..(435): n is a, c, g, or t
tcccaccagccccggccttgctttgtctggcctcacgtgtctcagattttctaagaaccnnnnnnnnnnnnnnnnnnnnnnnnnnnnnnnnnnnnnnnnnnnnnnnnnnnnnnnnnnnnnnnnnnnnnnnnnnnnnnnnnnnnnnnnnnnnnnnnctttcagagaattactatttactttattaacttacggatttattatataaatatatattcacctagcaacatatctctgccgtctctcctgctctcataatgaagacatagccgattctctgcccgggccccttgctgatgctcctccgggtctgcgtcgggcgtgggtctctggggaccctccagaggtggaggtgggctgatggcctggctgcctggtggttgatggttttgctccccctaccnnnnnnnnnnnnnnnnnnnnnnnnnnnnnnnnnnncttggtttctggataaaccaccctctggggacaggataataaaacatgtaatatttttaagaagg

SEQ ID NO: 70484 - DNA, 487 bp, Homo Sapiens
  misc_feature (45)..(139): n is a, c, g, or t
  misc_feature (385)..(397): n is a, c, g, or t
ccttgctttgtctggcctcacgtgtctcagattttctaagaaccnnnnnnnnnnnnnnnnnnnnnnnnnnnnnnnnnnnnnnnnnnnnnnnnnnnnnnnnnnnnnnnnnnnnnnnnnnnnnnnnnnnnnnnnnnnnnnnctttcagagaattactatttactttattaacttacggatttattatataaatatatattcacctagcaacatatctctgccgtctctcctgctctcataatgaagacatagccgattctctgcccgggccccttgctgatgctcctccgggtctgcgtcgggcgtgggtctctggggaccctccagaggtggaggtgggctgatggcctggctgcctggtggttgatggttttgctccccctaccnnnnnnnnnnnnngagtttattctgattgattttttttcttggtttctggataaaccaccctctggggacaggataataaaacatgtaatatttttaagaagc

SEQ ID NO: 70485 - DNA, 3174 bp, Homo Sapiens
  misc_feature (2957)..(2967): n is a, c, g, or t
cagtcgacggtaccggacatatgcccgggaattcggccattacggccggggggggcgggagctgaggcgggagcggacaggctggtgggcgagcgagaggcggcggaatggtggactaccacgcggcgaaccagtcgtaccagtacggccccagcagcgcgggcaatggcgctggcggcgggggcagcatgggcgactacatggcccaggaggacgactgggaccgggacctgctgctggacccggcctgggagaagcagcagcgcaagaccttcacggcatggtgcaactcccacctgcggaaggcaggcacacagatcgagaacattgatgaggacttccgagacgggctcaagctcatgctgctcctggaggtcatatcaggggagcggttacctaagccggagcgggggaagatgagagtgcacaaaatcaacaatgtgaacaaagcgctggactttattgccagcaaaggcgtcaagctggtctccatcggggcagaagagattgtggacggcaacgcaaagatgaccctgggaatgatctggaccatcatccttaggttcgccatccaggacatctccgtggaagagacctcggccaaggaagggctccttctctggtgccagagaaagacagccccgtataagaacgtcaatgtgcagaacttccacatcagctggaaggatggtcttgccttcaatgccctgatccaccggcacagaccagagctgattgagtatgacaagctgaggaaggacgaccctgtcaccaacctgaacaatgccttcgaagtggctgagaaatacctcgacatccccaagatgctggatgcagaggacatcgtgaacacggcccggcccgacgagaaggccataatgacctatgtgtccagcttctaccatgccttttcaggagcgcagaaggctgaaactgccgccaaccggatctgtaaggtgctggctgtcaaccaagagaacgagcacctgatggaggactacgagaagctggccagcgacctcctggagtggatccggcgcaccatcccctggctggaggaccgtgtgccccaaaagactatccaggagatgcagcagaagctggaggacttccgcgactaccggcgtgtgcacaagccgcccaaggtgcaggagaagtgccagctggagatcaacttcaacacgctgcagaccaagctgcgcctcagcaaccggcccgccttcatgccctccgagggcaagatggtctcggacatcaacaatggctggcagcacttggagcaggctgagaagggctacgaggagtggctgctgaatgagatccgcaggctggagcggctcgaccacctggcagagaagttccggcagaaggcctccatccacgaggcctggactgacgggaaggaagccatgctgaagcaccgggactacgagacggccacactatcggacatcaaagccctcattcgcaagcacgaggccttcgagagcgacctggctgcgcaccaggaccgcgtggagcagatcgccgccattgcccaggagctcaacgagctggattactacgactcccacaatgtcaacacccggtgccagaagatctgtgaccagtgggacgccctcggctctctgacacatagtcgcagggaagccctggagaaaacagagaagcagctggaggccatcgaccagctgcacctggaatacgccaagcgcgcggcccccttcaacaactggatggagagcgccatggaggacctccaggacatgttcatcgtccataccatcgaggagattgagggcctgatctcagcccatgaccagttcaagtccaccctgccggacgccgatagggagcgcgaggccatcctggccatccacaaggaggcccagaggatcgctgagagcaaccacatcaagctgtcgggcagcaacccctacaccaccgtcaccccgcaaatcatcaactccaagtgggagaaggtgcagcagctggtgccaaaacgggaccatgccctcctggaggagcagagcaagcagcagtccaacgagcacctgcgccgccagttcgccagccaggccaatgttgtggggccctggatccagaccaagatggaggagatcgggcgcatctccattgagatgaacgggaccctggaggaccagctgagccacctgaagcagtatgaacgcagcatcgtggactacaagcccaacctggacctgctggagcagcagcaccagctcatccaggaggccctcatcttcgacaacaagcacaccaactataccatggagcacatccgcgtgggctgggagcagctgctcaccaccattgcccgcaccatcaacgaggtggagaaccagatcctcacccgcgacgccaagggcatcagccaggagcagatgcaggagttccgggcgtccttcaaccacttcgacaaggatcatggcggggcgctggggcccgaggagttcaaggcctgcctcatcagcctgggctacgacgtggagaacgaccggcagggtgaggccgagttcaaccgcatcatgagcctggtcgaccccaaccatagcggccttgtgaccttccaagccttcatcgacttcatgtcgcgggagaccaccgacacggacacggctgaccaggtcatcgcttccttcaaggtcctagcaggggacaagaacttcatcacagctgaggagctgcggagagagctgccccccgaccaggccgagtactgcatcgcccgcatggcgccataccagggccctgacgccgtgcccggtgccctcgactacaagtccttctccacggcttgtatggcgagagcgactgttggagcccagagaacttgaccaaaaccccgaaggctccaggaaggggcctggcagcccaaagtccattcctccctcttgttccttcaaggctcttctgagctccggtggtggtgggcnnnnnnnnnnnagagagcctctcccctctccagtggggtggccggagggctcccccacgttggtgatctgcgcccctttcgttaactttgttgcggcgtgtcccacggcggggttctcccaacgctctctccgggctctccacgttttgtgcctgccctcccagctttgtcttctgtagcgatacccccatctgtctctagcctgcggtcactctata

SEQ ID NO: 70486 - DNA, 3735 bp, Homo Sapiens
  misc_feature (3119)..(3154): n is a, c, g, or t
  misc_feature (3307)..(3315): n is a, c, g, or t
  misc_feature (3533)..(3541): n is a, c, g, or t
agagtatgaagtcgacggcgcgccgaattcggcacgagggcgcccgcccagaggcaggcagtccgcgagcccagccgccgctgtcgccgccagtagcagccttcgccagcagcgccgcggcggaaccgggcgcaggggagcgagcccggccccgccagcccagcccagcccagccctactccctccccacgccagggcagcagccgttgctcagagagaaggtggaggaagaaatccagaccctagcacgcgcgcaccatcatggaccattatgattctcagcaaaccaacgattacatgcagccagaagaggactgggaccgggacctgctcctggacccggcctgggagaagcagcagagaaagacattcacggcatggtgtaactcccacctccggaaggcggggacacagatcgagaacatcgaagaggacttccgggatggcctgaagctcatgctgctgctggaggtcatctcaggtgaacgcttggccaagccagagcgaggcaagatgagagtgcacaagatctccaacgtcaacaaggccctggatttcatagccagcaaaggcgtcaaactggtgtccatcggagccgaagaaatcgtggatgggaatgtgaagatgaccctgggcatgatctggaccatcatcctgcgctttgccatccaggacatctccgtggaagagacttcagccaaggaagggctgctcctgtggtgtcagagaaagacagccccttacaaaaatgtcaacatccagaacttccacataagctggaaggatggcctcggcttctgtgctttgatccaccgacaccggcccgagctgattgactacgggaagctgcggaaggatgatccactcacaaatctgaatacggcttttgacgtggcagagaagtacctggacatccccaagatgctggatgccgaagacatcgttggaactgcccgaccggatgagaaagccatcatgacttacgtgtctagcttctaccacgccttctctggagcccagaaggcggagacagcagccaatcgcatctgcaaggtgttggccgtcaaccaggagaacgagcagcttatggaagactacgagaagctggccagtgatctgttggagtggatccgccgcacaatcccgtggctggagaaccgggtgcccgagaacaccatgcatgccatgcaacagaagctggaggacttccgggactaccggcgcctgcacaagccgcccaaggtgcaggagaagtgccagctggagatcaacttcaacacgctgcagaccaagctgcggctcagcaaccggcctgccttcatgccctctgagggcaggatggtctcggacatcaacaatgcctggggctgcctggagcaggtggagaagggctatgaggagtggttgctgaatgagatccggaggctggagcgactggaccacctggcagagaagttccggcagaaggcctccatccacgaggcctggactgacggcaaagaggccatgctgcgacagaaggactatgagaccgccaccctctcggagatcaaggccttgctcaagaagcatgaggccttcgagagtggacctggctgcccaccaggaccgtgtggagcagattgccgccatcgcacaggagctcaatgagctggactattatgactcacccagtgtcaacgcccgttgccaaaagatctgtgaccagtgggacaatctgggggccctaactcagaagcgaagggaagctctggagcggaccgagaaactgctggagaccattgaccagctgtacttggagtatgccaagcgggctgcacccttcaacaactggatggagggggccatggaggacctgcaggacaccttcattgtgcacaccattgaggagatccagggactgaccacagcccatgagcagttcaaggccaccctccctgatgccgacaaggagcgcctggccatcctgggcatccacaatgaggtgtccaagattgtccagacctaccacgtcaatatggcgggcaccaacccctacacaaccatcacgcctcaggagatcaatggcaaatgggaccacgtgcggcagctggtgcctcggagggaccaagctctgacggaggagcatgcccgacagcagcacaatgagaggctacgcaagcagtttggagcccaggccaatgtcatcgggccctggatccagaccaagatggaggagatcgggaggatctccattgagatgcatgggaccctggaggaccagctcagccacctgcggcagtatgagaagagcatcgtcaactacaagccaaagattgatcagctggagggcgaccaccagctcatccaggaggcgctcatcttcgacaacaagcacaccaactacaccatggagcacatccgtgtgggctgggagcagctgctcaccaccatcgccaggaccatcaatgaggtagagaaccagatcctgacccgggatgccaagggcatcagccaggagcagatgaatgagttccgggcctccttcaaccactttgaccgggatcactccggcacactgggtcccgaggagttcaaagcctgcctcatcagcttgggttatgatattggcaacgacccccagggagaagcagaatttgcccgcatcatgagcattgtggaccccaaccgcctgggggtagtgacattccaggccttcattgacttcatgtcccgcgagacagccgacacagatacagcagaccaagtcatggcttccttcaagatcctggctggggacaagaactacattaccatggacgagctgcgccgcgagctgccacccgaccaggctgagtactgcatcgcgcggatggccccctacaccggccccgactccgtgccaggtgctctggactacatgtccttctccacggcgctgtacggcgagagtgacctctaatccaccccgcccggccgccctcgtcttgtgcgccgtgccctgccttgcacctccgccgtcgcccatctcctgcctgggttcggtttcagctcccagcctccacccgggtgagctggggcccacgtggcatcgatcctccctgcccgcgaagtgacagtttacaaaattattttctgcnnnnnnnnnnnnnnnnnnnnnnnnnnnnnnnnnnnnctacatattttattatagaaaaagtatttctttctccaccagacaaatggaacaaaacagaggaaacgattaactatttgcaccgaaatgtctgtttgttgcgacataggaaaataaccaagcacaaagttatattccatcctttttactgannnnnnnnncttctatctgttccatctgctgtattcaatttctccaatctcatgtccattttggctgtgggagccgggcgcacggggtacccctgtcaaaccgcccttggcgcctgtgcgctatggctagcccactcggtcctgaacaacgctcccccgaacaatccacgcacacctctcgaacggccggcccacggcagcgaacccacgcgcgccccacctcaaannnnnnnnnagggggacagcccgctgaacagccgcactctacagtgccatcgccccctcacaggcactgcgagcgtcaccgcagccgcccacggtcaaaccccccccgcaacacaccacccaaggggccaatccacggcaacacacgccgcacacccatcaccccccgccacggccgcgccgcacacagcaaaccaaccccgc

SEQ ID NO: 70487 - DNA, 1101 bp, Homo Sapiens
  misc_feature (153)..(220): n is a, c, g, or t
cagcgctagtgtgtccgcctagttcagtgtgcgtggagattaggtccaagcgcccgcccagaggcaggcagtccgcgagcccagccgccgctgtcgccgccagtagcagccttcgccagcagcgccgcggcggaaccgggcgcaggggagcgnnnnnnnnnnnnnnnnnnnnnnnnnnnnnnnnnnnnnnnnnnnnnnnnnnnnnnnnnnnnnnnnnnnngttgctcagagagaaggtggaggaagaaatccagaccctagcacgcgcgcaccatcatggaccattatgattctcagcaaaccaacgattacatgcagccagaagaggactgggaccgggacctgctcctggacccggcctgggagaagcagcagagaaagacattcacggcatggtgtaactcccacctccggaaggcggggacacagatcgagaacatcgaagaggacttccgggatggcctgaagctcatgctgctgctggaggtcatctcaggtgaacgcttggccaagccagagcgaggcaagatgagagtgcacaagatctccaacgtcaacaaggccctggatttcatagccagcaaaggcgtcaaactggtgtccatcggagccgaagaaatcgtggatgggaatgtgaagatgaccctgggcatgatctggaccatcatcctgcgctttgccatccaggacatctccgtggaagagacttcagccaaggaagggctgctcctgtggtgtcagagaaagacagccccttacaaaaatgtcaacatccagaacttccacataagctggaaggatggcctcggcttctgtgctttgatccaccgacaccgggcccgagctgattgactacgggaagctgcggaaagatgatccactcacaaatctgaatacggcttttgacgtggcagagaagtacctggacatccccaagatgctggatgccgaagacatcgttggaactgcccgaccggatgagaagccatcatgacttacgtgtctagcttctaccacgcttctctggagcccagaagcggagacgcagccattccatctgcaagtgttggcgtcaccagagaccagcacctagtgagattc

SEQ ID NO: 70488 - DNA, 797 bp, Homo Sapiens
  misc_feature (721)..(721): n is a, c, g, or t
ttagggcgaagagtatgaagtcgaggcgcgccgattcggcacgaggagaagacagccccttacaaaaatgtcaacatccagaacttcccataagctggaaggatggcctcggcttctgtgctttgatccaccgacaccggcccgagctgattgactacgggaagctgcggaaggatgatccactcacaaatctgaatacggcttttgacgtggcagagaagtacctggacatccccaagatgctggatgccgaagacatcgttggaactgcccgaccggatgagaaagccatcatgacttacgtgtctagcttctaccacgccttctctggagcccagaaggcggagacagcagccaatcgcatctgcaaggtgttggccgtcaaccaggagaacgagcagcttatggaagactacgagaagctggccagtgatctgttggagtggatccgccgcacaatcccgtggctggagaaccgggtgcccgagaacaccatgcatgccatgcaacagaagctggaggacttccgggactaccggcgcctgcacaagccgcccaaggtgcaggagaagtgccagctggagatcaacttcaacacgctgcagacaagctgcggctcagcaccggcctgcctcatgcctctgagggcagatgtctcgaactcaacatgccggggctgctggagcagtgaaaagctatgagagtggtgctgatgaaatcngagctgaccactgacactgcaaaaatccgcaaagcttctcccagctgatacgcaaagctgctgacaagactaaccc

SEQ ID NO: 70489 - DNA, 918 bp, Homo Sapiens
  misc_feature (721)..(721): n is a, c, g, or t
cctagcggcggaagagtatgaagtcgacggcgcgccgaattcggcacgaggcctgggagaagcagcagagaaagacattcacggcatggtgtaactcccacctccggaaggcggggacacagatcgagaacatcgaagaggacttccgggatggcctgaagctcatgctgctgctggaggtcatctcaggtgaacgcttggccaagccagagcgaggcaagatgagagtgcacaagatctccaacgtcaacaaggccctggatttcatagccagcaaaggcgtcaaactggtgtccatcggagccgaagaaatcgtggatgggaatgtgaagatgaccctgggcatgatctggaccatcatcctgcgctttgccatccaggacatctccgtggaagagacttcagccaaggaagggctgctcctgtggtgtcagagaaagacagccccttacaaaaatgtcaacatccagaacttccacataagctggaaggatggcctcggcttctgtgctttgatccaccgacaccggcccgagctgattgactacgggaagctgcggaaggatgatccactcacaaatctgaatacggcttttgacgtggcagagaagtacctggacatccccaagatgctggatgccgaagacatcgttggaactgcccgaccggatgagaaagccatcatgacttacgtgtctagcttctacacgccttctctggnagcccagaagcggagacagcagccatcgcatctgcaggtgttggcgtcaacaagaaacgagcagctatggagactagagagctgcagtgatctgttgatgatcgcgcacatccgtgctgaaacggggccgaaacatctgctgcaaaactgagatcggatcgcctgcacccaggcgaatgccgatatcaccgacaccg

SEQ ID NO: 70490 - DNA, 1039 bp, Homo Sapiens
  misc_feature (193)..(248): n is a, c, g, or t
  misc_feature (773)..(781): n is a, c, g, or t
aaagagcgaggcctgggtggcgaattcggcacgaggcgcagcgctagtgtgtccgcctagttcagtgtgcgtggagattaggtccaagcgcccgcccagaggcaggcagtccgcgagcccagccgccgctgtcgccgccagtagcagccttcgccagcagcgccgcggcggaaccgggcgcaggggagcgagnnnnnnnnnnnnnnnnnnnnnnnnnnnnnnnnnnnnnnnnnnnnnnnnnnnnnnnnggcagcagccgttgctcacagagaaggcggaggaagaaatccagaccctagcacgcgcgcaccatcatggaccattatgattctcagcaaaccaacgattacatgcagccagaagaggactgggaccgggacctgctcctggacccggcctgggagaagcagcacagaaagacattcacggcatggtgtaactcccacctccggaaagcggggacacagatcgagaacatcgaagaggacttccgggatggcctgaagctcatgctgctgctggaggtcatcccaagtgaacgcttggccaagccagagcgaggcaacatgacagtgcacaagatctccaacgtcaacaaggccctggatttcatagccagcaaaggcgtcaaactggtgtccatcggagccgaagaaatcggggatgggaatgggaagatggacctgggcatggatctggacccatctcctgcgctttggcatccaggacatcctccggggaagagaacttcggccagggaagggctgctcccnnnnnnnnncagaagaaagacagccccgttaaaaagatggccaaagtcccggaacttccccctcacagctggaagggaggggctcccggtctcgggggcatcggatgcgccagagcccggccccgggcggagtgggacacgggaaccggcgggaagggtagaccccttccccaagccggaattccgcggttggtggcggggccaaaacacccccccggggccccgcccagggggcctggtacgcggaagcccccccgggggacacgg

SEQ ID NO: 70491 - DNA, 770 bp, Homo Sapiens
  misc_feature (35)..(35): n is a, c, g, or t
  misc_feature (89)..(89): n is a, c, g, or t
  misc_feature (109)..(109): n is a, c, g, or t
  misc_feature (148)..(148): n is a, c, g, or t
  misc_feature (158)..(158): n is a, c, g, or t
  misc_feature (213)..(248): n is a, c, g, or t
  misc_feature (394)..(394): n is a, c, g, or t
cttctccacggcgctgtacgggagaagtgcttaantccaccccgccgggccgccctcgtcttgtgcgccgtgccctgccttgcacctcngccgtcgcccatctcctgcntgggttcggtttcagctcccagcctccacccgggtgagntggggcccangtggcatcgatcctccctgcccgcgaagtgacagtttacaaaattattttctgcnnnnnnnnnnnnnnnnnnnnnnnnnnnnnnnnnnnnctacatattttattatagaaaaagtattttttctccaccagacaaatggaaaaaaagaggaaagattaactatttgcaccgaaatgtcttgttttgttgcgacataggaaaataaccaagcccaaagttataattccatccttttnactgattttttttcttctatctgttccatctgctgtattcatttctccaatctcatgtccattttggtgtgggagtcggggtagggggtactcttgtcaaaaggcacattggtgcatgtgtgtttgctagctcacttgtccatgaaaatattttatgatattaaagaaaatcttttgaaatggctgttttttaaggaagagaatttatgtggcttctcatttttaaatcccctcagaggtgtgactagtctctttatcagcacacacttaaaaaatttttaatattgtctattaaaaataggacaaacttggagagtatggacaactttgatattgcttggcacagatggtattaaaaaaaccactactcctatga

SEQ ID NO: 70492 - DNA, 620 bp, Homo Sapiens
cgacaaagagtcaccagacagcctgtggaactgacccccactgataactcttcatcatgaacttggaccaaaatgaattgctggcttctcttatactaacccagagtttgtcattaatgtgtaggtgaatgcaaactccatcgttgagcctggggtgtaagacttcaagccaagcgtatgtatcaattctagtcttccaggattcacggtgcacatgctggcattcaacatgtggaaagcttgtcttagagggcttttctttgtatgtgtagcttgctagtttgttttctacatttgaaaatgtttagtttagaataagcgcattatccaattatagaggtacaattttccaaacttccagaaactcatcaaatgaacagacaatgtcaaaactactgtgtctgataccaaaatgcttcagtatttgtaatttttcaagtcagaagctgatgttcctggtaaaagtttttacagttattctataatatcttctttgaatgctaagcatgagcgatatttttaaaaattgtgagtaagctttgcagttactgtgaactattgtctcttggaggaagttttttgtttaagaattgatatgattaaactgaattaatatctgc

SEQ ID NO: 70493 - DNA, 1029 bp, Homo Sapiens
tatagggctaggtacgaggcctgggtgttaattcggcacgaggggagctacgagtagtcgccgagaggccgcggagccagcgacgaccgacccagccgagccgccgccgccgccgcgcccccatggcggccgccaaggacactcatgaggaccatgatacttccactgagaatacagacgagtccaaccatgaccctcagtttgagccaatagtttctcttcctgagcaagaaattaaaacactggaagaagatgaagaggaactttttaaaatgcgggcaaaactgttccgatttgcctctgagaacgatctcccagaatggaaggagcgaggcactggtgacgtcaagctcctgaagcacaaggagaaaggggccatccgcctcctcatgcggagggacaagaccctgaagatctgtgccaaccactacatcacgccgatgatggagctgaagcccaacgcaggtagcgaccgtgcctgggtctggaacacccacgctgacttcgccgacgagtgccccaagccagagctgctggccatccgcttcctgaatgctgagaatgcacagaaattcaaaacaaagtttgaagaatgcaggaaagagatcgaagagagagaaaagaaagggatcaggcaaaaatgatcatgccgaaaaagtggcggaaaagctagaagctctctcggtgaaggaggagaccaaggaggatgctgaggagaagcaataaatcgtcttattttatggtcttttcctctctataccttgctttttttaaaaaattttaccctgcccctctttttcggtttgtttttattctttcatttttacaagggacgttatataaagaactgaactcaacattcaggttgttttttatgtttgtttctaagtttttgccctattgaagatgacttcagaaaatccattccccagtcatgaaaatgtactgtgctaactttcttttctcatagtggaaacacttatttatagtcatcaaaaatagtgaataaaaaacacatttggaacctgg

SEQ ID NO: 70494 - DNA, 2827 bp, Homo Sapiens
gcccttaacaccagtggggccggagggtcccggccagcccaggcagtccgtgccagacctcgcagcaactccgcctggcaaatctatctgcaaaggcgggcagagcggggcaccccaaagcctccagggccccctgctcagcccccgggcccgcccaacgcctctagtaaccccgacctcaggaggagcgaccctggctgggaacgctcggacagcgtccttccagcctctcacgggcacctcccccaggctggctcactggagctggaaccgctgtgggagcctcctccaaaccggacagctcccctgtgctctcccctgggaataaagccaatgccctgacgaccaccgctcacggccaggccggcccgcagactttgtgttgctgaaagagcggactctggacgaggcccctcggcctcccaagaaggccatggactactcgtcgtccagcgaggaggtggaaagcagtgaggacgacgaggaggaaggcgaaggcgggccagcagaggggagcagagatacccctgggggccgcgatggggatacagacagcgtcagcaccatggtggtccacgacgtcgaggagatcaccgggacccagcccccatacgggggcggcaccatggtggtccagcgcacccctgaagaggagcggaacctgctgcatgctgacagcaatgggtacacaaacctgcctgacgtggtccagcccagccactcacccaccgagaacagcaaaggccaaagcccaccctcgaaaggaatgggagtgggtgactaccagtctcgtggggctgggtaaaggcccctggcaagagctcgttttcacgatgtttgtggatctagggatctaccagcctggaggcagtggggacagcatccccatcacagccctagtgggtggagagggcactcggctcgaccagctgcagtacgacgtgaggaagggttctgtggtcaacgtgaatcccaccaacacccgggcccacagtgagacccctgagatccggaagtacaagaagcgattcaactccgagatcctctgtgcagccctttggggggtcaacctgctggtgggcacggagaacgggctgatgttgctggaccgaagtgggcagggcaaggtgtatggactcattgggcggcgacgcttccagcagatggatgtgctggaggggctcaacctgctcatcaccatctcagggaaaaggaacaaactgcgggtgtattacctgtcctggctccggaacaagattctgcacaatgacccagaagtggagaagaagcagggctggaccaccgtgggggacatggagggctgcgggcactaccgtgttgtgaaatacgagcggattaagttcctggtcatcgccctcaagagctccgtggaggtgtatgcctgggcccccaaaccctaccacaaattcatggccttcaagtcctttgccgacctcccccaccgccctctgctggtcgacctgacagtagaggaggggcagcggctcaaggtcatctatggctccagtgctggcttccatgctgtggatgtcgactcggggaacagctatgacatctacatccctgtgcacatccagagccagatcacgccccatgccatcatcttcctccccaacaccgacggcatggagatgctgctgtgctacgaggacgagggtgtctacgtcaacacgtacgggcgcatcattaaggatgtggtgctgcagtggggggagatgcctacttctgtggcctacatctgctccaaccagataatgggctggggtgagaaagccattgagatccgctctgtggagacgggccacctcgacggggtcttcatgcacaaacgagctcagaggctcaagttcctgtgtgagcggaatgacaaggtgttttttgcctcagtccgctctgggggcagcagccaagtttacttcatgactctgaaccgtaactgcatcatgaactggtgacggggccctgggctggggctgtcccacactggacccagctctccccctgcagccaggcttcccgggccgcccctctttcccctccctgggcttttgcttttactggtttgatttcactggagcctgctgggaacgtgacctctgacccctgatgctttcgtgatcacgtgaccatcctcttccccaacatgtcctcttcccaaaactgtgcctgtccccagcttctggggagggacacagcttccccttcccaggaattgagtgggcctagcccctccccccttttctccatttgagaggagagtgcttggggcttgaaccccttaccccactgctgctgactgggcagtggccctggacccctttatttgcacgtcaggagagccggctccccccttgaatgtaccagaccctggggggggtcactgggccctagatttttggggggtcaccagccactccaggggcagggaccatttcttcattttctgaaagcactttaatgattccccttcccccaaactccagggaatggaggggggaccccgccagccaaaacattccccccattcccgacccccctctcctcttctagcccatgcccttccccggtggagggagggagcagggagccctcactctccacgccccttgcttgcatctgtatatagtgtgagcagcaagtaacccttctcctccctcacaactcacccatcctcaatgtagtggccttggatatcctgtttgttaataaagacaattcaaccagctcccaccatgcaggccgcatgtccttgctttctgtcagtactgtagactaggcagagagagcccccagggtggggaaaaaa

SEQ ID NO: 70495 - DNA, 887 bp, Homo Sapiens
  misc_feature (135)..(135): n is a, c, g, or t
  misc_feature (594)..(681): n is a, c, g, or t
  misc_feature (727)..(739): n is a, c, g, or t
aatcaatttccataacttgtaactgaaagagccctgacttatacttagggaagtctctctggtgaagtgatctttgagctgaaggggctgatttggggccaggagtgagggtaggggatggtgagggggagcggncaaaactgttccgatttgcctttgagaacgatctcccagaatggaaggagcgaggcactggtgacgtcaagctcctgaagcacaaggagaaaggggccatccgcctcctcatgcggagggacaagaccctgaagatctgtgccaaccactacatcacgccgatgatggagctgaagcccaacgcaggtagcgaccgcgcctgggtctggaacacccacgctgacttcgccgacgagtgccccaagccagagctgctggccatccgcttcctgaatgctgagaatgcacagaaattcaaaacaaagtttgaagaatgcaggaaagagatcgaagagagagaaaagaaagcaggatcaggcaaaaatgatcatgccgaaaaagtggcggaaaagctagaagctctctcggtgaaggaggagaccaaggaggatgctgaggagaagcaataaatcgtcttannnnnnnnnnnnnnnnnnnnnnnnnnnnnnnnnnnnnnnnnnnnnnnnnnnnnnnnnnnnnnnnnnnnnnnnnnnnnnnnnnnnnnnnttacaagggacgttatataaagaactgaactcaacattcaggttgnnnnnnnnnnnnngtttctaagtttttgccctattgaagatgacttcagaaaatccattccccagtcatgaaaatgtactgtgctaactttcttttccatagtggaaacacttatttatagtcatcaaaaatagtgaataaaaaacacatttggaacctgg

SEQ ID NO: 70496 - DNA, 1068 bp, Homo Sapiens
ccatccaccccgacgccaaccagaaactcacacttattacgatactcagtctgctggggtgatggcctgaccccctccagcgggcagcaggccttgttgtgcttgtgcctctgctcgagcagccagggcagcaaggcacggttggtgctcccgatttcctgggcaaggttctgcagcacctggctcgcactccaggctggcttccgctcaaagctggctcagcaatagggcactggtccatagaggggtcaccacgtcggccactcgtgttactggtggctcactctcaccctcctgtcgcctcctcctggccatggggtcggccttgggccgggccaggcgcacactgagtgggcggcctttccagagggcaccatgcaaaacgcgcagggccttgtccctctctgcagcgctgcggaatgtcacaaaggcgcagggtggttgcccaaagagtttggttttgtggggctgcagaccaaagcggcccaggaagcgccggacgtcgctgaagctggcgtggcgaggcacgttctgcagctccagtttaaagatctcagaggtaaacaagtcatccctgatgtagctgtagagcccgggctgaggccccggccctgtagccgccccagcgccctctgttctccacctcctccagggctgccggggctgcagggggcaccgagacggtagggcagctcagggcactgctgctctcctggccacagctctgccatgggcttcgggccctcgttgtcgaggttctcactcatcgcccaggcggttctccgcctagaccagggacgccatgggggccgcctggccacctcgtcctgggcctgtcacaagggaagtggcctgtcacaagggaagtgctcagaggggaggtgctcacagagccggtgcaacgccgcgaggtcgccgccacccccggcttcgccccaggcggggcgggactcgaacctgcgatgctcaggtccgggtctcaggcttggggctgtaccgcccgcccgccaggggcccgcgccggccgctcgcttcgccagccactcttagtccgccagcgcgtgcggc

SEQ ID NO: 70497 - DNA, 2425 bp, Homo Sapiens
  misc_feature (1897)..(2002): n is a, c, g, or t
  misc_feature (2128)..(2180): n is a, c, g, or t
acggcagtaactctaacggtttaaggtagcgaggcctgggtggcgaattcggcacgaggtgtgaatcgtggctggcccggttctccgcttctccccatcccctactttcctccctccctccctttccctccctcgtcgactgttgcttgctggtcgcagactccctgacccctccctcacccctccctaacctcggtgccaccggattgcccttcttttcctgttgcccagcccagccctagtgtcagggcgggggcctggagcagcccgaggcactgcagcagaagagagaaaagacaacgacgaccctcagctcgccagtccggtcgctggcttcgccgccgccatggcaatgagacagacgccgctcacctgctctggccacacgcgacccgtggttgatttggccttcagtggcatcacgccttatgggtatttcttaatcagcgcttgcaaagatggtaaacctatgctacgccagggagatacaggagactggattggaacatttttgggtcataaaggtgctgtttggggtgcaacactgaataaggatgccaccaaagcagctacagcagctgcagatttcacagccaaagtgtgggatgctgtctcaggagatgaattgatgaccctggctcataaacacattgtcaagactgtggatttcacgcaggatagtaattatttgttaaccgggggacaggataaactgttacgcatatatgacttgaacaaacctgaagcagaacctaaggaaattagtggtcatacttctggtataaaaaaagctctgtggtgcagtgaggataaacagattctttctgctgatgacaaaactgttcgactttgggatcatgctactatgacagaagtgaaatctctaaattttaatatgtctgttagtagtatggaatatattcctgagggagagattttggttataacttatggacgatctattgcttttcatagtgcagtaagtttggacccaattaaatcctttgaagctcctgcaaccatcaattctgcatctcttcatcctgagaaagaatttcttgttgcaggcggtgaagattttaaactttataagtatgattataatagtggagaagaattagaatcctacaagggacactttggtcctattcactgtgtgagatttagtcctgatggagaactctatgccagtggttcagaagatggaacattgagactatggcaaactgtggtaggaaaaacgtatggcctttggaaatgtgtgcttcctgaagaagatagtggtgagctggcaaagccaaagattggttttccagagacaacagaagaggagctagaagaaattgcttcagagaattcagattgcatctttccttcagctcctgatgttaaggcctgagcgtcaatcatatgttgcagttagtatacaactgactaaaacaagcaagcagagaaaagcatcagccttccagagttactgtctgcttaaggcagaaacagcagtaaataatgaggaaaatgaattagctccagtgctggaacaactaactaacttggtgttacctgtaagtgaaaactcaagtgtcagatgaagggaggtggagttatcctcttatagtacagtggcctgttatctttttaatgaatatatacaagccaacatccaatttctattattacaattagggttcttgtagctgtttatgttaatatggagaagaaaactatattggctgattttttctgatcttaaagcagaatgccttttctttttttgcttcagttgtaaagaagagggaatacatgataaagtaactggtttgatttctcgttcattgtacactgcctctgaacatctaattgtttttagttgtctaaataaaatgcctctaaaacnnnnnnnnnnnnnnnnnnnnnnnnnnnnnnnnnnnnnnnnnnnnnnnnnnnnnnnnnnnnnnnnnnnnnnnnnnnnnnnnnnnnnnnnnnnnnnnnnnnnnnnnnntttgggggccccctggcccccaaaaaatttttaaaaccttttttttgggcccggggccccaaaaggaaaggaaaaggggcaaaactgtttcccaagaaaaccggggcaagaaaaagggttggattnnnnnnnnnnnnnnnnnnnnnnnnnnnnnnnnnnnnnnnnnnnnnnnnnnnnnggggttccggggggtcttttggggttttttcaaaagggagccaagcggactccgaattcaaattaccccccgccccgggccccttattggaaaaatgggggaaatttcttaaacactttcggcgccaatgggaacccctcccccaagcgcggttagaggaaccctgaaatcccccccgggggtacccacaccctttggcccccctggggaaaaaataatttcccccgggggaaaaaacggggggc

SEQ ID NO: 70498 - DNA, 945 bp, Homo Sapiens
  misc_feature (265)..(484): n is a, c, g, or t
  misc_feature (758)..(855): n is a, c, g, or t
  misc_feature (857)..(870): n is a, c, g, or t
tgaagtttgaaggaagaaagacatggttagcagaaggtaagaaatagtacatgcgaaggcttagaaataagtcacaaatcacacacaggaagctgcaatgacttacgacacctggctagatacaaactgggacatgcagacagatggattatcgggaacactgatggattaacaggaacaccaactggggaaggattcttgacattatgtattaagagcttggatgtgattgaggtacgtggggtccactcaatattcaatcatnnnnnnnnnnnnnnnnnnnnnnnnnnnnnnnnnnnnnnnnnnnnnnnnnnnnnnnnnnnnnnnnnnnnnnnnnnnnnnnnnnnnnnnnnnnnnnnnnnnnnnnnnnnnnnnnnnnnnnnnnnnnnnnnnnnnnnnnnnnnnnnnnnnnnnnnnnnnnnnnnnnnnnnnnnnnnnnnnnnnnnnnnnnnnnnnnnnnnnnnnnnnnnnnnnnnnnnnnnnnaccagagaagtataggcataaaacctgaagatctgaagaggatctgtagttttggaaaagaatgcagaactagcagagctcagtctgcatggggcttaggcaaaaaggcatcaaaggacttgaaagctattagtgttggggactaatgatagagaagctattaacaagagcctgagaaaaggtgggaaaataaaagacttatttttattattagaagcactgaaacctgcaagacaaactaagaaggcaaagttgccaggcgcagtggctcatnnnnnnnnnnnnnnnnnnnnnnnnnnnnnnnnnnnnnnnnnnnnnnnnnnnnnnnnnnnnnnnnnnnnnnnnnnnnnnnnnnnnnnnnnnnnnnnnnntnnnnnnnnnnnnnnttagctgggtatggtggcgcatacctgtagtccaatctacttccgaggctaaggcggaaggattgcttgaaccca

SEQ ID NO: 70499 - DNA, 984 bp, Homo Sapiens
  misc_feature (49)..(115): n is a, c, g, or t
aaggcctgggtggcgaattctcgacgaggagcggtggcgacatgagcannnnnnnnnnnnnnnnnnnnnnnnnnnnnnnnnnnnnnnnnnnnnnnnnnnnnnnnnnnnnnnnnnngcccagcgagacacacaagctggtggtcgtgggcggcggcggcgtgggcaagagcgcgctgaccatccagttcatccagtcctacttcgtgtctgactacgaccccactattgaggactcctacacgaagatctgcagtgtggatggcatcccagcccggctggacatcctggacaccgcgggccaggaagagttcggggccatgagagagcagtacatgcgtgctggccacggcttcctgctggtgttcgccattaatgaccggcagagtttcaacgaggtgggcaagctcttcacgcagattctgcgggtcaaggaccgcgacgacttccccgttgtgttggtcgggaacaaggcagatctggagtcacagcgccaggtcccccgatcagaagcctctgccttcggcgcctcccaccacgtggcctactttgaggcctcggccaaactgcgtctcaacgtggacgaggcttttgagcagctggtgcgggctgtccggaaataccaggaacaagagctcccaccgagccctcccagtgcccccaggaagaagggcgggggctgcccctgcgtcctcctgtagcccaggcaagagagaagcaaccaccacaagctctcgggactagctgccttcgcaccttgctgtgtgacctgaggccctcactgagcctcaatttcctcatctgggtctcccaggacacatcacatacccacccttacttcctggcctcttctgggctactgccactgtgtgccttctgccaacgcctcctgtccccacctaagcctggtgggggtgaggggctccgggtcactgctgtatataactcccctcccccagaaaaataaatgtcactgccaacgtcaaa

SEQ ID NO: 70500 - DNA, 727 bp, Homo Sapiens
ttaggggggagagagtatgaagtcacggcgcgccgaattcggcacgaggtgacaagctggtgtttgtgggggcaaatgaggaccgggcctcccagctacgcgttctaagtgccatcacacgcaaattcaagctagagccatctgtgagcctggtaaacgtgctagattgctgccctccccagctgacgggcgcggacctctactctctctgctctgatgctatgacagctgccctcaaacgcagggttcatgacctggaggaagggctggaacaaggtagctcagcactgatgctcaccatggaggacttgctgcaggctgccgcccggctgcaaccctcagtcagtgagcaggagctgctccggtacaagcgcatccagcgcaagtttgctgcctgctaggagccccccagggtctgggaccccgctcagcatggctgcaggtaccttgatagcccacagagagatctgggaaggaagggctcctcctcaggctgctgccaacccacctggaggccacctccctccaggagatcccagggtgcaaagtggcattgagacagcagcaacagctcaagagatatctcctgcctacttgcccctccttccaggccggctctaagagaaaggcccatctactcaggaagagggccagggccttgggttctggggattgggccctgagagggctagttctgtggctgaaaataaagcatgtcccgccccct

SEQ ID NO: 70501 - DNA, 1687 bp, Homo Sapiens
  misc_feature (425)..(451): n is a, c, g, or t
gccagacgcaggcttcttctcgggtctggtcctgcatctctctctcccagagcctccggttagggggtgggaaaggacttgccataggtcgctgaggccaccatctgctctcttactggccaagggcgtaaaaagatagtcttcccattagctagagagcaaaccccagaaagcctatggctgcgccgtccgcgggccttggtccgctttgaaggcgggctgcggctgcgagaggagggcgggcgggaggctagctgttgtcgtggttgctcggaggcacgtgtgcagtcccggaagcggcgaggggaaactgctccgcgcgcgccgcgggaggaggaaccgcccggtcctttagggtccgggcccggccgggccatggattcaatgcctgagcccgcgtcccgctgtcttctgcttcttccctnnnnnnnnnnnnnnnnnnnnnnnnnnncggccccggagctgggcccgagccaggccggagctgaggagaacgactgggttcgcctgcccagcaaatgcgaagtgtgtaaatatgttgctgtggagctgaagtcagcctttgaggaaaccggcaagaccaaggaggtgattggcacgggctatggcatcctggaccagaaggcctctggagtcaaatacaccaagtcggacttgcggttaatcgaagtcactgagaccatttgcaagaggctcctggattatagcctgcacaaggagaggaccggcagcaatcgatttgccaagggcatgtcagagacctttgagacattacacaacctggtacacaaaggggtcaaggtggtgatggacatcccctatgagctgtggaacgagacttctgcagaggtggctgacctcaagaagcagtgtgatgtgctggtggaagagtttgaggaggtgatcgaggactggtacaggaaccaccaggaggaagacctgactgaattcctctgcgccaaccacgtgctgaagggaaaagacaccagttgcctggcagagcagtggtccggcaagaagggagacacagctgccctgggagggaagaagtccaagaagaagagcagcagggccaaggcagcaggcggcaggagtagcagcagcaaacaaaggaaggagctgggtggccttgagggagaccccagccccgaggaggatgagggcatccagaaggcatcccctctcacacacagcccccctgatgagctctgagcccacccagcatcctctgtcctgagacccctgattttgaagctgaggagtcaggggcatggctctggcaggccgggatggccccgcagccttcagcccctccttgccttggctgtgccctcttctgccaaggaaagacacaagccccaggaagaactcagagccgtcatgggtagcccacgccgtcctttcccctccccaagtgtttctctcctgacccagggttcaggcaggccttgtggtttcaggactgcaaggactccagtgtgaactcaggaggggcaggtgtcagaactgggcaccaggactggagccccctccggagaccaaactcaccatccctcagtcctccccaacagggtactaggactgcagccccctgtagctcctctctgcttacccctcctgtggacaccttgcactctgcctggcccttcccagagcccaaagagtaaaaatgttctggttctgaaaa

SEQ ID NO: 70502 - DNA, 720 bp, Homo Sapiens
  misc_feature (73)..(73): n is a, c, g, or t
  misc_feature (447)..(473): n is a, c, g, or t
ggcacgaggcccaggcccagacgcaggcttcttctcctcgggtcttggtcctgcatcctctctctcccagagncctccgttagggggtgggaaaggactttgccataggtcgctgaggccaccatctgctctcttactggccaagggcgtaaaaagatagtcctcccattagctagagagcaaaccccagaaagcctattggctgcgccgtccgcgggccttggtccgctttgaaggcgggctgcggctgcgagaggagggcgggcgggaggctagctgttgtcgtggttgctcggaggcacgtgtgcagtcccggaagcggcgaggggaaactgctccgcgcgcgccgcgggaggaggaaccgcccggtcctttagggtccgggcccggccgggccatggattcaatgcctgagcccgcgtcccgctgtcttctgcttcttccctnnnnnnnnnnnnnnnnnnnnnnnnnnncggccccggagctgggcccgagccaggccggagctgaggagaacgactgggttcgcctgcccagcaaatgcgaagggacttgcggttaatcgaagtcactgagaccatttgcaagaggctcctggattatagcctgcacaaggagaggaccggcagcaatcgatttgccaagggcatgtcagagacctttgagacattacacaagctggtacacaaaggggtcaaggtggtgatggacatcccccta

SEQ ID NO: 70503 - DNA, 948 bp, Homo Sapiens
  misc_feature (63)..(89): n is a, c, g, or t
gggcccggcgggcatggattcaatgcctgagcccgcgtcccgctgtcttctgcttcttccctnnnnnnnnnnnnnnnnnnnnnnnnnnncggccccggagctgggcccgagccaggccggagctgaggagaacgactgggttcgcctgcccagcaaatgcgaagtgtgtaaatatgttgctgtggagctgaagtcagcctttgaggaaaccggcaagaccaaggaggtgattggcacgggctatggcatcctggaccagaaggcctctggagtcaaatacaccaagtccatttcagatcccccagaccagatgacctatcttccttccagctctgagtcacttcccattgggacttgcggttaatcgaagtcactgagaccatttgcaagaggctcctggattatagcctgcacaaggagaggaccggcagcaatcgatttgccaagggcatgtcagagacctttgagacattacacaacctggtacacaaaggggtcaaggtggtgatggacatcccctatgagctgtggaacgagacttctgcagaggtggctgacctcaagaagcagtgtgatgtgctggtggaagagtttgaggaggtgatcgaggactggtacaggaaccaccaggaggaagacctgactgaattcctctgcgccaaccacgtgctgaagggaaaagacaccagttgcctggcaggagcagtggtccggccaagaagggagacaacagctgccctgggagggaagaagtcccaagaaagaaggagcagcaggggccaaggcagcagtgcggcagggagtagcagcagcaaaacaaaggaaggaggccgggtgggccttgaggggggaaccccagcccgagggaggatgaggggctccagaaggccttcccttctcaaaagagccccgtttgaagtctgagccaccagatcctctgtctgagac

SEQ ID NO: 70504 - DNA, 1760 bp, Homo Sapiens
  misc_feature (147)..(181): n is a, c, g, or t
gagacagggtcctgctctgtcgcctaggctggagtgcaatggtgcatggtcatggcttgagcctggttaatttttgtatttttactagaaacagggttttgtcatgttgcccaggctgatctcaaacacctggattcaagcaatccnnnnnnnnnnnnnnnnnnnnnnnnnnnnnnnnnnnatgtgagccaccgcgcttggccacgattccgtgatggtcaaagaaatcaaaacgtctgtcagctagtgttcagttcaggctgaggtgaaaaaatttttttacttgtaaaatatacataacataaaacttggccgccgcgctccgagcccccattcccgagctgccgctgttgtcgctcgctcagcgtctccctcccggccgccctctcctcgggacgatggcgcgcggccgccgcctggggttagccctggggctgctgctggcgctggtgctggcgccgcgggttctgcgggccaagcccacggtgcgcaaagagcgcgtggtgcggcccgactcggagctgggcgagcggccccctgaggacaaccagagcttccagtacgaccacgaggccttcctgggcaaggaggactccaagaccttcgaccagctcaccccggacgagagcaaggagaggctagggaagattgttgatcgaatcgacaatgatggggatggctttgtcactactgaggagctgaaaacctggatcaaacgggtgcagaaaagatacatctttgataatgtcgccaaagtctggaaggattatgatagggacaaggatgataaaatttcctgggaagaatacaaacaagccacctatggttactacctaggaaaccccgcagagtttcatgattcttcagatcatcacacctttaaaaagatgctgccacgtgatgagagaagattcaaagctgcagacctcaatggtgacctgacagctactcgggaggagttcactgcctttctgcatcctgaagagtttgaacatatgaaggaaattgtggttttggaaaccctggaggacatcgacaagaacggggatgggtttgtggatcaggatgagtatattgcggatatgttttcccatgaggagaatggccctgagccagactgggttttatcagaacgggagcagtttaacgaattccgggatctgaacaaggacgggaagttagacaaagatgagattcgccactggatcctccctcaagattatgatcacgcacaggctgaggccaggcatctggtatatgaatcagacaaaaacaaggatgagaagctaactaaagaggaaatattggagaactggaacatgtttgtcggaagccaagctaccaattacggggaagatctcacaaaaaatcatgatgagctttgatagacactcaccagaatatggcagactgtcataggcattctgttattgtcttggattgttgctacaattgtctaatttacagcagttgtgatcccacaaaaagcaagtttatacctcagattggggtataaaaattgtttttcgctcagtatttactggaaaatggacatcactagtctttcagtaagatttctctcaaaacacgtgaaaaccttggtaaattgcaattctttctggggatatattggtacaacatgacttaaacttttttttgctattaaacttaaggggaacaaaacttgaaaagcctgttcttcagaaggtgagtgggttgagggaggcgaatttgagtgactgctggttttactaccaatt

SEQ ID NO: 70505 - DNA, 1515 bp, Homo Sapiens
  misc_feature (352)..(432): n is a, c, g, or t
cagtccggaattccctgcgatacctagcttcattcaccacctgatatttccaagctctgcttccgtgacagagaaactgcctgcagggtatctctcttttccaagagctactgacacacacacaatgcaaaaacgtttcctttttcttttccttgccattttgtacaatggggataatgacccatcttgtagaattgttataaggatgaaatataatgacaagtgaaagccctttggaaatgatataaacaatagtactaaacacagtggctaagactctgggttgaaagcagagtgaccatgttcctgtgcagcctccagctcatatgagctgtgggtcattgggtaagannnnnnnnnnnnnnnnnnnnnnnnnnnnnnnnnnnnnnnnnnnnnnnnnnnnnnnnnnnnnnnnnnnnnnnnnnnnnnnnnaaactgtgtgtagaacactttatacagtatctggaccatagtgttcaatgttagtcattattattagttttcgcttatgtagtgccagtttgggttgtagagggcttttacatcaaaatggcacatttgatcataatagccccatgatttataaattatcatctccattttacagacaaggaaacttcaggctcagtcactgaactaagtcaaaagccgggatttatcttttggcttctaaactcagttctttctactccaccacatggccttcatcatgaataaattactgcatcattatccccaagaaactgcctaccagctgtttgagttaggtctctggattggttgtcgcctttcctaaagctcaggaggtcaagtctgttttatgggggtgggggaggtttaccttcccactttcctttgtaaccaacaataaccttccctcctagcggatatgttttcccatgaggagaatggccctgagccagactgggttttatcagaacgggagcagtttaacgaattccgggatctgaacaaggacgggaagttagacaaagatgagattcgccactggatcctccctcaagattatgatcacgcacaggctgaggcccaggcatctggtatatgcaatcagacaaaaacaaggatgcagaagctaactaacgcaggaacatatcggagaactggaacatgtcagttggaagccaagctaacaattaccggggaagatccgcacaaacaatcatgatgcagctctgatagacactcaccagaatatggcagactgtcataggcatcctggtatgtcttggatgtggctacaattgtctaataacacggagctgtgatcccacaaaaaggcagttatactcaaatgggggactacacaatgcggcacgcgcagcactcaactggcacaacggaccacaactagacctgacggcagcatgccctgcaaacggtgaagacgctgtgaactagccagactacacgggcgaaactgggacacgactgagcaacaattaaagcaagaaactcaggggaacaaactgcaaaaccgcacgctcaaggggg

SEQ ID NO: 70506 - DNA, 1148 bp, Homo Sapiens
  misc_feature (270)..(278): n is a, c, g, or t
  misc_feature (1066)..(1080): n is a, c, g, or t
tggaccggtccggaattcccgggatatcgtcgaccacgcgtccggttattgtcttggattgttgctacaattgtctaatttacagcagttgtgatcccacaaaaagcaagtttatacctcagattggggtataaaaattgtttttcgctcagtatttactggaaaatggacatcactagtctttcagtaagatttctctcaaaacacgtgaaaaccttggtaaattgcaattctttctggggatatattggtacaacatgacttaaaacnnnnnnnnnctattaaaacttaaaggggaacaaaacttgaaaaagccctgttcttcagaaggtgagtgggttgagggaggcagtaatatgaagtgactgctgtgtattttaactaccagattttttatatttgccactgttaaatagttggaaaggggaaattctgattaagcgaaagtggtatcatcctaggtaagcttatttcagaacaagtctaatatttcagattctttcttttcgactttatactctgagttattacttactgtaagtggtgtatatgaaacctccatgcattttccagtatggatctgctaatatgcacagtaaatccatgtctttgtttgtttttctattaaaaagcaatcaagaaagataatgtgaaaaagaaaggaatttagaggtagggaaaagatgaatgtcagacatttgaagaactatagtaaaatgataaacactaaatatacttgagaaaactttcttaatatgccaatgaggtaggcctgatctttgaaatagtgaataggaatacaatgcatttcctcagtgatcactgattagaatgagttggtgggatccttgggaagccaaacggagcggagttctggatcatgtcccatccagtccagtgaatccacgacccgcagacctgcccccccgcaacagcttataccatggaatgaggacaaggtgatactctgagctgtggactgaactggcagacacaacctgtacagattgaaatttcaccttgtaaggaggaagtgaatgaaataaaggatccccctaaggatttnnnnnnnnnnnnnnngggcggcccggacgcgtgggcggacgcgtgggtcgacgatatcccgggaattccggaccggtaccagc

SEQ ID NO: 70507 - DNA, 979 bp, Homo Sapiens
  misc_feature (489)..(498): n is a, c, g, or t
cctgtggctatagaacagtgttgtaaaaaaagcaggcttgtacggtccggaattcccgggatatcgtcgacccacgcgtccgggcatctggtatatgaatcagacaaaaacaaggatgagaagctaactaaagaggaaatattggagaactggaacatgtttgtcggaagccaagctaccaattacggggaagatctctcaaaaaatcatgatgagctttgatagacactcaccagaatatggcagactgtcataggcattctgttattgtcttggattgttgctacaattgtctaatttacagcagttgtgatcccacaaaaagcaagtttatacctcagattggggtataaaaattgtttttcgctcagtatttactggaaaatggacatcactagtctttcagtaagatttctctcaaaacacgtgaaaaccttggtaaattgcaattctttctggggatatattggtacaacatgacttaaaacnnnnnnnnnnctattaaaacttaaaggggaacaaaacttgaaaaagccctgttcttcagaaggtgagtgggttgagggaggcagtaatatgaagtgactgctgtgtattttaactaccagattttttatattggccactgttaaatagtgggaaaggggaaattctgattaagcgaaagtggtatcatcctaggtaaagcttatttcagaacaagtctaactattttcagaattctttcctttccgaactttaatactcctggaagtttattacattactgtaaaggtggtggattattgaaaaccctgcaatggatttttcccggtatggatctgtaaatttcccagaaaatccctgtcttggtcggtttctatttaaaaggctccagaacgttttggcacacacacgacttcacgcgggacagtgtagtgccctttacaacttgctgacagtaaccaattttctaaaacttaaatcccggaggccttaa

SEQ ID NO: 70508 - DNA, 2099 bp, Homo Sapiens
  misc_feature (1440)..(1448): n is a, c, g, or t
gtggaccggtccggaattcccgggatatcgtcgacccacgcgtccgcccccttctgctgtcctttccccaacgtactgggtcccgagcgtggtgggtatttgccacactgggtgccagctcagcacccccccacctctctttattctctccaaagctggtctttctgactatcattgtggtagggggaggacagatgctaaaggtggaagctgacctggagaaagagacacacggggtgactgtggcaaaggacagctggaaaagaaactctatcacttcttcattggcaaccacaaggcacctgaggccatggcactcccagaggctgtgcgcagagccaagcctctcaacctcttctggccctgcgtcctgcagcgaagtctctgctgtaagacagtagactccttcgatgaggtgctcaaaaatgctacccggggtggtggtgtctggcttgcagtctggcccagttcagagaaagttgcagagatcaggggccaaggatgtcatagccccaggttgtcctcagggtcccaatcctagggcagggtgtgcatggaagcaagaactatagaaacctagctccagtctgcaggctctgagcccctagttcctcactccagcggggctccctcactgcacagaacccaccccttctgtgtgggcactgctgaccacacagatgacccagacccaaagagcctggcagaagctctgtggttggagctgggctccgtctccaggtctggttcagggggatcaggaaggctcttttccacctgtggcttcactggccctttgagatttcctatctcaccgttacttcagttacccttgcagggggccaagggagtcaagaatataccgttgttcctccagggtttaagccggccatgcccttcccgagagcataaccaacttgaacgggggtgcccagttaccccacaaactggagggaaggagatccttcccccggtccccaggagtgctctcaaccagccctcagaaagcttgagaagatggaccctttgcccaccagggttaattcctggtggggcagctcggctgtgatcagggcaaccaaacctataggaagccttccagtgtgagctggaattagactgaacatgtgcttgggcctgcctctccctagacgcagttgcggggcactccagggaatgaaccagctcaagtgtgtccctaacagcagcctggagctacccccaatccctcacagcctgaccctcctcattccatcagatgcatttgtagaatcggggcaaatttccttatttatttatggcccatgcctttccccctcttcatcctgatcccgttttgctttgaagagaccccagtaaccaaaaaacagcctccagaagccaaaaccatgcctggatctcccatagcttctcctttgcttccaggagaaagttcactgnnnnnnnnntatcttctggcttcttgtgtgtacagagacaacagaactcggtggggaaacgggaatcttttctgcaccaaagctgcttctaaagcagaaagcagtggggctcttggtgtttcatgctgccttatttatattaaaggaagaattaaatcttgcaaggagtagaaatggtcactgtttgtttttaacttcaggaaatctgtgaggctcccagggcagagttggggacaggggggtggatttcccattgacaaagcagaagctttcactccctttttattcttacactttcaggagactttaaaaaataacaaaacagaacatttctaccctgtctttgaggcaacttgtgtgctgcccgcagggctccagaaagggcctttgaaagctggctgtagggtggattccagcctaagaccttatttcacagagctaatgtcagcgagaaatataggagctggaactaacaggaagcttttgggttttaaagaaagagattgtattttaaatagaggattttgagtcctctaggggactttggcctttccactaaggacaaccctgccctctttccccagagtctctttcccaaggatgcttgactttccccagcaactgcccacttgctttgcaaaataacaagggtgaaatgaa

SEQ ID NO: 70509 - DNA, 696 bp, Homo Sapiens
gtgtgagccaccacacccggcctcagggcaattttgcataatagaaattcaagaaagactttaggaaatcagtacccccttctatgatgctgagaagtcaagatattagcttgatataaaagctagatattagcttgatataaaagactcagttctaatcaattagacatttgaaatgtcttagacaattgaaatcaattaggcaattgaaaatatgcacattaagagtcatggataattagaaatacacattaagagtcccaagagaaggactctgggtttccagcatccctttctataatgtaaaaggggtagaatataggtttaaagggagagaccatgaacattggaattttgcacattcatagtcccagggaaaggtaacataggtaattaatatcccttgctgtaaaacaaggaggataaaatggatctgatctgaaagacattgttgtgatcagttgccatggttcacattaactatcctagtgcaaaggtcttgactagaggtcatccactgctgaacactagggaagtgagtggggtctttagtgcacaggaagagggacaaatgcaagtagcacattaacagtacaaaagaaatgtccttgtgattagcaccctctactgtaatgctaagagggtgtgagcagttgggatcttaatttaatggaaaagaccataattgcaattatg

SEQ ID NO: 70510 - DNA, 583 bp, Homo Sapiens
cctcagcatctaagtcatttctggcaggtgagagggtgggacagctctagcagaatatgggtttaaaggggaaagcaactaataggagatgcagtggggtaacgggaaaagaacagttttaaggaagaggtggagctcaaaatctgagtgacccaaaggacagcttttgacttcaagaagtccttcttgtttgttggcttgcttccagcttacgttctttacatctgctggctcagcgcattgggcagctttcttcttttttctcagcgacaatcttttatcctatctgaccaggatttctctgctccccgatcactgagaaagcatgtattctcccagcttttcttcagtacttctgtcccctccctgaagtccctgaggggcaatgttccaggcaaggtcatcatcactgtcatatcttcgagggttgtcaaagaaataagatctgggactgaatccatggctggggaccattccagggttggtaaggtcctttgtaggatttctaactcggaagaaataaacgactaaggtggtaggtaagagttcccaaacaaataacaccactccaaataatacgtat

SEQ ID NO: 70511 - DNA, 1758 bp, Homo Sapiens
  misc_feature (1302)..(1311): n is a, c, g, or t
  misc_feature (1586)..(1595): n is a, c, g, or t
acaccgtgttctacgcgctgctcttcgtgttcatctacgtgcagctctggctggtgctgcgttaccgccacaagcggctcagctaccagagcgtcttcctctttctctgcctcttctgggcctccctgcggaccgtcctcttctccttctacttcaaagacttcgtggcggccaattcgctcagccccttcgtcttctggctgctctactgcttccctgtgtgcctgcagtttttcaccctcacgctgatgaacttgtacttcacgcaggtgcccctctacctggcctccctcttcatcagccttgttttcctgttggtgaatttaacctgtgctgtgctggtaaagacgggaaattgggagaggaaggttatcgtctctgtgcgagtggccattaatgacacgctcttcgtgctgtgtgccgtctctctctccatctgtctctacaaaatctctaagatgtccttagccaacatttacttggagtccaagggctcctccgtgtgtcaagtgactgccatcggtgtcaccgtgatactgctttacacctctcgggcctgctacaacctgttcatcctgtcattttctcagaacaagagcgtccattcctttgattatgactggtacaatgtatcagaccaggcagatttgaagaatcagctgggagatgctggatacgtattatttggagtggtgttatttgtttgggaactcttacctaccaccttagtcgtttatttcttccgagttagaaatcctacaaaggaccttaccaaccctggaatggtccccagccatggattcagtcccagatcttatttctttgacaaccctcgaagatatgacagtgatgatgaccttgcctggaacattgcccctcagggacttcagggaggttttgctccagattactatgattggggacaacaaactaacagcttcctggcacaagcaggaactttgcaagactcaactttggatcctgacaaaccaagccttgggtagcatcagttaacagttttatggacgattcctcagatgaaaagcttcagaaaagcatagtgacagctgaatttttagggcacttttccttaagaaatagaacttgatttttatttgttacaggtttccaatggccccataggaataagcaataatgtagactgataaacccttattttagtactaaagagggagccttgctatttcagtgggtataatttaaactttttaaagaaaatctgtacttttataaagatgtattttgtataacttaaataataatgctaaagtatactagggnnnnnnnnnncttgagaatgttactgcaatcatgttgtagtttgcacagacttttatgcataattcactttaaaaacatagaatatatggtctaatagttttttaaagcttttggactaaagtattccacaaatcttacctctttaggtcactgatggtcactccgattctgagtgccacattggtagactcctaaaatacagttgacaacttagccaattgcaactccagtgttgataattaaaatgaaatggtaaagcagcagactgtaaggtctttagagannnnnnnnnnaaggttcaggccgtaggttcctcaaggaatctcttaagttttgcccaaagactggtacttcctttcagtagggcgctaatgtatacacattaatgataagttgataacattaaaaatgtagctgacttatcctattaaacctcctctgctatgttcacagaaa

SEQ ID NO: 70512 - DNA, 1372 bp, Homo Sapiens
  misc_feature (201)..(220): n is a, c, g, or t
  misc_feature (1076)..(1084): n is a, c, g, or t
tcagtaactagtaggggttttaggtagcgaggcctgggtggcgaattcggcacgagggcagagccgaggtcgggccgcgagcggagccggctgagcgggcgccgagctcccgccatggcccggaacacgctgtcctcgcgcttccgccgggtggacatcgacgaatttgacgagaacaaatttgtggacgagcaggaggannnnnnnnnnnnnnnnnnnnagccaggcccggacccgagcgaggtggacgggctcctgcggcaaggggacatgcttcgggcattccatgcagccttgcggaactctcccgtcaacaccaagaatcaagctgtgaaggagcgagcccagggcgtggtgctgaaagtgctcacaaacttcaagagcagtgagattgagcaggctgtgcagtcactggacagaaacggcgttgacttgttaatgaagtacatttataaaggctttgagaagcccacagaaaatagcagcgcagtgttactccagtggcacgaaaaggccttagcagtaggaggactaggctccattataagagttcttacagcaagaaagactgtttaaaaaaaataaaaagactcatgttaccttgagaagaattctggatgcccaggctggtgaagaagggattgacaatggaccatcttcctaggaactcccaagtaaactatttcaggacatgtatctgctgaaatgtattttattttcaaggtggaggggaaaatcgtctgtttcctaaatcctgtttaggatctgatagtctatgcctttgtctccgagtactgcagaactgacattttgacggtctaccagcgtggcggctggtgttggtcagatgcacctgtgtgcactgggggagggatggtttgggcaggtgcagatccaagggctgtggtaaacgggagagcttgtgtttttgaagtggaaaaaaacccaagagtttgtacagacatcctgtcttcccagagaaggtggacactcttgggctcattgtaaagtgcctgctgcatcaataaagctcttggcttattagtctatacattgcggtgtgtttcgtgtatgtnnnnnnnnntggtaatgaatgggatggtaatgaatgagagttcagttgttgttccggaaacccgatgtggaaggagtagacctgtgtccctgttgagccacccctgggagcgagcatggcaatccacaggccctctgccacaggacgccagcctcggcctcagagctgccggctgctgcagagaggtgtttgctgaataaactatttattgtttcttattcctttgatttgtatgtaattaattttggagcttatttaattaatttaataaagtgccaaacatttaataattgaaaa

SEQ ID NO: 70513 - DNA, 891 bp, Homo Sapiens
  misc_feature (225)..(244): n is a, c, g, or t
  misc_feature (599)..(612): n is a, c, g, or t
gctggaccggtccggaattcccgggatatcgtcgacccacgcgtccgcggacgcgtgggagcaggagccggtgcgagcggagcagagccgaggtcgggccgcgagcggagccggctgagcgggcgccgagctcccgccatggcccggaacacgctgtcctcgcgcttccgccgggtggacatcgacgaatttgacgagaacaaatttgtggacgagcaggaggannnnnnnnnnnnnnnnnnnnagccaggcccggacccgagcgaggtggacgggctcctgcggcaaggggacatgcttcgggcattccatgcagccttgcggaactctcccgtcaacaccaagaatcaagctgtgaaggagcgagcccagggcgtggtgctgaaagtgctcacaaacttcaagagcagtgagattgagcaggctgtgcagtcactggacagaaacggcgttgacttgttaatgaagtacatttataaaggctttgagaagcccacagaaaatagcagcgcagtgttactccagtggcacgaaaaggccttagcagtaggaggactaggctccattataagagttcttacagcaagaaagactgtttnnnnnnnnnnnnnngactcatgttaccttgagaagaattctggaagcccaggctggtgaagaagggattgacaatggaccatcttcctaggaactcccaagtaaactatttcaggacatgtatctgctgaaatgtattttatttatcaaggtggaggggaaaatcgtctgtttcctaaatcctgtttaggatctgatagtctatgccttcgcctccgagtactgcagaactgacattggtcagatgcacctgtgtgcaactgggggagggatggttgggcatgtgcaaatcca

SEQ ID NO: 70514 - DNA, 914 bp, Homo Sapiens
ggggcttaggtaccagttagcgtcaggggagctgggtcaggcggtcgccgggacaccccgtgtgtggcaggcggcgaagcgctctggagaatcccggacagccctgctccctgcagccaggtgtagtttcgggagccactggggccaaagtgagagtccagcggtcttccagcgcttgggccacggcggcggccctgggagcagaggtggagcgaccccattacgctaaagatgaaaggctggggttggctggccctgcttctgggggccctgctgggaaccgcctgggctcggaggagccaggatctccactgtggagcatgcagggctctggtggatgaactagaatgggaaattgcccaggtggaccccaagaagaccattcagatgggatctttccggatcaatccagatggcagccagtcagtggtggaggtaactgttactgttcccccaaacaaagtagctcactctggctttggatgaaattcgactgcttaaaaaggaccttggtttaatagaaatgaagaaaacagactcagaaaaaagatttggctctgtctcatttggaagaagctgcaggcttattccccatgcacttgcttcctggctgcaaaccttaatactttgtttctgctgtagaatttgttagcaaacagggagtcctgatcagcacccttctccacatccacatgactggtttttaatgtagcactgtggtatacatgcaaacatccgttcaaaatctgagtcggagctcaaatgatctccaccgagcagctaactctggcatcctagcctgttgtccacatgatgtcacctccatggccgtgaagccattaaccaaagacattcctcaagaaagcgcgccaaggcggtagaaggatcaggcaatgatcagtttccatgatcat

SEQ ID NO: 70515 - DNA, 1043 bp, Homo Sapiens
tgggtccttcggcgattgaccgggatccttgctgttcgggagcctctcctaagctgcctgttcgcgcgagagtttggaggggcgggtttggggtcggtgtctgattggggctcgcaccgcagcacgctggagtcccgcttaggtaccagttagcgtcaggggagctgggtcaggcggtcgccgggacaccccgtgtgtggcaggcggcgaagcgctctggagaatcccggacagccctgctccctgcagccaggtgtagtttcgggagccactggggccaaagtgagagtccagcggtcttccagcgcttgggccacggcggcggccctgggagcagaggtggagcgaccccattacgctaaagatgaaaggctggggttggctggccctgcttctgggggccctgctgggaaccgcctgggctcggaggagccaggatctccactgtggagcatgcagggctctggtggatgaactagaatgggaaattgcccaggtggaccccaagaagaccattcagatgggatctttccggatcaatccagatggcagccagtcagtggtggaggtgccttatgcccgctcagaggcccacctcacagagctgctggaggagatatgtgaccggatgaaggagtatggggaacagattgatccttccacccatcgcaagaactacgtacgtgtagtgggccggaatggagaatccagtgaactggacctacaaggcatccgaatcgactcagatattagcggcaccctcaagtttgcgtgtgagagcattgtggaggaatacgaggatgaactcattgaattcttttcccgagaggctgacaatgttaaagacaaactttgcagtaagcgaacagatctttgtgaccatgccctgcacatatcgcatgatgagctatgaaccactggagcagcccacactggcttgatggatcacccccaggaggggaaaatggtggcaatgccttttatatattatgtttttactgaaattaactgaaaaaatatgaaaccaaaagtaccacacaaac

SEQ ID NO: 70516 - DNA, 549 bp, Homo Sapiens
  misc_feature (31)..(31): n is a, c, g, or t
  misc_feature (38)..(38): n is a, c, g, or t
  misc_feature (120)..(120): n is a, c, g, or t
agctggtaaggaaggcaggatgtcatgaatnagagaantgaatcacagcaatggtgctccctgcctaagatgcctcctctcttgtgtgtgtccttaggagaggtatgcaaaatgctttgnccaagtcaaaatcccagggatccttagagctgtgctggtatttctgataggtgagtgggacagagatttgtttttagaaaaacctttttcaggaatgaattaatggcatttgcagtgacctggatgagattggagactattattctaagtgaagtaactcaggaatggaaaaccaaacattgtatgttctcactcataagtgggagctaagctatgaggatgcaaaggcataagaatgacacaatggactttggggactcaggggaaagggtgggaagggggtgagggataaaagactacaaattgggtacagtgtacactgctcaggtgatgggtgcaccaaaatctcacaaatcaccactaaagaacttactcatgtaaccaaacaccacctgttccccaataacctatggatataaaaaaattaaa

SEQ ID NO: 70517 - DNA, 1856 bp, Homo Sapiens
  misc_feature (1841)..(1841): n is a, c, g, or t
aacttaggctagtacgagccgggtgttgaatcggccgaaggttcttcccttatgatgaaatcgagacagaagctgttctggccattgatgatgatatcattatgctgacctctgacgagctgcaatttggttatgaggtctggcgggaatttcctgaccggttggtgggttacccgggtcgtctgcatctctgggaccatgagatgaataagtggaagtatgagtctgagtggacgaatgaagtgtccatggtgctcactggggcagctttttatcacaagtattttaattacctgtatacctacaaaatgcctggggatatcaagaactgggtagatgctcatatgaactgtgaagatattgccatgaacttcctggtggccaacgtcacgggaaaagcagttatcaaggtaaccccacgaaagaaattcaagtgtcctgagtgcacagccatagatgggctttcactagaccaaacacacatggtggagaggtcagagtgcatcaacaagtttgcttcagtcttcgggaccatgcctctcaaggtggtggaacaccgagctgaccctgtcctgtacaaagatgactttcctgagaagctgaagagcttccccaacattggcagcttatgaaacgtgtcattggtggaggtctgaatgtgaggctgggacagagggagagaacaaggcctcccagcactctgatgtcagagtagtaggttaagggtggaaggttgacctacttggatcttggcatgcacccacctaacccactttctcaagaacaagaacctagaatgaatatccaagcacctcgagctatgcaacctctgttcttgtatttcttatgatctctgatgggttcttctcgaaaatgccaagtggaagactttgtggcatgctccagatttaaatccagctgaggctccctttgttttcagttccatgtaacaatctggaaggaaacttcacggacaggaagactgctggagaagagaagcgtgttagcccatttgaggtctggggaatcatgtaaagggtacccagacctcacttttagttatttacatcaatgagttctttcagggaaccaaacccagaattcggtgcaaaagccaaacatcttggtgggatttgataaatgccttgggacctggagtgctgggcttgtgcacaggaagagcaccagccgctgagtcaggatcctgtcagttccatgagctattcctctttggtttggctttttgatatgattaaaattattttttattcctttttctactgtgtcttaaacaccaattcctgatagtccaaggaaccacctttctcccttgatatatttaactccgtctttggcctgacaacagtcttctgcccatgtctgggaacacacgccaggaggaatgtctgataccctctgcatcaagcgtaagaaggtcccaaatcataaccattttaagaacagatgactcagaaacctccagaggaatctgtttgcttcctgattagatccagtcaatgttttaaaggtattgtcagagaaaaacagagggtctgtactagccatgcaaggagtcgctctagctggtacccgtaaaagttgtgggaattgtgacccccatcccaaggggatgccaaaatttctctcattcttttggtataaacttaacattagccagggaggttctggctaacgttaaatgctgctatacaactgctttgcaacagttgctggtatatttaaatcattaaatttcagcatttactaatactgcacatgtgtgaattatacctctttaagcccagctgatgaacaaatctaccctggcgaatggtaaatgntatggattcgaaaca

SEQ ID NO: 70518 - DNA, 2083 bp, Homo Sapiens
  misc_feature (1758)..(1781): n is a, c, g, or t
cagtcgacggtaccggacatatgcccgggaattcggccattacggccgggggtcgttcgggtgagcgaagatggcggccgagagggaacctcctccgctgggggacgggaagcccaccgactttgaggatctggaggacggagaggacctgttcaccagcactgtctccaccctagagtcaagtccatcatctccagaaccagctagtcttcctgcagaagatattagtgcaaactccaatggcccaaaacccacagaagttgtattagatgatgacagagaagatctttttgcagaagccacagaagaagtttctttggacagccctgaaagggaacctatcctatcctcggaaccttctcctgcagtcacacctgtcactcctactacactcattgctcctagaattgaatcaaagagtatgtctgctcccgtgatctttgatagatccagggaagagattgaagaagaagcaaatggagacatttttgacatagaaattggtgtatcagatccagaaaaagttggtgatggcatgaatgcctatatggcatatagagtaacaacaaagacatctctttccatgttcagtaagagtgaattttcagtgaaaagaagattcagcgactttcttggtttgcacagcaaattagcaagcaaatatttacatgttggttatattgtgccaccagctccagaaaagagtatagtagggatgaccaaggtcaaagtgggtaaagaagactcatcatccactgagtttgtagaaaaacggagagcagctcttgaaaggtatcttcaaagaacagtaaaacatccaactttactacaggatcctgatttaaggcagttcttggaaagttcagagctgcctagagcagttaatacacaggctctgagtggagcaggaatattgaggatggtgaacaaggctgccgacgctgtcaacaaaatgacaatcaagatgaatgaatcggatgcatggtttgaagaaaagcagcagcaatttgagaatctggatcagcaacttaggaaacttcatgtcagtgttgaagccttggtctgtcatagaaaagaactttcagccaacacagctgcctttgctaaaagtgctgccatgttaggtaattctgaggatcatactgctttatctagagctttgtctcagcttgcagaggttgaggagaagatagaccagttacatcaagaacaagcttttgctgacttttatatgttttcagaactacttagtgactacattcgtcttattgctgcagtgaaaggtgtgtttgaccatcgaatgaagtgctggcagaaatgggaagatgctcaaattactttgctcaaaaaacgtgaagctgaagcaaaaatgatggttgctaacaaaccagataaaatacagcaagctaaaaatgaaataagagagtgggaggcgaaagtgcaacaaggggaaagagattttgaacagatatctaaaacgattcgaaaagaagtgggaagatttgagaaagaacgagtgaaggattttaaaaccgttatcatcaagtacttagaatcactagttcaaacacaacaacagctgataaaatactgggaagcattcttacctgaagccaaagccattgcctagcaataagattgttgccgttaagaagaccttggatgttgttccagttatgctggattccacagtgaaatcatttaaaaccatctaaataaaccactatatattttatgaattacatgtggttttatatnnnnnnnnnnnnnnnnnnnnnnnntctgacattttattacaagctgcatgtcctgaccctctttgaattaagtggactgtggcatgacattctgcaatactttgctgaattgaacactattgtgtcttaaatacttgcactaaatagtgcactgcaagaccagaaaattttacaatattttttctttacaatatgttctgtagtatgtttaccctctttatgaagtgaattaccaatgctttgaataatgttcacttatacattcctgtacagaaattacgattttgtgattacagtaataaaatgatattccttgtgaaaaaaaa

SEQ ID NO: 70519 - DNA, 2654 bp, Homo Sapiens
  misc_feature (35)..(36): n is a, c, g, or t
  misc_feature (60)..(60): n is a, c, g, or t
  misc_feature (66)..(66): n is a, c, g, or t
  misc_feature (92)..(92): n is a, c, g, or t
  misc_feature (760)..(768): n is a, c, g, or t
  misc_feature (927)..(936): n is a, c, g, or t
  misc_feature (976)..(984): n is a, c, g, or t
gtagacactggagacaatactgactccagcatgcnntcatggaagtaggatctggttctntgttcntattccctcagctaatcccaacctgngaatcagagaagtcttggggatttttctcatttttagtactatttcagggtttatgagcataaaaagttatccattggggagctccattttccctgctgagtgagctagattgccttccccacccacccacttaagtctgtcttaaagccgtagctggctcccaccaccagtaccatctccatttgaatggcagggctaaattcccccagccattatctcacactgaccacccagagctttagaagagagctgtgcttctaattttgacccagaaaaccataccccttgagattttacctagaggctaaccaagagcctaatatgtttctctgggggatgactaaagccaaaaaggctgtgagatgaaacatgtgaaataatattcagtttccttaccattaccagctcagaagtagctagaggctttctacccaaaggatgccaaagtatagcagggcaggcctggagctagggccttcacatggtggtagcaagtttttcaaatctaatacaatcaagtacaatacttcctttaaatgcttctgtggacctggcatgaaagatccctagattgaaaggaataatacctccatgtctcctgtatgttgagtctagaattgctgtgttgttcttagaagcagtctttgggcaacaacttgaaaggggnnnnnnnnnctacaaaaacttaactttggtataggccaagtcagggagaaagtagagaaagctgtcatgccacagacttctttagtggagatcatttcctttttaactttgttcaggttgcccttcaccatggatacagtccggtacccttaaacatttaagggctgnnnnnnnnnnctttacatgatgttcagcttggtattaaccaaacttaaannnnnnnnnccagaagtattaaaatttagtcaaagcaagatgaagtcttttcccatgaatgtgtccccttatctcattatagcttatgctcagtttcactttcttggaaaggttaaaacaaattagcctggcactttaggtaacttgaaaataactctcacccttctgactgccttccatccactctcaccccacacctttttttaatatatatacaccctttacagatttttctaacaaccaaattaaaattctagcaataaatggaattatactgctatattggtatatactgtaccataaatagtatgtctgtacctggaaggtatttttttgagaactgatttatatgaaatatacttgagggtaatgtagcttgtcctttttagtttcaaattcttattcataggcagatactttgaagacaccttaactctttgttgtgtgtattttcccttgcatcagataactatacatggagaaatccattttgtttttcggtttatcttctgttcttcctaccttgtgcttgtctgactagtatcacccctgagccagtatacagtaaccatcctctccccctaccaagtttggcagaggtgtttatactgcattctcagatctatgaatatttttgtcatcctgcctgagaaagtacatcttccaggcaaaagtagggtatcttgaactcctttcttctgagttgagcagactcactggcttaagcatcccataagcctattatttagtgtgaatttgggacttttatttgtatgttgacttaacttactgagcctgtgacttgtatttagctgtagtcaagcctcaccagccatatctcatctctgagaggaagactggatagtgagtttggttttggttttggatttaaacccttttaccttttcagtctggaagctcctactgctgctttcctaagttactcaaagcactgcttcttggcccttgattttcttttgccttgtactatcttgtataatgtttactaaaagagcctccccataaatcagagaggcaaaaaggtagcatataaaaagaagaaccaaaagaagagaaaacctgacttctagatgactgtggtgtcatctaaaaggcagaggtgcctgaccctcaggaatgtgtatgatgcaacagagctgaagaatgggttcccttcacctactgctggccattgtcccttctgttggagattcctttctttatggttgctgttcataaccccttcaacacccccccttgctggtcctgccggtcacagttgaggattttggctgtgatgggctcatactcataatggcctgttgagttgtttttagtgacaggttttgtttgctgcacacctcattggcttgcttaccaacaccagctagaagtggtccctctttcatatccaaaccagaacacatttgggtattcctgagactttatagagcgtgtattgtttgttatacgaacctaacctaccttgttgttttctcatattaagaaatttaaatctactttgttttagtgaagctattttggtaatgtataagcaattttggttctgtttagggagaattcagggtttccatgacttgatttgagctttgcatatttcaaataagtaacacagccattttaatttagctaaataaaaaaatttcttttttctctca

SEQ ID NO: 70520 - DNA, 906 bp, Homo Sapiens
  misc_feature (895)..(895): n is a, c, g, or t
gcacgaggcatcgagcaagggtcttcccatgactgtaaggtagtgatgtttcctcttcctccacagcccaggcttgcatccctccctgcggtctccaggagttcgcccggcgtttcctctgcagcgggtgctactctagggtctgcgacctcccgctggactgcccagttcaggatgtgacagtgactcggggcgaccaggctatgttttcttgcatcgtaaacttccagctgccaaaggaggagatcacctattcctggaagttcgcaggaggaggtctccggactcaggacttgtcctatttccgagatatgccgcgggccgaaggatacctggcgcggatccggccggctcagctcacgcaccgcgggacgttctcctgcgtgatcaagcaagaccagcgccccctggcccggctctacttctttcttaacgtgacgggcccgcccccgcgggcggagacagagttgcaggcctcgttccgggaagtgctgcgctgggcgccgcgggatgccgagctgatcgagccctggaggcccagcctgggcgagctgctggccaggcccgaggctctgacgcccagcaatctgttcctgcttgcagtcctcggggccctcgcatcagcgagtgcgacagtgttggcgtggatgttctttcgatggtactgcagtggcaactaacaaaggtatctttcctccttccctatcctatttccatcctgaaaataaagaatatatttcaactctagattgtttcatctccgaaggtggtcactactaactcaggtaggaggagctgcagcaagcccacacatgcccagatgaatatggcccgcataatgacagtgataggcatagctatcccagtgcaagttaggtgggaacccagatacccnctcaggttact

SEQ ID NO: 70521 - DNA, 1051 bp, Homo Sapiens
ttcggtgtctctatccacctttccactccggcctccatcctgtttccaccgactttgtatctcaccttatcctaacttctatttaccaccatttttcttaaaggagaactttagttctaagatgctttggaaggcgagactggccagttagagtcagatgcaacagggcttcgcggtcggtgagcttgctttgcacacctgtgttggtgctgtcccctgccgcccctccctgtggcagcagcaggacaggtgtgtgcccagcaccctccctacctgggcctggaagcagatgaggggaatacttcatgcaaagaaaaaagtaacatgtgcaaaagctccccgtccagctttgacagtcagtttcgatgtcagctcctcggcagggtaggcctgatgacagccctgtccctccctgcctctgccttgcccaaggccacggagggcgtctgcagagaggcctgccttccggattccaggcgggcatgccctgcaaaccccgcctgggcctcccttggtctgcccagccctcggttagccctgcctgaatcagtagatacttgaacgagtccccagtctgcgggaggcagtggtggggccatggacccatgcggggggttccagggtcacacgccacataacagacaaaaatacacacacgtgtgtttttctttgcaatacttgaaatattgccactgtgcttggacttagaagaagaaaatccccgtgacttcttcctcatcaccttgatggctttattctcaccttgtggggcatgtttgtatttattgcttcatggccgactggaatcctgagtcctgggaagctggcactgcggggatcttgcccggtgtcctggtcctcttgcttccgtcgcggccgcatgtgcgtgtgtccaagcaggtcctgggcgcctcaactgctgcccctggttgaatgttctcttgatagtgctggaccctttgtctattttaaagcgaattttgtgtgatttcctgccctttgcgttatattgtataataccaacgtaaggaaataaacctttggaattgtt

SEQ ID NO: 70522 - DNA, 567 bp, Homo Sapiens
ccgtaacattgtctgctgcaatttaaataaaaattacgacattttaagatatttcatagacaaaccaaacaaaaatatatgtttttactttaaagtgaatgtttttctcttcagctgatctaaaaatgaaagcaagatatcttatgtagaaatattttgataatatttttacagtgagctttcccatgtttttatgtcttaagtttctttgctgcgtttatgtaggttgcacaagaacttttactcacttgtaattgtgcctcagactttttgaaagtctaccttctaaattgccccgacgatctagattctacatgttaccattggtttattcttgtgctttctgtatttaaaactttggctgtactaagcaaatgcaaggttataatttagctaatagtagtttacagacaattctgatgattatgatttcatttggtttaactaagctgtactagttcatttcataaggaaatgatactgtagacaaatgtaaataaagcctgtgagtcaagcatcaaagtggtgtttgttagaaataaactagagatttttaaactctgaaaa

SEQ ID NO: 70523 - DNA, 1230 bp, Homo Sapiens
  misc_feature (113)..(113): n is a, c, g, or t
tcgttattgttgattgcgatacatcaacagacgttgactgtcgattatcgatcattaggattgctggagccagatcgcagaggcgtacgttcatggaacacagtggccatccngacttcagaggcagagtccgatttctgctgctgcctgcagaccccactgttctggatgaccaccatcactgattcggaccatgacgcctgcagatccatcatgagtttgagggtgtatgatgctgtcagccatgactcagactcattcagcaggtgcacaggaaatttgggtctgtgagaagcagacaatcaccaagtggcctggagacatcctggcttacaaggagcacctcaagtccaagctggtggatgaggagccccagctcaccaagaggacccacaacgtgtgagccctctacctgggttcgggtcaggagctccatctgggaactaacagctgctaacctgaccagccgctcaggacaggaccctggggctacactcctgcattgctgcaatactgctcccccagcctctcccctgcccctcaacctgccttagctgcactctcttacctacagctggacagtacctgtctgtttcctgtcctccttccagttacatctgtccatgtctggactcggctggccgttccctccagccccttgctggttatcttactctgagtgtgatgcagtcagaggcacctgcgggttagcccaggggcccaagccctggatttggcctgcggaggagcttaggatcctcgttttctgggttttggtgatgttggaggagtaccccccagcccaccgccccgattcctttttgcttctggtttggagctccggaccaggaccttcgtcctggtcagtttttaaataattatttagcagtgtaacttttaaacctgcgtgacatctacaaagcgcccaataaagaaagaggaagccacggtccctaccttccttctcgggtctctggggccttctcctccctgcagtgccaacatgcactgcccacagcaggagctggatccagcgtcagtgtgtcgatggggactgaagactagtccataggagctgggaagaactttgtccctttacttcggatttgaaatggtaccttttctcaggcctggtggatcacagactttaacatggatcagaaatcccctgggagggctcatggaatcagattgccagatctcgcctcagcgtttctggggtcaaatagg

SEQ ID NO: 70524 - DNA, 720 bp, Homo Sapiens
gggattggctggtgagccggccgcacgcggaggatcctaaggagcagctcggcacgagacataggccgagcagcgaggcccagctccctgaaacaacagtaacctacccctgtgggtcatcatcatgccctccgacctggccaagaagaaggcagccaaaaagaaggaggctgccaaagctcgacagcggcccagaaaaggacatgaagaaaatggagactgttgtcacagcaaccacaggtggcagagaacgaatgacggccaactggcacgagagaccacagaagtagattcgctgaccaaggagctagaggactctagagactgaagaaagctgcctgctcgagctgtcactggcgtcctggcctctcaccccaacagatactgcatgtccacatcactcaacctctcactcacctttcactggctcaagagctgctcaagatgacaccaaactggaatcaaactcaggccgtcgttcatggcctcatatgcgctacaaatggaatcggaaagtccatgctgctctctgactcatcgggcaagcgatgaagtgacccatccctgaacacatcgacatctaccatctgactcgagagatgccccctagtgacaagacacccttgcattgtgtgatggaagtcgacacagagcgggccatgctggagaaagaggcagagcggctggctcatgaggatgcggagtgtgagaagctcatgg

SEQ ID NO: 70525 - DNA, 2351 bp, Homo Sapiens
aaggaagcgaggcctgggtggcgaattcggcacgagggagcagcgaggcccagctccctgaaacaacagtaacctacccctgtgggtcatcatcatgccctccgacctggccaagaagaaggcagccaaaaagaaggaggctgccaaagctcgacagcggcccagaaaaggacatgaagaaaatggagatgttgtcacagaaccacaggtggcagagaagaatgaggccaatggcagagagaccacagaagtagatttgctgaccaaggagctagaggactttgagatgaagaaagctgctgctcgagctgtcactggcgtcctggcctctcaccccaacagtactgatgttcacatcatcaacctctcactcacctttcatggtcaagagctgctcagtgacaccaaactggaattaaactcaggccgtcgttatggcctcattggtttaaatggaattggaaagtccatgctgctctctgctattgggaagcgtgaagtgcccatccctgagcacatcgacatctaccatctgactcgagagatgccccctagtgacaagacacccttgcattgtgtgatggaagtcgacacagagcgggccatgctggagaaagaggcagagcggctggctcatgaggatgcggagtgtgagaagctcatggagctctacgagcgcctggaggagctggatgccgacaaggcagagatgagggcctcgcggatcttgcatggactgggtttcacacctgccatgcagcgcaagaagctaaaagacttcagtgggggctggaggatgaaggttgcccttgccagagccctctttattccggcccttcatgctgctcctggatgagcctaccaaccacctggacctagatgcttgcgtgtggttggaagaagaactaaaaacttttaagcgcatcttggtcctcgtctcccattcccaggattttctgaatggtgtctgtaccaatatcattcacatgcacaacaagaaactgaagtattatacgggcaagaaggatcagtacgtgaagacgcggctagagctggaggagaaccagatgaagaggtttcactgggagcaagatcagattgcacacatgaagaactacattgcgaggtttggtcatggcagtgccaagctggcccggcaggcccagagcaaggagaagacgctacagaaaatgatggcatcaggactgacagagagggtcgtgagcgataagacactgtcattttatttcccaccatgtggcaagatccctccacctgtcattatggtgcaaaatgtgagcttcaagtatacaaaagatgggccttgcatctacaataatctagaatttggaattgaccttgacacacgagtggctctggtagggcccaatggagcagggaagtcaactcttctgaagctgctaactggagagctactacccacagatggcatgatccgaaaacactctcatgtcaagatagggcgttaccatcagcatttacaagagcagctggacttagatctctcacctttggagtacatgatgaagtgctacccagagatcaaggagaaggaagaaatgaggaagatcattgggcgatacggtctcactgggaaacaacaggtgagcccaatccggaacttgtcagacgggcagaagtgccgagtgtgtctggcctggctggcctggcagaacccccacatgctcttcctggatgaacccaccaatcacctggatatcgagaccatcgacgccctggcagatgccatcaatgagtttgagggtggtatgatgctggtcagccatgacttcagactcattcagcaggttgcacaggaaatttgggtctgtgagaagcagacaatcaccaagtggcctggagacatcctggcttacaaggagcacctcaagtccaagctggtggatgaggagccccagctcaccaagaggacccacaacgtgtgagccctctacctgggttcgggtcaggagctccatctgggaactaacagctgctaacctgaccagccgctcaggacaggaccctggggctacactcctgcattgctgcaatactgctcccccagcctctcccctgcccctcaacactgccttagctgcactctcttacctacagctggacagtacctgtctgtttcctgtcctccttccagttacatctgtccatgtctggactcggctggccgtttccctccagccccttgctggttatcttactctgagtgtgatgcagtcagaggcacctgcgggttacccagggcccagccctgattaggctgggaagagcttagatcccgttactgggtcagggatgtcggagagtacccg

SEQ ID NO: 70526 - DNA, 716 bp, Homo Sapiens
atttccatatttatcagctgctgttaatcaaacaagtgcttataaaaatggaaattgggacaaaggaaatgttaaatttcctccctgcaaccaggcagatgagaaatatggaaataaggaaaagggaaaatgaagatatgacaaagttgatgaaaaggttgaaatagtgatttatacatgatgggcaatcaagtgccccttttgccctgttttttggagagggtgtatcattgcctcaatggtgcgtctgcctgcactgagggcattacacatggctgactcgacctccctgcctctcacactctgtgtattttgtgaagctccacaaacggggtcacgtcatccaggtgaggccaccaccggtacagaaacctctcggcaatggttcttagccagggggtgactttgacttcacccctcgcctccctctccagcagctcccacagctcctcctgggacaggtagaggatgcttttcgtttcactgggatccgggttcagagtgacgtttttcctcacaagcagaaggtaacaaatttcatgctctccccaaattctgtctgattttgccttgtggtgatagattgtcatgaacacaatgtcctctggagaaatctattgacagaaattggtgcagtgttaacaacgctaatgtaaaacacagaatttacagaaaaatagagaaaataaacacatttgttttcctcagaaaatgaa

SEQ ID NO: 70527 - DNA, 532 bp, Homo Sapiens
  misc_feature (333)..(377): n is a, c, g, or t
ctgcctttcttcccctcaagtcaacttttgtgctccagaaaattttctattctgtaagtctgagcgtaaaacttcaagtattaaaataatttgtacatgtagagagaaaaatgactttttcaaaaatatacaggggcagctgccaaattgatgtattatatattgtggtttctgtttcttgaaagaatttttttcgttatttttacatctaacaaagtaaaaaaattaaaaagagggtaagaaacgattccggtgggatgattttaacatgcaaaatgtccctgggggtttcttctttgcttgctttcttcctccttaccctaccccccactnnnnnnnnnnnnnnnnnnnnnnnnnnnnnnnnnnnnnnnnnnnnntttctataaaacttgaaaatagcaaaaaccctcaactgttgtaaatcatgcaattaaagttgattacttataaatatgaactttggatcactgtatagactgttaaatttgatttcttattacctattgttaaataaactgtgtgagacaaacaa

SEQ ID NO: 70528 - DNA, 1353 bp, Homo Sapiens
  misc_feature (45)..(45): n is a, c, g, or t
  misc_feature (264)..(299): n is a, c, g, or t
aatactgtagaggcatgtgtgtgtgttgctttaaggaagctgttntggtaataaaaagtcactgagggtcataaattcatgttaacacatccagtgtacatgaagtaggcaccgagttaaactatttgtctactatatagcatgtcatcttaaaagccttattttttcctcaaaatattaactttatttttctccctgtaaaatcaagacacagttaaaatgtagccttcctcattttctgggaatactttctaacaagatatnnnnnnnnnnnnnnnnnnnnnnnnnnnnnnnnnnnntctaacagtgcataaaagaggcaaccccaaaagtgtagcaggtactgaataacagatttgcagccttgggtatccacattaaaatttgaaatctaagtgaattacttcaagctgatttcttaggtcaaggagagattatggtccttaaatgcctgataaggtcacatacacaatttcaagtgcattatagtaaatccatgtgacagctcctacagctactaacctgcttctgccctcacggtagcgtgcacaatcttcatcgcatgtcctgggtggtggtaggagcagtagaaaccccctgggtcatgtcagatttagaaaatataagcaatggctcatacacgaattttaagttgtaacctacatgtgataagttgctttatcttccaaatgtaataaaaaccagaagttactttgaaataaattgaaggattagcagtggtgactgaggaataaaaattataatttaaaattgtccttaaggctggaattcttaacttattgaccttatatcctacatattataggactttgtaaatttaggctgatatggaaatgtatatttatatcaaatttaaatttttagaatgatggtgctactatattctaattgttaatttgataattgtaattgtaatttgttaatttgttctaataatattttcatgacattattcatttgctgcttggcttgatggcataacaagtatgggttatttaccctgaaaaggaaacagtatcacccttccagaatctctatttacagctacagaagatgcaacacacctgtttctggaccacttccagatcagatgtgatgcatgctttagatcatttactttgatctaggaattactgtctggcatttcgtggtgtagggtaggtgtctccagcactgtataggtgtctggaattgagataagaatcaatttcaatacaaaatacattttttgcttaaagcacgcaaggattctatgaattcaggtaaattcacagggtggaaaacaggaactaatgttatatattcctgtagttatcttcataaaaaaacaaa

SEQ ID NO: 70529 - DNA, 471 bp, Homo Sapiens
  misc_feature (288)..(347): n is a, c, g, or t
catgcccgtcagtatgggctttatgtttcccaactggcccacaggccagagcggcatgtatcgacactgatcaggccctgctggcccaggtccctgtgcgcatgcacatcgaggggtcaggaccgctccctagggtccctcctgcccaacatgtggaggtggctggttcccatgaacgtggttgtcagaggcgggggacagcagaggctgcagactggcccacttccctcctccccagggatgccaagcttggatcatggccctaatcccaaccccaaccccatgggnnnnnnnnnnnnnnnnnnnnnnnnnnnnnnnnnnnnnnnnnnnnnnnnnnnnnnnnnnnnccaggtcctggtggagcctttgcccagcccagtcctctctgcctcctcctggctgaagctgtttgtcaggattaccctcgggctaaagaggaaaaataaagatgttgagctaccactctggaaa

SEQ ID NO: 70530 - DNA, 793 bp, Homo Sapiens
ggctccgaattttggcgtgaggaaccgctgatcggccacgggcgccgaacttgctggcctccggcatgtgcctgagcggcggcggaaaaaccaccttaattggggcggagggttagttttaagagcaaagggcctttactaaaatggcgaaggccttccgtcggcgttgtttaaaaatgggaagcctcgaccctgtattgaaactgagctgttcgaaggcggcgttgtgtgcaattcggattaatgaaggcgaagggttttgtgtggaaaaacgccttggagtgtgacatttctgcgagaatgcttaaataccgatttcccgcaggaacaatggcgctgtcttaagtggcacagtggagcagctctgaagatgcaaagatacacgaaaaaacttccagaacatctgggagaatatttaatggaaaatcgcttggttaaaacctgacacttttaacagtgaacagcgttctgagtgtggacgagtagccagtgaagataatgaatgtcgaatgtgactgactagcagcttcattttgaatgagggtcgctgtctgcccattgatagaggccagattgtcttggaagttccaaagttgcaacgatttctggctagtgccacgaggtttacttgactgttgtgtgaaaagctgataagaaaaccatccagaaaaaagctcttcgttttacaaacatgaaaataaaacatgtaattttggattatgttcctttttgttattacttttaaataggtcctgaaataacatggggagcattaaatggaaaatccactaac

SEQ ID NO: 70531 - DNA, 1036 bp, Homo Sapiens
  misc_feature (59)..(59): n is a, c, g, or t
  misc_feature (120)..(508): n is a, c, g, or t
  misc_feature (531)..(540): n is a, c, g, or t
taagtcggtgggttcccccctctgattagctcgatttgtgtgctctcaaggggcggacntatgaaaaccccagcacggcgcctttacggtcctgccctttgctgccttttctcacatgtnnnnnnnnnnnnnnnnnnnnnnnnnnnnnnnnnnnnnnnnnnnnnnnnnnnnnnnnnnnnnnnnnnnnnnnnnnnnnnnnnnnnnnnnnnnnnnnnnnnnnnnnnnnnnnnnnnnnnnnnnnnnnnnnnnnnnnnnnnnnnnnnnnnnnnnnnnnnnnnnnnnnnnnnnnnnnnnnnnnnnnnnnnnnnnnnnnnnnnnnnnnnnnnnnnnnnnnnnnnnnnnnnnnnnnnnnnnnnnnnnnnnnnnnnnnnnnnnnnnnnnnnnnnnnnnnnnnnnnnnnnnnnnnnnnnnnnnnnnnnnnnnnnnnnnnnnnnnnnnnnnnnnnnnnnnnnnnnnnnnnnnnnnnnnnnnnnnnnnnnnnnnnnnnnnnnnnnnnnnnnnnnnnnnnaagaattcggcacgaggcgaagnnnnnnnnnncagtgggaacagagttgtcacctacctaacagggctctgagagagccgggaggcccaaagtggctggaagaaggtaaaggaaaaatcctgtcttgggctcaaggtcacagagtggggcccagggggagttcctgctgagggcagggccttgccaggcttcagtctccagtgccaaaggaggaaatgcccaggctgtcagcatttccagatgagagcagaagggagaagcttaaacccaagtcacacatccagcaatggagtccgacagcccagcaccatctgggaactgagaagcacctctgcccggcccccacaccgtgtggaaagtgaggagcacctctgcctggccgccaccccgtctggcaagtgaggagcgcctctgcccggccgctgtgcaaccttccaagtgtgaagtgacagccttgtgtgtgatgttttctgccttccccaagtttgcactttcgacattaaagtttactttttagttaaaagtttt

SEQ ID NO: 70532 - DNA, 1470 bp, Homo Sapiens
gggacttgccggaagtgcctttccagtggacctgggctgttgttgcggttgttttccttctctccgtgcaacgctggcaagtctcaaagtcgccacagaaacatgcccctgattcagtgcctctgcttagctgtaacatgttaatcagaactacctggcatcttcctgaacaagactttcaataggggccagtatgcttcgcttcatccagaagttttctcaagcatcttcaaagatactgaagtactctttcccagtgggactaagaaccagcagaacagatatactttctctcaagatgtctctccagcaaaacttttccccatgtccaaggccttggctttcctcatcatttccagcgtatatgagcaagacacagtgctatcatacatccccctgcagctttaaaaagcagcagaagcaagcacttctagccagaccctcaagcaccatcacttacctaactgacagcccaaagccagcattatgtgtaactctggcaggactaatccccttcgttgctccaccactggtcatgctgatgacaaaaacttatattcccatattagcttttactcagatggcttatggagccagtttcctatctttcttgggtgggatcagatggggtttgctctaccagaaggtagtccagccaaaccagactaccttaatttagctagcagtgcagctcctcttttcttttcatggtttgccttccttatttctgaaagacttagtgaagccatagtcacagtaataatgggtatgggagtagcattccaccttgaactttttctcttaccacattatcccaactggtttaaagccctgaggatagtagtcactttattggccactttttcatttataatcactttagtagttaaaagtagttttccagaaaaaggacataagagacctggtcaagtataaaaaatataaaagtctgggaagtgaggagcacctctgcccagctgctgccccgtctgggaagtgaggagcgcctctgcctggccgcctgaccatctgggaagtgtgacaagcgcctctgcccggccgctgtgcaaccttccacgtgtgaagtgacagccttgtgtgtgatcttttctgtcttccccaagtttgcattttcgacattaaagtttactttttagttaaaagttttaaaaatatatatatataaatacactgtagataacatttgtatgccagctacacctttttctacttctgtttggctttttttccccacaccaatggtaatttatcttcacagattgttcttcatttctagaaattgttacttcatggtaattacttgagcaaaagcttgaaaatccctgacaagtacttttcatctcatagtatattagttttcactcagtcattttatgaataatatagttatccacttaaacatttcaatattttaaccatcttgaaaattaaagattaaaaatcccaaaa

SEQ ID NO: 70533 - DNA, 1073 bp, Homo Sapiens
  misc_feature (990)..(1024): n is a, c, g, or t
cacaccacatttttagtctttattttttaggtaaattccattgaatcaaatataacaaaattacagtttttgtttgtaatgatctttgttcaccaccacacaatcatagtagaatcaaaagtaatatgagaacataaaatgatcaaggacatcaatgtttagtataatttcttaataaaggtaaatatccccatatttagaaaaaattgcattgctagttgcaaatcttaaacacctcagtgctgaaggatcctgtatttccccccaaagatccagcagcacggaggctttcagaacacaaactcaaaaatatagtattttcggggcagcattttaagtttcagaaaacccaaacaaaacaaaacaaaatcagaatcaggaatgtgaaagtgatggtgctctaaaaatcaatctggaagcagatctgccaacataagaatgtggttgaacagagtctaaccaggaaaaggagagatgcgaactcgctccccctcccctctcgccatcgtcccccgcccccagcgagcaagccgccccctgctctgcgctgtctctccaatggcgtctgcctccggggccacggcgaagcacgagcagatcctggtcctcgacccgcccatagacctcaaattcaaaagccccttcacagatgtagtcactacaaatcttaaattgcgaaatccatccgatagaaaagtgtggttcaaagtgaagactaccgtgcctcaccggtactgtgtgaggcccaacagtggaattattgacccagggtcaactgtgactgtttcagtaatgctacagccctttgactatgatccgaatgaaaagagtaaacacaagtttatggtacaatttttgctccactaaacacttcagatatggaagctgtgtggaatgaggcaaaacctcatgaattaatggattccaaatggagatccccccggccgtaatggccgaattcccgggcatatgtccggtaccgtcgactgnnnnnnnnnnnnnnnnnnnnnnnnnnnnnnnnnnncgccgcttcctcgctcactgactcgctgcgactattacctggggttcgc

SEQ ID NO: 70534 - DNA, 1828 bp, Homo Sapiens
  misc_feature (79)..(114): n is a, c, g, or t
  misc_feature (1182)..(1191): n is a, c, g, or t
  misc_feature (1763)..(1772): n is a, c, g, or t
gaaacttgaacactcactataggggctagcgcgttgtagcgaacgacgagcgcaggagtcagtgagcgaggaagcggcnnnnnnnnnnnnnnnnnnnnnnnnnnnnnnnnnnnncagtcgacggtaccggacatatgcccgggaattcggccattacggccgggggaggctcgcaagtgcgcgtggccgtggcggctggtgtggggttgagtcagttgtgggacccggagctgctgacccagcgggtggcccaccgaaccggtgacacagcggcaggcgttagggctcgggagccgcgagcctggcctcgtcctagagctcggccgagccgtcgccgccgtcgtcccccgcccccagtcagcaaaccgccgccgcgggcgcgcccccgctctgcgctgtctctccgatggcgtccgcctcaggggccatggcgaagcacgagcagatcctggtcctcgatccgcccacagacctcaaattcaaaggccccttcacagatgtagtcactacaaatcttaaattgcgaaatccatcggatagaaaagtgtgtttcaaagtgaagactacagcacctcgccggtactgtgtgaggcccaacagtggaattattgacccagggtcaactgtgactgtttcagtaatgctacagccctttgactatgatccgaatgaaaagagtaaacacaagtttatggtacagacaatttttgctccaccaaacacttcagatatggaagctgtgtggaaagaggcaaaacctgatgaattaatggattccaaattgagatgcgtatttgaaatgcccaatgaaaatgataaattgaatgatatggaacctagcaaagctgttccactgaatgcatctaagcaagatggacctatgccaaaaccacacagtgtttcacttaatgataccgaaacaaggaaactaatggaagagtgtaaaagacttcagggagaaatgatgaagctatcagaagaaaatcggcacctgagagatgaaggtttaaggctcagaaaggtagcacattcggataaacctggatcaacctcaactgcatccttcagagataatgtcaccagtcctcttccttcacttcttgttgtaattgcagccattttcattggattctttctagggaaattcatcttgtagagtgaagcatgcagagtgctgtttcnnnnnnnnnnctcttgaccagaagatttgtttacctaccatttcattggtagtatggcctgcggtgaccatttttttgtgtgtgtacagcgtcatacaggctttgcctttaatgatctcttatggttagaaaacacaataaaaacaaactggctactggacaaattgtatattaccagatcatcactagcagctttcagttgcacttcagtcctttatcaaattcataaagaattgttctgggaagtgaggagcacctctgcctggccaccctgtctgggaagtgaggagccccgcttcccgggagccgccccatctgggaagtgaggagcgcttgcctggccgcccaactgtctgggaagtgaggtgtgcctgtgcctgcgtgccgcactgtctaggaagtgaggtgcgtctctgctgcccgccgccccatctgggaagtgaggagcgcctctgcccggctgctgtgcaatcctgcaagtatgaagtgacagccttgtgtgtgatctttctgccctccccaagtttgcattttcgacattaaaatttactttttaattaaaagttttaaattggagaattnnnnnnnnnnctaatttcagcttattattactagagatgcatgaaagctctacccacatacatgct

SEQ ID NO: 70535 - DNA, 806 bp, Homo Sapiens
  misc_feature (150)..(156): n is a, c, g, or t
  misc_feature (158)..(166): n is a, c, g, or t
  misc_feature (168)..(174): n is a, c, g, or t
  misc_feature (178)..(179): n is a, c, g, or t
  misc_feature (182)..(183): n is a, c, g, or t
  misc_feature (185)..(207): n is a, c, g, or t
  misc_feature (209)..(222): n is a, c, g, or t
  misc_feature (225)..(229): n is a, c, g, or t
  misc_feature (231)..(231): n is a, c, g, or t
  misc_feature (253)..(266): n is a, c, g, or t
ggggggaaattccaagcccttgtcctgggcccggggttttcttagggaaccagtattgggccatgttccctttccctttcggggggccgcgcgccccaaagaaatggttttaaaaaaattttttaagggcccgaggcgggccaacaaggnnnnnnngnnnnnnnnngnnnnnnngggnnggnngnnnnnnnnnnnnnnnnnnnnnnngnnnnnnnnnnnnnnttnnnnnancgagcaagaatctgttaacagnnnnnnnnnnnnnnatgttaaataccatgggacaggattgtaaggatgaaaaactcagtcaacaactgcctcacaagggataagaaaaattctgccatgatattagcaaaggtaaaggaggaaaaatttacactgtaagaggcaccatttccccaaggaatacctcttggcatttcctgaatgagtgggattagcaatctaaataaatcatatttcaagaggtaacagcaacagataaaatttaaagggattattaaaataacatttacaagactctgaacaattcttgaactcttattaaaaccacaaagaaagaacaattctttatttatgaatttcataaaggactcaatgtgcaactgacatctgctagtgatgatctggtaatatacaacctgtccagtagccgaacagtttgtttttattgtgttttctaaccgtaagagatcattaaaggcaaagcctatatgacgctgtacacacaaaaaaatggtcaccgtgggccatactaccaatgaaatggtaggtaaacaaatctttttctggaaaagaga

SEQ ID NO: 70536 - DNA, 1108 bp, Homo Sapiens
  misc_feature (1019)..(1042): n is a, c, g, or t
gatattcatcttagcacccagcttacactatgtccgctgtatgtgttggatttgagcgatacatttacacagaacagcttgactgatacgattaatacgctcccttaggaattgccctcgagccaagaatcgcaccgagtctgccatgcccttctttattccagggacttagaaacttgcctgagatggtggacgcagtaatgagggcaccgcgcagctcagttagagacggagaaagggaagaggctgggatggtctctgctgctcttgcctctagttcatggagatgtgtctctgttcaggccaagatacagccagccaggcctgtcgtctgggacccaggaggcctctgatgaccaagggctttcacatcctaagtcatttggaaggaggccttgagaacaaagtcacctttgtcactcccagtgaactgaatgaggaacatgctgtctcctgtcttggcctcccctttcatgagatactggggagaagagaacattcctcctggcttagttgtagcagacccagacctgtgcccagctttggtcccccttcccaacttctgaagcacgtgctgcagagccaccttggtctgagcacctgaggaccagcccctcctccctcagtgcgggtcatctcttgggggattttcttaaagtgaagaaagggggtggggaaccatattgcccctccctcccccatcaaacttccttcatttaacttgctataaaatgagtcatataaagaaactctatatgggtgaggtatatcccacttctgtgaaaacattacaaatcaaaccgcttctctcagtttatttaagatgcttttgttgcgagcggagctctagagtgaagcctcctgtgtgtgtgtgagataataacaccttgtaactcattacagctgggcactatttacataaaccagagctgagccaggcaggaatttgctgattaatttatttttaatggagtgaagtataccatgcaccaaaataaactttactgtgtgtacctaannnnnnnnnnnnnnnnnnnnnnnnggggcggccgctctagagtatcccctcgaggggccccaagcttacgccgtacccagcttttcttgg

SEQ ID NO: 70537 - DNA, 890 bp, Homo Sapiens
cacaccacctcacacacaccaactccttcccccacccacatcctaacgaagatggtacggtccgggattcccgggatggatgtacagaggatccccaaccgcctgcgaaacccaagccgccgcgtaggagcgtgcgttcgggccctcttctcccacctgttcgactccccatccccaggatgtcaacctcagtccctcaaggccatacctggacccaacgggtgaagaaagacgatgaggaggaggacccgctggaccagctgatctcccgctctggctgtgctgcctcccactttgcagtgcaggagtgcatggcccagcaccaggactggcggcaatgccagccacaggtgcaggcgttcaaggattgcatgagtgaacagcaggcgaggcggcaagaggagctgcagaggaggcaagaacaagccggtgcccaccactgagaccccaaaccacctatccccagtagatggccctgccaagaccagcacccagcaagattatagaggaagaaatcctaaatgctggtgtgggaggtctaaaacatggggagagtttttggatctggagttgagagccatgggtttggacatgactggcacaaacagctgtcatatgttcatggtcagatgtcatacattctcagctgtcttgttccaccagtatttaccaggaaaacaaagaatgtgttaagggatgctcccccaccccacatcttaagtcagtgtgccaagtactgagatgattttagggacattttattttaaattaaatttacaatctaatggtaaattgattacctaattagtgcctttctctttcatcacttgttctggatgtttcaatcagtttagtggaaggaaaaataaatggggaaactttttatacca

SEQ ID NO: 70538 - DNA, 1220 bp, Homo Sapiens
  misc_feature (838)..(853): n is a, c, g, or t
acacagaatgccagttcatcagcagccgactcacgagtggtcgacagagcaagacacaccaagtcgtcaagccagcagtcatcatcttcctcctcctcttcttccgtatcatcgtggtcatcatcatcaacttgttgtacaagagatctctcaacaaactacctgtagtgccagaatctgattcaaatagtcaggttgattggacttacgatccaaatgaacctcgatactgcatttgtaatcaggtatcttatggtgagatggtgggatgtgataaccaagattgcccgtatagaatggttccattatggctgcgttggattgacagaggcaccaaaaggcaaaatggtatctgtccacagtgcactgctgcaatgaagagaagaggcagcagacacaaataaaggtggtccttttgtttgatgaagaaataaacttcagctgaagattttatataggactttaaaaagaagagaagagacaagaagaaacaatgcatttccaggcaaccacttaaaggatttacatagacaatcctataagatcttgaacttgaattttatgggttgtattttaataatgtaagtaaattatttatgcactcctggtgtgctatgaatattattccagttagccttggattatttcagtggccaacatatgcagacatttgtactcctcaaccattttctcaaagtaatgggcattctatgatttagacttcaaggaattccaatgatgaagattttaaggaaagtattttatattcaacaggtatattctgctgcatgtactgtactccagagctgttatgtaacactgtatataaatggttgcnnnnnnnnnnnnnnnngtcagtgcttctaaaaagaatttaagataatggtttttaaaatgcctttataataagctttgtttctttgtgaaactaattcagcaggctgaaggaaatggttcatgtgataatgtgggctggtatcctctagagtacctgggtacataaacagaaactcctgtaggtaaaaagtaatttgtgccattagtctttctatgtttctgcatccagatagagtgcagttcatgagggagggggcgggggactgaaggggaaagggcgttaaagtgatacatttttataccaaatgtgtttatttttttgtgcaagtaatccttaaaattgcaattgtattaggtgttaaaataaagtttttaaaaaattc

SEQ ID NO: 70539 - DNA, 1015 bp, Homo Sapiens
  misc_feature (60)..(79): n is a, c, g, or t
gtgccaagctaaaattaaccctcaactaaagggaataagcttgcggccgcctgctcaggnnnnnnnnnnnnnnnnnnnnacttgggcctacatgggccagaggtggtttattcagtctccataagagaggggacaaacggcacagttgggtccgtgaagaggagggtccaagagctcacaagagagcctctctgagatttgacccctccatcccctcctcagggaggttgtggagtcactgggcctcatgggataggcccagggcaagcaatgatgagactccaaaccagctggacacagtccaggggcaggaaggcagccaagcgtcctgacccacaaggccctatacagcaatggagccatcgcggaagtccgtcctcccaatgaggatgttgaccacaaccgggtggccgtctcggcactgctgctgggcatcgtgcagcaccttgaccacctgatcctcgttctcccgtgagagcagcaagccccgggcccccagacccatggctgccttgtgataatcagtgtaggccaggccacaggccacgttgctgcccagagagggcacctgctcccgagaaatctgtgtccagccagcatcattccctaccaaggccatcactgggatcttgtgtctgacgaatgtatcaaattcgatgaggctgtagccaaaagctccgtccccaaacaggcaccagacctcagcatctggccggcacagcttggccccaagtgcaaatcctgcaccaactcccagagtcccaaaggccccaggatcgagccagcgcagggggccgcggggctgtaccagatgggcagcagtgcccacgaagtccccgccatccaccaccagaattgagttgtcaggtagcgtttcctccaccagctgcagcacctgcactgggttcaggtgctgggccacaggcatcgctgccttctcccgaaaggtctgctccttctgcctagctatcctcgtgccgaattcacacacccaggcctcgtacctagccgttaa

SEQ ID NO: 70540 - DNA, 2017 bp, Homo Sapiens
tagagaggccgggttaatcggcacgaggctacggcgcgccgcgtgagccaagtgggccacccgggcacggccacgctcccgggtcacgtgacacggagggggccgaattctgctggaggcagcgccatatcctggaggtgaaggtaccacctcatggagacccccgcggccgccgcccccgctgggagcttattcccctccttcctgctcctggcctgcgggacgctggtggccgccttgctgggcgccgctcaccgcctggggctcttctatcagctgctgcacaaggtggacaaggcaagcgtccggcatggcggagagaacgtggccgctgtgctgagggcccatggtgtgcggttcatcttcacgctggtcggtgggcacatttccccgctgctggtggcctgtgagaaactgggcatccgtgtggtggacacacgccatgaggtcacggcccgtctttgctgctgatgctatggcccgcctgtccgggacggtgggcgtggcggcagtgacagcaggccctggcctcaccaacacggtgactgcggtgaagaatgctcagatggctcagtccccaatcctgcttctgggtggggctgccagcactctgctgcagaaccggggtgcgctccaggctgttgatcagctgtcccttttccggccactctgtaagttttgtgtgtctgtgcggagggtgcgggacattgtgcccaccctgagggccgcgatggctgccgcccagtcgggcaccccaggtccggtgtttgtggagctgcccgttgacgtgctgtacccctacttcatggtccagaaggagatggtgccagccaagccacccaagggcctcgtggggccgagtggtctcctggtatttagagaattacctggccaacctctttgcaggagccctgggagcctcagcccgagggaccgctgcccctggacatcccccagggcttccccgcagcaggttcagcgctgtgtggagatcctgagccgggccaagaggcctctgatggtgctggggagtcaggccctgctcaccccaacgtctgccgacaagcttcgggctgccgtggagaccttgggtgttccctgcttccttggagggatggcacgggggctgttaggccgcaaccaccccctccacatccgggagaaccgcagtgcggccctgaagaaggcggatgtcattgtcctagcaggaactgtgtgtgacttccgcctatcctatggccgtgtcctcagccacagcagcaagatcatcatcgtcaatcgtaatcgggaagagatgttgctcaactcagacatcttctggaagccccaggaggctgtgcagggagatgtgggttccttcgtgctgaagttagtggagggccttcagggccagacctgggccccagactgggtggaggagctgcgggaagccgaccggcagaaggagcagacctttcgggagaaggcagcgatgcctgtggcccagcacctgaacccagtgcaggtgctgcagctggtggaggaaacgctacctgacaactcaattctggtggtggatggtggggaacttcgtgggcactgctgcccatctggtacagccccgcggccccctgcgctggcttgatcctggggcctttgggactctgggagttggtgcaggatttgcacttggggccaagctgtgccggccagatgctgaagtctggtgcctgtttggggacggagcttttggctacagcctcatcgaatttgatacattcgtcagacacaagatcccagtgatggccttggtagggaatgatgctggctggacacagatttctcgggagcaggtgccctctctgggcagcaacgtggcctgtggcctggcctacactgattatcacaaggcagccatgggtctgggggcccggggcttgctgctctcacgggagaacgaggatcaggtggtcaaggtgctgcacgatgcccagcagcagtgccgagacggcacccggttgtggtcacatcctcatgg

SEQ ID NO: 70541 - DNA, 1158 bp, Homo Sapiens
ctggttgccctagcttccccccctatttttgtgtcttttattaactagtgcattgtcttattaaatcttcactgtatttaatgcaggatgtgtgcttcagttgctctgtgtattttgatattttaatttagaggttttgtttgctttttgacactagttgtaagttactttgttatagatggtatcctttaccccttcttaatattttacagcagtacgtttttttgtaacgtgagactgcagagtttgtttttctatatgtgaaggattacaacacaaaaagttatcctgccattcgagtgctcagaactgaatgtttctgcagatcttgtggcatttgtctctagtgtgatatataaaggtgtaattaagacagagttctgttaatctaatcaagtttgctgttagttgtgcattagcagtataaaagctaatatatactatatggtcttgcaacagttttaaagcctctgcataattgataataaaaatgcatgacattcttgtttttaatagacttttaaaatcataattttaggtttaacacgtagatctttgtacagttgactttttgacatagcaaggccaaaaataactttctgaatatttttttcttgtgtataagtggaaagggcatttttcacatataagtgggctaaccaatattttcaaaagaacttcatcattgtacaactaacaacagtaactagcccttaattatggtgacagttccttattggtgtgtgtgagattactctagcaactattacagtataacacagatgatcttctccacacaccccatcacccagataatttacagttctgttaacagtgaggttgataaagtattactgataaaaaattatctaaggaaaaaaacagaaaattatttggtgtggccatcttacctgcttatgtctcctacacaaagctaaatattctagcagtgatgtaatgaaaaattacatcttactgttgatatatgtatgctctggtacacagatgtcattttgttgtcacagcactacagtgaaatacacaaaaaatgaaattcatataatgacttaaatgtattatatgttagaattgacaacataaactacttttgctttgaaatgatgtatgcttcagtaaaatcatattcaaatttaaaaa

SEQ ID NO: 70542 - DNA, 1361 bp, Homo Sapiens
caaagacaaaagctgcagtgaaaatttggactcaaaaggaggacaatgccatccttcatattcctccaaccaaagcaagcacagcacatgggagaagggcatttggcatctgctgcccccaggtcttcctcatccaccacttctggttcctttcatctggaaagaagacctcttccatcttccatgcagctagcagtcatcaggggagacaccctcgcggggctttgattctacagatctttctcaaaggaagcttaggacccgtgggaatggcaaaacagttcgtccatcctctgtttatagaaatggaacagacatcatctataattatcatgggatagtttccttgaaactggaggatgacagtttcccaactcacaaaaggaaggccaaagtatccatcattagtcagccacaaaagacaatcaaagtggcagaactgcctcaagcagataacggtggaatccacaactgactcacacttccccagacaggaccagttgccctcatttccaaagaactgcactctggaattaaagggactcttccattttgaagaaggcatccagaagctgtatcagtgcaatgggatcgcctggaaagcctggagtccccaaaccaaggatgtggaagacaaatcctgtccagccgggtggcaccagcactcaggctactgtcacatcttgatcacagagcagaaaggcacctggaatgcggctgcccaagcttgcagggaacaatacctgggcaaaccttgtaacttgtattctccaggcagcacatgcggtggctctgggacattggtgggagaaagtccttttggataggtttgaacgaccaagtgcatgctggccactgggagtggatcggtggtgaacctgttgccttcaccaatgggagaagaggccctctccacgctccaagcttggaaagagctgtgttttggttcaaagacaagggaaatggcaaacaaaagactgtaggagagccaaacctcataattatgtgtgttccagaaaactctaaatataacagaccctacagggggccacctggagtttgtcacctatttattcacaggatctgtgaatattgctccatagaaaacaaattgttatgattgagtgggtatacctttgtgattctgtctagtgaaaatgggacatttttaatagtgccagaaagattgataaataaatattttttacaagataagatacaatttttgtatctccaataccttttaaaataaatgccagcagtattataaagtgtaaggtttgtttattccagaagaccctcacccttaccccattccaaatcccagggagcaccagtctcatagtccttggatttttttt

SEQ ID NO: 70543 - DNA, 767 bp, Homo Sapiens
atgttctcgatccttacgtgtctcctggcccagccccaggaaggaaatgatgcagctctggctccttgtctcccaggctgatcctttattcagaataccacaaagaaaggacattcagctcaaggctccctgccgtgttgaagagttctgactgcacaaaccagcttctggtttcttctggaatgaataccctcatatctgtcctgatgtgatatgtctgagactgaatgcgggaggttcaatgtgaagctgtgtgtggtgtcaaagtttcaggaaggattttacccttttgttcttccccctgtccccaacccactctcaccccgcaacccatcagtattttagttatttggcctctactccagtaaacctgattgggtttgttcactctctgaatgattattagccagacttcaaaattattttatagcccaaattataacatctattgtattatttagacttttaacatatagagctatttctactgatttttgcccttgttctgtcctttttttcaaaaaagaaaatgtgttttttgtttggtaccatagtgtgaaatgctgggaacaatgactataagacatgctatggcacatatatttatagtctgtttatgtagaaacaaatgtaatatattaaagccttatatataatgaactttgtactattcacattttgtatcagtattatgtagcataacaaaggtcataatgctttcagcaattgatgtcattttattaaagaacattgaaaaacttgaaaaa

SEQ ID NO: 70544 - DNA, 613 bp, Homo Sapiens
tctgaattggtcatactacatttcactttattattattaacatttatcatacacggttactattccaatctttcatgcagacaaaaataaacaatataaaatacataatgcactttgataattttaaccatacataaaatatggagtaatggaagctatgttacatggatattttacaaaggaaaaaaagatgacttttataataacacatccagatgaaatttatcattaaattttggatttcatatgatgttaagtatggatatattcaaaacaattactatttatagaaccaatttgatattttgtcatttaaaataatgaatactatgtaaatgagtacttataaaaatattttttaggcaaaaaagctctgttctactcatttacttgcccagttacaaaaatattatattcatctgaaactctaataaatttgcttgaggcattagatattcaaattcaaatgcatattttctaaagcgtcttaccaatttagtgttcttggctacatacagtatatttgtatatatgatattaggtttgtgttacaaataatgccattttaagcaaaagacacagatgatcaataacacacagagacaccacgaag

SEQ ID NO: 70545 - DNA, 925 bp, Homo Sapiens; identical to SEQ ID NO: 1418

SEQ ID NO: 70546 - DNA, 632 bp, Homo Sapiens
caagcctggttatctggcttgacccgcccacacggaggcctccccagcgtttctttttcccgagaagagctccagctcgcaggtccttagaacacggcagagcaggagcatctcaggaaccaacggccagctccttggcgctgtccccagccccacaggcctgctgcggccatccgcaaacgggcatttccttgaacttttgagagtgcctttgaccagctgttcgcagctgggaaactccaacttttgaagtcagagcttggagcggcccccgcaagggcgtggctcaaaccctccccagagctgggagccattgcttatgcaagcccgtttcttttgatgtaaagatggaagtcgttactatattttaataatgcaaatacatcttttaaaataagttaacatttcttaccaccagatggatcaggctttgaatttaatcatgtaaatgtttgtaattttatgtcattttgttaaaatgggacgctttcaattggtttccaagaaagatgatacctctgcattttctggtggaaaaggtgtaatacccttaatgagatcaaagtgttaggggaaaaaaattccaaaagtagttacaagctatatcaatgtcaaagtaaatgcacttcatc

SEQ ID NO: 70547 - DNA, 960 bp, Homo Sapiens
cttgataaatatttgctgaatgttgtttttttgaatgaacataagatagaaacaaacttctcatccagttaactagagtgaatgtagggagaattgttttgcttgtaacatggagagtttattttcaagtgaggaaagagaaaaaaattactcagacttgttcctggtgaagtgcattctctgtttgtatactttttgatggagaaattgatctatagaactgcttaattttttgaggcatttagacagcaatgaaaggtagttctccacaggacaccgaatcaaaaggagagaccagactctggcctcatacccagcctatttgaaacaagctatctagtttctcctgcagacaccttgtcaacaacatgcaacagtgtcaggtgccttgcaggaaaataatctgagtcccaagctagcctgtgctcatccacaatcacaatgaacatgtcaaggaagaatttgcagagactcaagggaagcacaatgggataaggtaatcactttcagtgaaaaactgttttcttgaaaacaggcttggacacaattgaaagctggcttcctgcaaacacaccaagagtctgtaatctagcctatccattatatgtcctttattattcatgatatcctattcttctaccttgttgcctggtaactttttctgaggactgagtttctgcagcgatgtggtgcactcttcctgtgatgaggaaacatctgggcccccttctgcaggctttggaagatgatgtgtcttgtcaaggggtaaagggcaaatggatttaatttctgcttaaaactatcatagacgttccaaatagaatatgtaaaatttctctgtattagaaaaagaaacgtgataccaattgtatattttcttttctttatttattctctgtaagtctgtcagatgataaattgtaaataacaatgattaaagagtcatgctactgaaaaaaa

SEQ ID NO: 70548 - DNA, 762 bp, Homo Sapiens
  misc_feature (91)..(91): n is a, c, g, or t
  misc_feature (93)..(93): n is a, c, g, or t
  misc_feature (104)..(104): n is a, c, g, or t
cagtgggggaactcttaggggagaggggcacacaattgtgatgaatgtgggaagagctttactcaaggctcaggtctcattcgcatcaaangnattcatactgnagaaagaccttatgaatgtaatgaatgtgggaaagccttcagtcgaagttctggtctttttaatcaccgaggaatccacaatatacagaaacggtaccactgcaaggagtgtgggaaggtcttcagtcagagtgcgggtcttatccagcatcagagaatccacaaaggagaaaagccgtatcagtgcagccagtgcagtaagagctacagtcggcgttcatttctcattgaacatcagagaagccacacaggggagcgacctcaccagtgcattgaatgtgggaaaagctttaatcgacactgcaacctcattcgccatcagaagatccacacagtggctgagctggtctagggcttggctatgagcaagttttccagatcaccacccaagttgtgtggggcaggttgagactagaaaatgcctctttcttcctttctccatgaaatgtgtttgaaacaaatcctgacttaaggcccagggacttccttaaaggaaagttgggtgtttgaagctactgttttctcttttgttcattttacctctttcttactcttactagctgtgtccctcttatttataatttatttatttttttgagatggctgctaaacccttctaataatataataaatggcactgccacagccaacatgcctg

SEQ ID NO: 70549 - DNA, 1195 bp, Homo Sapiens
  misc_feature (94)..(107): n is a, c, g, or t
agaggttcactgctgctttgtcactttctcaatcaaattggccacttaagaaataaagagctggtagaattgcatcctcagatgattattgacnnnnnnnnnnnnnnaaaacagacattccagtgccacccaaatatatatctgtaacgtgcccaagaaatcctagctgcgctcttgagagtgcatgccatggagactggtttagacaccgcgtggagcctagttgcctgttgtcacggcatcttgcactttaggagactaagaccgtcctggttcgtctgtgtgtggtgtgaccaatggtgtgcccagagcactactctcaaaatcactagtgttagcaagtcgtcccgggctggggagcgttcgccgtagtctttggaagctttggctttagatttaccaagccccgcctccccgctgccagtgccctgctctcccgttcgcctctttctgtttctgtgtgaactttcccggtaatatcactcgttaaataggttttctttaaacttaattaaagaaaaactatttaaaggtaaaggatattttgttgacatcggtggctcgatcatccttaagcaactgaagttaaaattgttgaaggaaaaggcacttaaattggttactttcatgtccaggtgtatataagtccagtgtgttcatctagatgacgcaaagaatctcctggtagagaagcgacatgtaaaaaactggtggaaaaaggttttggattttttttccagtggggtggggggagggcaagctggatttacaggtcacggctggactgaatgggcctttttatcttcccactgtatcatggaagtagctgcttgcttgtactgtccatccttcaggcatccctaaagctcactctgaagatgttagagacaaacacaaactcttcgagttaaagttgatcctgacactgacatgaaggcaagccttgatttcgtatgaacgttgctgaagtggtaattgaggaaaacagttccccagattgttaagagttcactgaagatattgacacaattttaaaaaatcagtaaaggaatgtatataatattgctctcgtgttttacagtaagatttgttgctctcagactgtgtaaaacaaaatttattcatgttttctgcatattaaaaaatcttattgtaccaactggtaaactattaaatgcctataaaactaaaaaaa

SEQ ID NO: 70550 - DNA, 933 bp, Homo Sapiens
  misc_feature (666)..(700): n is a, c, g, or t
caggttgtagacggactgctctcccccaccccttcgttattaaacagggctcattacatgtggacccagttgtgggccatccctgagattcaatgttcgctgcttctcacatggaggatgtctggtaactcaactcagcagcaggctgtggcaatctcccaagtaaggataactttgtttacagagtaatcgtttcctcctcctttgtcaacgcaagtcgctgtgtgctgcaggggaagacacgcttgcttcctcctgcatcggtaccattctcctttattgttcaatatctatgagtgatttctagatgttgtggcttacccttaaacaattcatgctaaaaatgaattaaaatacaagacatttatacatgtacaaacaaatgttaagatgcaccatttctatgtatttatatttctcaaaataggacagaaaatagcagcaaacaagaacaaagatattttccatagtttttgtagaaaaatccagtcagaagagctaagggaaaaagacttttcaatgtaagcagggttgtgaggcaatattgtcctgaaaattcacctactgtatgtatttaaggaattagcttaagatgtaatttttgtcctcaaaaatagccattagttctcaaaactttcccttccagagacatctctcaggaatctnnnnnnnnnnnnnnnnnnnnnnnnnnnnnnnnnnnctagacataaagctgcttctagttaatatacggcctagtctctgtgtgtatctacaggacgctaactctcaccctttgtcttttgcaggaaccaattttccattaaatactaaaggggacatttaaaaaatcacatagtacacaaatgaataaaacgcagttcagaattttatctttgttaaactgtcactgttatctcattgttctgttaacttttcaaataactctcttgg

SEQ ID NO: 70551 - DNA, 720 bp, Homo Sapiens
gagacgctcgtgccgtcccgccacaccaagatgtggggctgcctggcgcccactggagacagacagacagacgcctgtcccccgggaccgaggcctgtgccgtccccacccgccccaacatggtgctcatccttgccgagacccctgcggtctgtgcccgcgcccagcccagctgccccggctgcacgcctgctgctcccagctcgcccggctgccacaagctctctgcgggtccatcctccccacaggaggaggggccgtcctcgcaggccctgcccggcctctctgcagaccctcaagcgtcgtctgcatgagtgagcaggcgtgggtggactctggccgcggccacacttggtgctcaccagctgcttcggccttcaggtgacctccctccccacggcatcctgctctccgggtggaagagcagctttctgtctcccagaaggcatcgcttttccctcttgagcagatcggagcccctgggaggtttggaagctgcctccaagcctaggacacggaccggtggccggggcggcctctggcccctgacgctggctgagacaggcccgtggggcggggttttggggcgtgaacaaggctggcagtaagtggacaagctgctcccctggctaaggccctgccctgccctcagccagaggtgcctggccatgcctgcacactcctccccattttaataaatggtcgcaacttctagaagtc

SEQ ID NO: 70552 - DNA, 2335 bp, Homo Sapiens
tatattttagatttctcccctaaagttagttagagaaaaaggtctattcttcagcagatcactgtggcccctcttggagctgggtgttttcaaattttcttgaaaagtgagttgtgtcacagaatgtggatagtgagatttgcttctgggcctgtggttggacgcccacagcttcctttggaggggcaagaagttggcctctcggttgacattccagagaaatggccagacttgcccctacccttttgcccctggtgtagctgcctcacatgaggttattgcaagagttccccttgcaataccctttgtgccctcaagaattaaaagcctctatgatccagagttgctatgcaccaaattttgatgccttctaaataccttgatgcctgtagcactagaaatgctttcctatttaaaataaacattaaattttaaaatagagctttgtatactatgtaagcagttttatatcagctttgtaaaagctttggtgttaagagtcaatattttttggctttgtagataaagacttaaatttttgtgcaacatagtggtgttaaagcacacatccattggactatgcaaatcaatttctactagcagcactgagcaactgggcacgtgctagtacgcaccccctcctactctaactgtgctagctcttgggttgaggaatggaatgggtagccttctgcttactggagatgcacagagaaacatggctgaaaacagctttaaaaagaacatgtctttgggttcatgtgtggtgctgctgcccgggtgtaaactatccccacccagggccagccattatcaccagacctcttctgggcctggctgtgaagccctgtttttggtattcagaatggatctttaaggctcagatgggctcaaattgaaaccttgtgttttataaaatggatgtttagtaaaggaactggttctcagttatgtttacagcacttggaattgtgtgttcttgtacattttgtattttaaaaccttttatgggagtgcagtgctccttacacaaatacaaagggaagaagagccagcagttgaggctcctcagttttagtgctgaaataataaacagtgacaggtcaacagtatccttaatctgtctgagtgttcctccgcctggggttggtgtggagcccctcactttggggcaaagttaagggtcctgtgtcttttaaaaagtccatttggtcaataacttttcatttaaggaagagaagatcgagttccaaattgcttccgaggcttcagttctgtaccatttaatgcgtgcaaaggacattccatggtgtctgctgggttcagggcaactggctttcccaaggcatacaagaaaagttggcagaaagtcctcccctttaaaattcaagcctgaaggttttgtgtgggggcctactgccccctaatgtcttctggtgatactgcagcacagtccatcaaaatagtttgtggttttgccatctgttactccttatgcccacctggagaggggctagcatctttaggtgggaccacccctggcacaacatggtctctgaggtccagatactctgagggtaggggctggctctctctgcctccctatcccctacaagagggacagggagaggtagaacattgggatctttactcagaggctcagatggacccttgattctcccaggagtcatacattgaaggtaccagagcttccattttataaaagaaagcaagcctgccgtggacctgtcagccccacgatatctgtcggcatgggccacagccaggacagacttaagggctctccaggtgccagtcaagatgcctggctcaggccatcaggagctggttagccccattccacccccagccctgcatgcagggtccagccattgtctttgggggaaacaggcagaataagtggaggatggagctggggcttgggctcctctaggtaccttctgagagctttgacaagccagaaagaagctaccaggttgagggtgctggtcttctggactcaggagagacatgttcgccgaggatatcagctggctcttacctcctggctttctctcctacaaacacacccattccttgggggcttgtaacacagtgcgaggtgggtcaccaacaggcatcagactggtgtagtcatcagcgggtagctggtaggcctggaagacgctgagcagatccttcataccagccgtgtatgggacagcctgcatgcggaccaaggctcctgactgggacaacactgaggtgggagcagaggccagggcagcagtgggcctcgtgccgaattcaacacccaggcctcgctacctagccg

SEQ ID NO: 70553 - DNA, 740 bp, Homo Sapiens
  misc_feature (633)..(688): n is a, c, g, or t
tgcatgtcaaaaaaactactaatcagaatgagctttgtcatccagagccagaactgctgcagaaattttataaattttgcaacttctttttttacaaggaacttttgtgctactacacatcaggacttttgaagcatccaataaatccatttaataagtatgagcatgtgtctgagtggacaagaaagtgaaaccatccatgctacattggataatttttcctcccccagactggatagggaatctcaactttcaaaatagagtatcctggctccatttacaaagctgcacaggtattaaagatcgtgctgcctttgttaggcagatttggaggggaggcccaacagcaaagatggagaggaaaaagggagtggagcttgtggaacaggaagccccccagggtctgtgcagggctgctcagctcttgaggatgttgtggatggtgaagtggtgatggtgtcctggagcagcccagcacctccactgggcccagaaggtcttgacttcggacacttacccctgtttcacaagtgtttataaagctgtttttgcttttgtttttctcctaaataatccttacttggtagttattaatccttctttgggggagggacagggctttaaaactgaagnnnnnnnnnnnnnnnnnnnnnnnnnnnnnnnnnnnnnnnnnnnnnnnnnnnnnnnngctatacaaaccaaatggcagctgttgagaatctcaataaaatgttaaatgc

SEQ ID NO: 70554 - DNA, 818 bp, Homo Sapiens
  misc_feature (131)..(176): n is a, c, g, or t
cattattaataattaattaattaacatcaaacacggcttctcatgctatttctacctcactttggttttggggtgttcctgataattgtgcacacctgagttcacagcttcaccacttgtccattgcgttnnnnnnnnnnnnnnnnnnnnnnnnnnnnnnnnnnnnnnnnnnnnnnaaaagaaaacccaaagctctaaggtaacaaattaccaaattacatgaagatttggttttagtcttgcatttttttcctttatgtgacgctggaccttttctttacccaaggatttttaaaactcagatttaaaacaaggggttactttacatcctactaagaagtttaagtaagtaagtttcattctaaaatcagaggtaaatagagtgcataaataattatgttttaatctttctgtatttcttttacacacattagctctggagtgagtctgtcataatatttgaacaaaaattgagagctttattgctgcattttaagcataattaatttggacattatttcgtgttgtgttctttataaccaccaagtattaaactgtaaatcataatgtaactgaagcataaacatcacatggcatgttttgtcattgttttcaggtactgagttcttacttgagtatcataatatattgtgttttaacaccaacactgtaacatttacgaattatttttttaaacttcagttttactgcattttcacaacatatcagacttcaccaaatatatgccttactattgtattatagtactgctttactgtgtatctcaataaagcacgcagttattgtaccaaaaagtt

SEQ ID NO: 70555 - DNA, 1042 bp, Homo Sapiens
  misc_feature (163)..(173): n is a, c, g, or t
gggagcttctgcagggcttctcttgtttacacagctgcatcagacaatgccatttctccccaccacggaaccttccatctaagatttcttccagggaatgccagcaatcaggcagcacccagctgtgggggcagtggggtgggggagacccacattgatgacnnnnnnnnnnncttttaatgaagaaacaccaaagaaagctgtggaaaggacctgccccacatgaaaaggataagccaagatggctgtaaacacagagcatttgagctgccactcttggagcacattgatttttcaaaagccagctctgtcaggaaaggaggtgctgttatgagcagctcttccagtgggcaaagaggacgcccataatttcttccattgctagctcatctgtgggaccaatttggtgtaagcaacctgtggcctgcacttgtggcctcgaaggaagcacaaaccctccatccacttcccatttcctctgcccttttccacctcccccttccatcccaccagctgccagtggctcccagaaagccttattgagccccttgttgacacttggggctgcggaggcctctccctactggtctggcctttcctgagaggcaggtcttccgtcctcagagcctttctggaacaaggagaatgcctgtgcaggtggacacacaggcctggcctgtcgctctcacttgtcttccagcggggagcttcacgttgccgagtggaagaaccatgacctccacttgcttccaaggtgctagggaagtttcagggtacgctggttcccctctccagctggaggccgagtttctggggactgcagatttttctactctgtgatcgattcaatgcccgatgcttctgtttcattcccgaccctttctactatgcattttccttttatcaggtgtataaagttaaatactgtgtatttatcactaaaaagtacatgaacttaagagacaactaagcctttcgtgtttttccacaggtgtttaagcttctctgtacagttgaaataaacagacagcaaaatggtgcc

SEQ ID NO: 70556 - DNA, 701 bp, Homo Sapiens
ataaagtatcagactttttgcttgagttcttcagtgtaaattattttttacatgtaaaagtactgtattcaaccagttgcataatacagcaaaaatctttgaattcccctttaaaataactaaaatttgatggtttccatgacagatttatagcacatatagggatcttgcatatatctgcagaaacttcattatttttcaaatgaaatggtgtatacttctttcaaatgaactttgagacttgaaacatattttagtcattttttgttaaatattgaatttttaaatacacatatatcaaaaatagttgagaataaaaagaaagcctaatcatcagcaattattttatttttaatttggccatctctgacattgcagtcaatatcttagggtattttcttgaatttaataaagtcccatgggtgggttcagggtgaatgggagtattaacaacaaccaaaaaatatctattgagacacagtagagtctcagtaagagaaatattaaaatgtaagaaaggtcaccattagtgatatcaactgtagtttgttactttgaactatatttctgattaactctttatagtaataacttagagctgttagctcagatatcttaattagctcatatgaaaaacaagtttaattttattatttactgaacatggcaaaatgcttttcaatctataataaaactgggat

SEQ ID NO: 70557 - DNA, 1382 bp, Homo Sapiens
cagtcgacggtaccggacatatgcccgggaattcggccattacggccgggaagtaattatggtatatataaggcgttgggaaaaaacattttataatgaaagtatgtagggagtcaaatgcttactgtaaatgcataagagacgttaaaaataacactgcactttcaggaatgtttgcttatggtcctgattagaaagaaacagttgtctatgctctgcaatggtcaatgatgaattactaatgccttattttctaggcatataataatagtttagagaatgtagaccagataaatttgtttactgttttaagaaaactaccagtttacttacagaagattcttttttccaaacagtaggtttcatccaagaccatttgaagaactgcaaactctttctcttagaaaagaaagagggcagcctaaaataaacgcaaaatttgcttatactccatcacattcagatgtcttggttgtgacttattaccagtgtggcagagaacccaagttacattttagatcaaaatattctttatgtaggtattgttaaaaggctagagcctacaagttgctcttccatgcgttggtcagggggccctgaaaacactggtaatattaagagtctttctcagggtaacttaatgttttcttaatgaacaatgtttccagctacaaattcttccaataaattgtcttcctttttgaaaagtactctcatagaagaaatttagcaatttctcgttgactgactcagtctattttaagtattcagaaaagattttgatccccattgagttaatgctctgccttgaaaattatttttctgatccttgttagtgataacattttttttctactgaaggtcagaggataggaaacaagtatttctcttctggtatacatgtaatgtattctgtaaaaaagtattcatattggcaattttagttaggcataatattgtggttgtaatttttaaaacttagtgttttgtctgattaaagcaggcactgatcagggtatctcctaagaggtaattcacttcttattcctttccaataattattacattctaaattttcatctatgagaaataacaaacaagaagggaatagaattaaattggggtataatctaatcttcattgtttaaatggtttgccttctcaccattgaagccatttttttatagcctcagaaagaggaaataatgcctccaccattttctacctggtgacttgaaaattgaacttttaagttaggaagaagttagagtcagggaacttgtataccactatctatgcagcattgttatagtctgattatttctgtgttttgaatatgattttcctaatgctctaaataaaattttgttaaaaattaaaaa

SEQ ID NO: 70558 - DNA, 904 bp, Homo Sapiens
  misc_feature (52)..(368): n is a, c, g, or t
  misc_feature (383)..(418): n is a, c, g, or t
cttcctctccctattccctcccatgaaaaatgcttcctggccgggcgtggtnnnnnnnnnnnnnnnnnnnnnnnnnnnnnnnnnnnnnnnnnnnnnnnnnnnnnnnnnnnnnnnnnnnnnnnnnnnnnnnnnnnnnnnnnnnnnnnnnnnnnnnnnnnnnnnnnnnnnnnnnnnnnnnnnnnnnnnnnnnnnnnnnnnnnnnnnnnnnnnnnnnnnnnnnnnnnnnnnnnnnnnnnnnnnnnnnnnnnnnnnnnnnnnnnnnnnnnnnnnnnnnnnnnnnnnnnnnnnnnnnnnnnnnnnnnnnnnnnnnnnnnnnnnnnnnnnnnnnnnnnnnnnnnnnnnnnnnnnnnnnnnnnnnnnnnnnnnnnaaaaactctgtctcnnnnnnnnnnnnnnnnnnnnnnnnnnnnnnnnnnnntggcttccaggacagagcatgctcatttgctggcggacagttccagaaacagaccctgttagtccttctacttacctgctggatttttcaagcactaaatttataactttttgaaacaaaataatgtgtaattttccatttgggggcaaactctattcttgtgagcattattaaatcttgtttgtaaatatattgtctttctcttaatatttgctctgggtcaggaagaagctgttcacggtgtgataatactctttagattgtgctttcattattatagatgcatcatgtcttctgctttcacgtgtctgggatggggtcagaaatgcatcctccagctgacagaaaaatccaggatgagatcagaaggatactggtgttttctgacttttacaaaattacttgtttgttttcatttaaaaaaaagcataaactatgtttcttgttactattagaattattaaatttcaaaatgaatccaacctt

SEQ ID NO: 70559 - DNA, 944 bp, Homo Sapiens
ctacaaaaggcaggtgatgattgttgatctgcaactattgtgttgtgcactccccgaaagggggcagagtaggaagccagggaaggtgctctgaggatgctttctatggagggaataagggctgcaggacactcactggagggagtgtctgggcccttctcctgtcctcctcagccttccctagctcatgtctatggtgttgaagacccattctgtgaacttcttcagcttgtccgaggcgttctgggactcctcctgtagcctcaggttgtcctctcgcaggtgctgcacctccgcctgaaggtgagctttgtcttctttttccttcttcaaatcttcccgaagcatcttcagcataccttccagctggtccactttagaagccagagtgggagaggagtctttactgctgctgtaaggcttcatctgggccagagcctggtcctccagctgatcactgttggatgcagcactcaaggggcgatggttttcatcactagcagcaaaaaatgaggctctctggacctcataggctttggcagcatctaccaggttggaccaatccaagtctgcagcagtgtcaggcaggggcatcaggccagggtcgggcataggctgcctgcgggtctcctggatgtcagtgagggagctgtccgaggctgagaactctccatgcagcgatttcattcctaaggtgtaagaaggcctcctcaacgggagcgacttggggagagaagggtacgtgctactgaaaaggactttgttgggcagggcttggtccacaagtgacgccctggaggtgaaaaagtgctccctctggctattgtaaatgctctcgtccgacagcgttctgtgcaaggcccgccgtgaggtgggggtgctccctaaaggagacctgggtgaggaaattgcctggaacttaaaactcttctgtgattcaggag

SEQ ID NO: 70560 - DNA, 608 bp, Homo Sapiens
  misc_feature (47)..(47): n is a, c, g, or t
  misc_feature (113)..(192): n is a, c, g, or t
tagtagtttcatttctccggaagctgagccagtctcctggtctagcncaggttgccagaacgcttggcattgcagagtgctagagccagtggagaacttgccaacttgattgnnnnnnnnnnnnnnnnnnnnnnnnnnnnnnnnnnnnnnnnnnnnnnnnnnnnnnnnnnnnnnnnnnnnnnnnnnnnnnnnccaggattaagcttcctgactcccagttcaccatgaaaagggttctggcaacaggttcaagctggagaatccttcaaaatgctacacccacattctctccaactcttcatctccctgatcttccagacaaactacctggatgttgcccttaaaccatttctagctgttaaccctgtccagaaaaatgattgagtgatagctgagaagtggaaagtgtgggatttttggcaggtgctctctttcctccgccccccgcgccattctttctcttcctcctctctgtaatggtatgtccagcctcactctccctccctggtgctgtatgcgttccccctgttagctacatttgtgatcacatacccttcttttaagtgaatttttttcatttgatttgtcaataaacgaatcaaactgga

SEQ ID NO: 70561 - DNA, 659 bp, Homo Sapiens
tcagtcagaggtcataccttcattgccatcgtagacttcatagtggtgagaaaccttacaagtgtaatgagtgtggcaagaccttcagtcacaagccatccccttgttcaccatcgtagacttcatactgaagagaaatcttacaaatgtacggtttgtgacaaggctttcgtgcgtaattcatacctggcaagacataccagaattcacactgcagagaaaccttacaagtgtaatgaatgtgggaaggcttttaatcaacaatcacaactttcacttcatcatagaattcatgctggggagaaactttacaaatgtgaaacatgtgacaaagttttcagtcgcaaatcacaccttaaaagacataggagaattcatcctggaaagaaaccatacaaatgtaaggtttgtgacaagacttttgggagtgattcacacctgaaacaacatactggacttcacactggagagaaaccttacaagtgtaatgagtgtggcaaagcctttagcaagcagtcaacacttattcaccatcaggcagttcatggtgtagggaaacttgactaatgtaatgattgtcacaaagtcttcagtaacgctacaaccattgcaaatcattggagaatctataatgaataaagatctaacaagtgtaataa

SEQ ID NO: 70562 - DNA, 1071 bp, Homo Sapiens
  misc_feature (770)..(918): n is a, c, g, or t
  misc_feature (988)..(1022): n is a, c, g, or t
gtgtgagcgactgtacccagctgacttgggtcttaatggtctacttttcatctataaaacaaacaagctttgaccaaaaataaaaagatctattacattatgactttcaaaaacaattcaattgctaatataaacatattaaaagttatagttcgtcacattaaggaaaaattcacctgtatggatgttagaatggaagacacatcataggttggactccaacggttctgaagtatgtccagacatatactaccatctgcatagactaagaacaaagaagtaggtacattaaacgtaacaagaccactaaggttttaacattaatagacttactgaatagtcaagaatactttgcttttgaagtttaaagattcctatgttgcttcccagttaactgcctaaaaagataagtcataaccaccactagtgaaataatcaggatgatcagagaatgtcagatgtgatcagtataaaactggaagatatttagtgttcatcctttggaaaaggctgccctattatccaggaaatcagaaacatttttgaacagggtccctagctatccacagacatgtgggaaattcattccaccaaatttgtaggctgtatcccctatctgaaatagacaaaagatcactcagagttcacaagatttcattttggcataaagataaacatatctgataccctgaaaaatacttcattaacctaaataaaaggcaagctgttctaggcttactactattttaaaaagtgcaaagtggttaagnnnnnnnnnnnnnnnnnnnnnnnnnnnnnnnnnnnnnnnnnnnnnnnnnnnnnnnnnnnnnnnnnnnnnnnnnnnnnnnnnnnnnnnnnnnnnnnnnnnnnnnnnnnnnnnnnnnnnnnnnnnnnnnnnnnnnnnnnnnnnnnnnnnnntttctaaacgctagtgaaacccggccgtaatggccgaattcccgggcatatgtccggtaccgtcgactgnnnnnnnnnnnnnnnnnnnnnnnnnnnnnnnnnnncggccgcttcctcgctcacatgactcgctgcgctcgtgctgttatccgg

SEQ ID NO: 70563 - DNA, 1785 bp, Homo Sapiens
  misc_feature (1730)..(1738): n is a, c, g, or t
cggccgccagaccgaccctcgacttcggagaggcagcgcggttcctctgggtgcttccgcctccccttctcctgcttctccagcctcttcggcctcctcgcccgccgcgggaacccgagaccccagtgtatgccccacccctgaccccgctcgcgacatgtccaccccggctcggcggcgcctcatgcgggacttcaagaggttgcaggaggatcctccagccggagtcagcggggctccgtccgagaacaacataatggtgtggaacgcggtcattttcgggcctgaagggaccccgtttgaggatggaacatttaaacttacaatagaattcactgaagaatatccaaataaaccacctacagttagatttgtctctaagatgttccatccaaatgtctatgcagatggtagtatatgtctggacatacttcagaaccgttggagtccaacctatgatgtgtcttccattctaacatccatacagtctctgttggatgaacccaatcccaatagtccagcaaacagccaggctgctcagctgtaccaggagaacaaacgggaatatgaaaagcgtgtttctgcaatagtagaacaaagctggcgtgattgttgaccccgggtacagtttaaagaagctggccataagaaaaatatatattgatgtgtttgtcacctccctactcctgtcattacatttactttattaaaagcaaaataactgttgtgctgtttccatcttccttgccaagttttcctaccccttctaccctctccttaaacatcagaaaacaccctctatgaaatcaaatgtactgtacctgggttacttgcaaaaattactaatgcttcagtttttctgttgtatttcatttccagttttcaggcagttatttttattattgtactttaagcttttaagatgaattgttatacaagaggtgcttatgcttagcttgatgaccaggatgttatttttaacaaaatgattgctgaagtgtttcatcctggctggtccttcacttgtgttggatttagaagtgaatgtgtttggaatatggcctacagagaatagaaacaaatccatgtaaacaattttgaaggaggcatgggagctaaaaatcctgtgatactaagatctcagtcatatgaattacaacgtagtatttactggcaagaaggagaaagttgaaggactcagctaaaggagtacagcaattgtagtaactgacacatcctctctttgcaagctgctgactgggcacactcatgccaagtttcagaattattggtcttctgggtttttgctttttaaaagaggtgtgggagcagaggaatggaaacaatcgtgagtttttgagctagggaaagttggagctcctttaatctttttaaaggatcagtgctgccctaagtgaataaactcaattgtccatctttattttagagttttaatgaattcaaggaagggagcatagcatatctgtggcaaactattttccactcaaatcctgagttattgctgcatgctttaatttcttccctttcagcatctgagaaccttaaagccaatgtctgcgatctttttttggatatttatacttttagatatatagtacctttaagtagcagtatgggacaaggcttgtaaatgttttgtctaatgttctattgtcaccttttatgcatttatcacttccaaatctaactttgcacaagtaacccatgtnnnnnnnnntgtacatttttcaaaagttgtaaataaaaataaccttaaaatttcaa

SEQ ID NO: 70564 - DNA, 1374 bp, Homo Sapiens
cagttcaagtatgactacttcatcccaagccaggctttctggaggccgagagagctcaatccattgcctatcacctcaaaattgaggagcaaagagaaaaagtacatgaaaatgaaaatataggtaccactgagcctggagagcaccaagaggccaagaaagcagagaactcatcaaatgaggaggaagcgtcaagtgaaggcaacatgagggtgcatgctgtggattcttgcatgagcttccagtgtaaaagaggccacatctgtaaggcagaccaacagggaaaacctcactgtgtctgccaggatccagtgacttgtcctccaacaaaaccccttgatcaagtttgtggcactgacaatcagacctatgctagttcctgtcatctattcgctactaaatgcagactggaggggaccaaaaaggggcatcaactccagctggattattttggagcctgcaaatctattcctacttgtacggactttgaagtgattcagtttcctctacggatgagagactggctcaagaatatcctcatgcagctttatgaagccaactctgaacacgctggttatctaaatgagaagcagagaaataaagtcaagaaaatttacctggatgaaaagaggcttttggctggggaccatcccattgaccttctcttaagggactttaagaaaaactaccacatgtatgtgtatcctgtgcactggcagtttagtgaacttgaccaacaccctatggatagagtcttgacacattctgaacttgctcctctgcgagcatctctggtgcccatggaacactgcataacccgtttctttgaggagtgtgaccccaacaaggataagcacatcaccctgaaggagtggggccactgctttggaattaaagaagaggacatagatgaaaatctcttgttttgaacgaagattttaaagaactcaactttccagcatcctcctctgttctaaccacttcagaaatatatgcagctgtgatacttgtagatttatatttagcaaaatgttagcatgtatgacaagacaatgagagtaattgcttgacaacaacctatgcaccaggtatttaacattaactttggaaacaaaaatgtacaattaagtaaagtcaacatatgcaaaatactgtacattgtgaacagaagtttaattcatagtaatttcactctctgcattgacttatgagataattaatgattaaactattaatgataaaaataatgcatttgtattgttcataatatcatgtgcacttcaagaaaatggaatgctactcttttgtggtttacgtgtattattttcaatatcttaataccctaataaagagtccataaaaatccaaatgctt

SEQ ID NO: 70565 - DNA, 946 bp, Homo Sapiens
tgtaaaatgaagactgaactctgttcaaatgctttcatgaacctggtttgagacggtaggaaagcaacaaaacgtgggaacctggtgactaagggcctggtgcaaggacttgggaaatgtcattgataatagatggtggggttttcccccctttagaaatgttggatattaagtgatataaacacttcttttaactccgaaaatcttctgagaaatcacaaaattcacggtatgcttggaacgattgagattttctaggtagatgctgaatagcctagacatcaaagttggtgtgaaccaaaatagagtcagctgacccagcatcagccacactctgggttggaaaatgtttgcctgttggaattaatttaagcttaagtatatatcaacattattttattgtgcaattaaaacaatacaaattcatggttttttaaagttaaaaattctaaccactgtaacaacagtttttgtgttattttctgtattaaacatcttgttgcacgcatttgaggtcatcagggtgcaaaatttgtattcctgaaaatgtcatatattttcattaataaataacctaaatatgataaaacataaagcagtgttctggttcatctggaattttgctgtactttaaatctttcagactcagctactgataaatgaaacgttacacaggtgtgaaccaaatccaaataacctcgactggtctactatcataatcacctaaacagaacaaaactttttcctcagctttaagagtccagggcttcggataacagctgccatctgccacctgctaccattgacctacgtgaacacagacattctgtccccaccttgatggtgggtgggctgctccccttttctttgttaaattttgtgctttcatcacattttctctattctgacctctgttatgagaaataaaagtcactgattccatttt

SEQ ID NO: 70566 - DNA, 845 bp, Homo Sapiens
gctgtgggtgagactgcaccaatgcgtctccgacatgatgtccccctcaagcagccatcactggccaccatgtgcccgactcgggccctgagcccatcctggccttctacagcagccgcctggcaggccgccacaaggcccgcaagccacctgcgggttccaagtccgactccaacttcagcaacctcattcggctgagccaggtctcgcctgaggatgacaggccctgccggggcagcagctgggaggaaggagagcatctcggggcctctgctgagccactggccatcctgcagcgagatgaggatgggcccaacattgacaacatgaccatggaagctgagaggccagaccctgagctcttcgaccccagcagctgtcctggagaatggctgagtgagccagactgcaccctggagagcgtcaggggcccacgggctcaggggctcccaccccgccgctcccaccagcatggtccaccccggggggccaccagcttcctccagcatgtcaccgggcaccactgatggtgattccacccctgcccatcactgggggctgcgctagctgggctggcattccctcccaacctgaactgctcctcagagccatctcctgaacccacaaattattcttacagaaagatagttatccagaaattctcattccccgtctgcggtgcggtgcgtgcctgcacacctctcctaaacacagcagggctttggagtctggcccatgctccttggccagaaggacagcaggaaagggggctgcaccccgctggccctgcgctcgcccttggccctgctgcctctgtctatttcaatatagaactgttcagcaaa

SEQ ID NO: 70567 - DNA, 307 bp, Homo Sapiens
ttaatgtacatttgtgtgcaccagaatggaatgtgctctttttaaagagctggacagtggttgcttcagacttctgaataccagaaagacttgccttttaatttttaaatattactttttacatcataaaatgtgttatcttatccatgtatttgaataacatcatatataaaggtagttttttgcttgtgcttagtgaagcctccttttttaacatacatttgatatgctttatgttctttttcttgatttttagtactgagaatttataagccaagaagtaactgacaatatgtttagcaggatt

SEQ ID NO: 70568 - DNA, 283 bp, Homo Sapiens
gaagtacttaacatctcagaagctagattgggaaacatgctcagctataagaactgagctttaaattttgagtttaaaaatgtacatcaggagcagctggggagggtctttttttaaaaaaatctttcaaatttggttttctgtgcatatggccgttttgtaaatactttggggtttttcatttttttgaaagtagatgaaatctgttgtgggatttttttcccgaaacattacaaaataacctgtttatttacatgcaaataaacttctttggataaaaagt

SEQ ID NO: 70569 - DNA, 644 bp, Homo Sapiens
  misc_feature (86)..(140): n is a, c, g, or t
  misc_feature (191)..(191): n is a, c, g, or t
tcagcttagccacattcccaagtttaggtgcactgagccatatagcccagtgtatgcatgtgtgggttgttcatgcacacacacannnnnnnnnnnnnnnnnnnnnnnnnnnnnnnnnnnnnnnnnnnnnnnnnnnnnnnaggtcacttgtacacttggtttcctagtagaagctcacttgccacctctcnagaggggtcccggattgcatccatcacaatcccaaaactagagttggggggaactggagggagcaaaacactgatttgatactagtcagtttgcttgaaactagttcacctaaagctagatctcttaaaaccaatttactgaaaacttgtttgcttaaagttaatgacttaatgactaatttgccaaaagctcaattcctattttggtgtgtttatatccatttaggtgtcctattcttttttgtcatgctttggatatttcaaggatttatatctattcatccaagagtacttctgagttattatcagcaacataaatttatcaaatttgcagcactttgtaaatgatgagattgcttcctacctttatggatgtctttttctatgttatctaccattcaaaaacttttttaaaaagtttaaagtttctagcaataaatacaattggtacag

SEQ ID NO: 70570 - DNA, 1444 bp, Homo Sapiens
  misc_feature (72)..(72): n is a, c, g, or t
cttaggtggagccatgattgatggacagtcagcttttgccaatgagaccctcaataaggctcctggcatgantactatagaccaagggatggcagcactgaagttgggtagcacagaagttgcaagcaatgttccaaaagttgtaggttctgctgttggtagcgggtccattactagtaacatcgtggcttccaatagtttgcctccagccaccattgctcctccaaaaccagcatcttgggctgatattgctagcaagcctgcaaaaacagcaacctaaactgaagaccaagaatggcattgcagggtcaagtcttccgccacccccgataaagcataacatggatattggaacttgggataacaagggtcccgttgcaaaagccccctcacaggctttggttcagaatataggtcagccaacccaggggtctcctcagcctgtaggtcagcaggctaacaatagcccaccagtggctcaggcatcagtagggcaacagacacagccattgcctccacctccaccacagcctgcccagctttcagtccagcaacaggcagctcagccaacccgctgggtagcacctcggaaccgtggcagtgggttcggtcataatggggtggatggtaatggagtaggacagtctcaggctggttctggatctactccttcagaaccccacccagtgttggagaagcttcggtccattaataactataaccccaaagattttgactggaatctgaaacatggccgggttttcatcattaagagctactctgaggacgatattcaccgttccattaagtataatatttggtgcagcacagagcatggtaacaagagactggatgctgcttatcgttccatgaacgggaaaggccccgtttacttacttttcagtgtcaacggcagtggacacttctgtggcgtggcagaaatgaaatctgctgtggactacaacacatgtgcaggtgtgtggtcccaggacaaatggaagggtcgttttgatgtcaggtggatttttgtgaaggacgttcccaatagccaactgcgacacattcgcctagagaacaacgagaataaaccagtgaccaactctagggacactcaggaagtgcctctggaaaaggctaagcaggtgttgaaaattatagccagctacaagcacaccacttccatttttgatgacttctcacactatgagaaacgccaagaggaagaagaaagtgttaaaaaggaacgtcaaggtcgtgggaaataaaaggcagttctacacagactgcagcaacggttgcatctgcatatcctaagaggaaaaaatgaccttcaagagaattaggacttttttcttaatttcactgacttcagagacgattgcagacttgcagtttaagtattggaatttcacaaaagacataggacttaactggaaaatgaaaa

SEQ ID NO: 70571 - DNA, 632 bp, Homo Sapiens
tctgtaccccatgaccttatccttcctctccttccttgttacccatgaaaaactggcaacattccaagaatagcatctgtacaaaggggaaagaacataaaggtaaaacaaaacaaaacaacattttgagaacaaagatgaccataaccactgaagggaatcacatcttttaagacaaattcatattcttttatttgttatggcagatgacaagatggtacaacctttattcttttccaaaataaaacaaagggcacagcatctgtagtcagccgacaactatttcggccttttgggggtgggtctggccgtacttgtgatttcgatggtacgtgaccctctgctgaagacttgccccctgcccgtgtacatagtgcattgtttctgtgggcgggcccagcactttccgtcaacgttgtactgtatgtgatgaattgcgttggtctctgcatttttctgcagaagaggagtaaccgctccaggtaccttgacctttgtacagcccagaggccaacactgtgggtgtgtgactctttagcaaaaaaaacccatgtggtgatgatgtgtatatatatgtgaggatgtatcgggaagatttctaaataaaagttttacaaaggggctaaaaaaaa

SEQ ID NO: 70572 - DNA, 1099 bp, Homo Sapiens
  misc_feature (15)..(15): n is a, c, g, or t
  misc_feature (26)..(26): n is a, c, g, or t
  misc_feature (168)..(262): n is a, c, g, or t
  misc_feature (266)..(373): n is a, c, g, or t
gtctgctttgtgctntgctccattcntctgcgttccctgatcttgatacctatacgccttgatgagtgtaccgtcccgcacgaacgacgagccagcggtcatgagcgagaagcggagagcgccatacgcaaacgcctctcccgcgcgtgccgattcattatgcagctnnnnnnnnnnnnnnnnnnnnnnnnnnnnnnnnnnnnnnnnnnnnnnnnnnnnnnnnnnnnnnnnnnnnnnnnnnnnnnnnnnnnnnnnnnnnnnnccgnnnnnnnnnnnnnnnnnnnnnnnnnnnnnnnnnnnnnnnnnnnnnnnnnnnnnnnnnnnnnnnnnnnnnnnnnnnnnnnnnnnnnnnnnnnnnnnnnnnnnnnnnnnnaagaattcggcacgagggttgtattaagttcttcatttctgttgattttttttattgcatttatgattcagtggctgggaattgagaatttatttgaaatagaataggtaacacctcagcgtactatagaaaatgcactcagctcaactgctgtgtttaaaatacacattttaaatccctctttacagacactaacataaaagtacatctttctgggttgtaaacatgtggtagtaccagagtattgtatagtcaatgttaaataaaagccaaaactggaatgtgcagaaagtaggctttggttaatttgtggattcatttttatttttgtctttgtttaactttttaaaaaataagatttctggagtagattggtatattctgttaaagacttacagtgatccattttgcttacactgttgcatcacaagggactcacccagggaccatgacctgctggtgtgtgtgtatatttacaaaaacaaaacaaacaaaccacccattgggatataaggtagcaatcacaaactaaagactgcggcttgttgaggtgcaataccctgactcccaaagttagttacagtgggttttattgtttttgtgactgaaggatttattcagactgctgtactcttcatttgatgtaacaaaatgctattaatctaaatatttgtaaataaagtacctgtatctagattaaattaaaattggttgcattattttctg

SEQ ID NO: 70573 - DNA, 1292 bp, Homo Sapiens
  misc_feature (62)..(80): n is a, c, g, or t
  misc_feature (85)..(100): n is a, c, g, or t
gtgccaatctcaaaattaaccctcactaagagggaataagcttgcggccgcggctgtaggcnnnnnnnnnnnnnnnnnnnaattnnnnnnnnnnnnnnnnctctggttgtaaaaacagtttaacacaatactaaactgctaaacaactagatgtaatcaggttatcaaaggcaagtagagtaataaatctctcctgcatggtaaatctagactttttttcccccttgtcctcgtgataagtatgtcaccaatatatgatttaaaccgagcactgatgctggacttcatgatttttaccctccctttggcaaggctttgtctcactgtacggtttaatttggtgatatcttaagcctttcttcccatccttaactgttcaagtatgtctgttgtaaccaataagtttattgctgtgaaattacttctgatggtagagaaggggttctataactgcttttgttttgttttggataaatttcctgttgtgtgggtggcatttttcttaacgagatttgcttctgtcttagcctcacacagggaaaatatccatttatcttctctctcgtgcttaattaatagctttatctgtttttataccattttatccctttctctgtaacagaaagtaaatatggataaaatttgaaggaatcgaactaacaatacattctgtgtatattattttaatgaagaaaataaattgattactggcattggaacagtataaaataccagtttgtacagtatgacctatatgtgaccatgttactcccttccatttcacacaaagaaatagacacaactgcagttcacaagtagtactggcgccaccccttggtgctggcagtgtttggggacattatgctggaaagagctcctagcatcagaggattaacactagcagattctgttccatctttgcactgttgcttacctgctgattttcttaactgttcttgtgcaatcgacaatgtgctaacctgcttttctctttttgtaaacgtttttgcattacaggctgcattcttgccttactgtatagaaaaagaaaaaaggctgggtttactattgcacattttaagcttttatacctttatcttcttggaatggtcagattctgaactggacagtcagaaccacaggtctgctgttaagggattttaaattgtgcatttttaaccctacagtgaaataacttaagatatccctgtgttgccacagtgtgaaggactgttttatcgtcatgttggcataaacttgttttgtaaaaggtaccgacaccattttcaagt

SEQ ID NO: 70574 - DNA, 567 bp, Homo Sapiens
  misc_feature (184)..(247): n is a, c, g, or t
cactcagctcaactgctgtgttaaaatacacattttaaatccctctttacagacactaacataaaagtacatctttctgggttgtaaacatgtggtagtcccagagtattgtatagtcaatgttaaataaaagccaaaactggaatgtgcagaaagtaggctttggttaatttgtggattcatnnnnnnnnnnnnnnnnnnnnnnnnnnnnnnnnnnnnnnnnnnnnnnnnnnnnnnnnnnnnnnnngttaaagacttacagtgatccattttgcttacactgttgcatcacaagggactcacccaggggccatgacctgctggtgtgtgtgtatatttacaaaaacaaaacaaacaaacccccccttgggatataaggtagcaatcccaaattaaagactgcggcttgttgaggggcaataccctgactcccaaagttagttacagtgggttttattgtttttgtgactgaaggatttattcagactgctggactcttcatttgatgtaacaaaatgctattaatctaaatatttgtaaataaaggccctgtttttagattaaatt

SEQ ID NO: 70575 - DNA, 2110 bp, Homo Sapiens
  misc_feature (71)..(214): n is a, c, g, or t
  misc_feature (748)..(748): n is a, c, g, or t
gctgggtggcgaattcggcacgaggcgacgtagcgcggcgctcggaactgacctactaacacacatctctnnnnnnnnnnnnnnnnnnnnnnnnnnnnnnnnnnnnnnnnnnnnnnnnnnnnnnnnnnnnnnnnnnnnnnnnnnnnnnnnnnnnnnnnnnnnnnnnnnnnnnnnnnnnnnnnnnnnnnnnnnnnnnnnnnnnnnnnnnnnnnnntttctttctcctcgccggcccgagagcaggaacacgataacgaaggaggcccaacttcattcaataaggagcctgacggatttatcccagacggtagaacaaaaggaagaatattgatggattttaaaccagagtttttaaagagcttgagaatacggggaaattaatttgttctcctacacacatagatagggtaaggttgtttctgatgcagctgagaaaaatgcagaccgtcaaaaaggagcaggcgtctcttgatgccagtagcaatgtggacaagatgatggtccttaattctgctttaacggaagtgtcagaagactccacaacaggtgaggagctgcttctcagtgaaggaagtgtggggaagaacaaatcttctgcatgtcggaggaaacgggaattcattcctgatgaaaagaaagatgctatgtattgggaaaaaaggcggaaaaataatgaagctgccaaaagatctcgtgagaagcgtcgactgaatgacctggttttagagaacaaactaattgcactggngagaagaaaacgccactttaaaagctgagctgctttcactaaaattaaagttggtttaattagctccacagcatatgctcaagagattcagaaactcagtaattctacagctgtgtactttcaagattaccagacttccaaatccaatgtgagttcatttgtggacgagcacgaaccctcgatggtgtcaagtagttgtatttctgtcattaaacactctccacaaagctcgctgtccgatgtttcagaagtgtcctcagtagaacacacgcaggagagctctgtgcagggaagctgcagaagtcctgaaaacaagttccagattatcaagcaagagccgatggaattagagagctacacaagggagccaagagatgaccgaggctcttacacagcgtccatctatcaaaactatatggggaattctttctctgggtactcacactctcccccactactgcaagtcaaccgatcctccagcaactccccgagaacgtcggaaactgatgatggtgtggtaggaaagtcatctgatggagaagacgagcaacaggtccccaagggccccatccattctccagttgaactcaagcatgtgcatgcaactgtggttaaagttccagaagtgaattcctctgccttgccacacaagctccggatcaaagccaaagccatgcagatcaaagtagaagcctttgataatgaatttgaggccacgcaaaaactttcctcacctattgacatgacatctaaaagacatttcgaactcgaaaagcatagtgccccaagtatggtacattcttctcttactcctttctcagtgcaagtgactaacattcaagattggtctctcaaatcggagcactggcatcaaaaagaactgagtggcaaaactcagaatagtttcaaaactggagttgttgaaatgaaagacagtggctacaaagtttctgacccagagaacttgtatttgaagcaggggatagcaaacttatctgcagaggttgtctcactcaagagacttatagccacacaaccaatctctgcttcagactctgggtaaattactactgagtaagagctgggcatttagaaagatgtcatttgcaatagagcagtccattttgtattatgctgaattttcactggacctgtgatgtcatttcactgtgatgtgcacatgttgtctgtttggtgtctttttgtgcacagattatgatgaagattagattgtgttatcactctgcctgtgtatagtcagatagtccatgcgaaggctgtatatattgaacattatttttgttgttctattataaagtgtgtaagttaccagtttcaataaaggattggtgacaaacacag

SEQ ID NO: 70576 - DNA, 1759 bp, Homo Sapiens
gccggctcatcggcgaggagcacactaataggggcatggtgaccctgactcaccatcccatcccagctttcagggagtgggggtagtgtggtctccatgttcctactatgcctaagaagagatggctcaccttgggaggtgccaggctgaaactaggtcctttccgggtctggatgctgccgctcaggagcaggggcgtggcctcagctgcctctgggagcttcccgggaatgacagggtttgaggggagtagatatgagagggagccgctcctggttctggagtcttaggaggttccaacttgcaggatcctttcccagagccctccatggagaaaacagcaaaatgaagcccttacctgcttgctgtctgcaagggagggagccgagccccagctgataatcccccagcactcacccttcctgagctgagacttcggggctgtggagaccagcacaggacatagtggtgctttttaaatttatttttaactgtttctcatatgtagcaacccctcctcccctcctgggcatgtttacacaggctctgctctgggggctggcctggctgtgaggtttctggggaggcagagaggcagggactttggggccttagtcaccatccatggtatcacctcatctcacttcctgtgagggacagggcctggctgatgtgatcccagctccccccagttcaggactgtctttcagctcctttgcccctggaggtgggggctgctggctgaggaggggtcaaggtgagttcaagaaagctacctgtggaaaatggaccaggttgggggggtgattgcaaagtctccccaaagcctggctcctcatgctcagtgccaggggcagaacactggggagccaggtatagagagccttcctgtcataactgccagtcctcttcctccaaggcctctgcatattctcatgttcccctcacccatcatgccagccacccctatccctcttctagcagggccaagatggggacagcagcagccctctggccttgggatgtgatgataaagcaagcctagggccagggtttggggagcagagagagccaagaagttgaccacgtgtgatttccagcccttcccactgggacttgacttcccaggtcaaggagtccgtctcattctggctggtcgagtgaccagaggcctgtgtgaatgtgtgcacctgcttttcctgcctggaatgttttctggctcagctgcagcaacatctgtgagcccagtgtctgccctgtgtccctgggctcgctccaagtgcaggaacatacatgcagggcccaacatgatgatggtgtgaagggcaggaaacagtcctctgaaggagtggggaggtgggcagtctgcccccgccaggtaccatcgcctcctgccagcttccttagaccaggcagggctgccatggtgctagctgcaagtccatcagtattgaccgtctcgctccatcttggtcctccggagtcccaagtttccttttcatcaaatctgacaagagagaagaaacatgggtgtgcttggcccacagggcctggtggtgatggacctccccgctccctcaagctctggatggctgcagtgttgtactagactttgttcaggctgttctcatctcagtattgccccttcctttcactttcacacttcatctcattcctgttgtcactttccccgaaacgaataaagtctccccagctcctgctgtgtaggctgggcagaaaccacaacacgtaaaaaaaa

SEQ ID NO: 70577 - DNA, 1020 bp, Homo Sapiens
  misc_feature (705)..(717): n is a, c, g, or t
gtaccaaggctagagaatgcctggtaaaagcttgaccagaaaactctcaaaagtaactgttactgccctactattcttaagatacttaaaatttgaataaagaacctactggctatgtaacattctaaggtctaccagatgctaccaaaaaatattagctacatggagtgttgctaaatatagctgagatttacaaaaccactttactctcaatggtcttgtttctttgctttctacattagttaaccagttttataccaaaaaatgcatgtttgaggaattgtatgaaattgggacaaaacaccttcatgtaaaccagctttgcaaaattttccagcccagatactcttcatctattcaaatggattgtcttattctgagcaaagacctgttgttaatcttcaagctaggttttgcagttcccaaccacaacattcttctattttgccaggctggtgcaaagtaattaaagatgtcaatcagaaatgtcaatgagactaaagtggttttgtaaatctcagctatatttagcaacactccatgtagctaatattttttggtagcatctggtagaccttagaatgttacatagccagtaggttctttattcaaattttaagtatcttaagaatagtagggcagtaacagttacttttgagagttttctggtcaagcttttaccaggcattctctagccttggtacnnnnnnnnnnnnncctgctggttgcgcagatacctaggcttgtccattttatgcatttcagcaaagtcattggatactattgcaacttgggaatactggtctgcatcaagtttattcggtagtttgaccgctagtatgttggaagttatttggattgtttttggaattttgactggctgaattatggttggtataaagttatgtgtataactggcaggcttatttatctgttgcacttggttagctttaattgttctgtattatttaaagataagtttactcaacaataaatctgcagagattgaacaaataaaaa

SEQ ID NO: 70578 - DNA, 739 bp, Homo Sapiens
  misc_feature (66)..(66): n is a, c, g, or t
  misc_feature (136)..(136): n is a, c, g, or t
  misc_feature (508)..(523): n is a, c, g, or t
aggaaagctacatctccaatagtttaggctgcaagtcagtagccaaacacaagagcatgtaagatntggaggacaaagtataaatattttaagtttacacaaccaagattataggctaccttcccaacttctaatntgaagagcactgaaaatggagctgtgaacacttcatttttaaaacctgacaatatggtgctattgactacttaatacaaagatatattacaatatttttaggtaaatgtattaagtctggcctgggcataaatgtacatacagaaaatgtttgtagagaattcatcaaaatcatgcccatttgctgttgtagagctacagtattcttcaatggtggtgactgaccagtgagtttctacttcttacagatgggacacaacagtcatgggctgtctcagctgcccaaagcctgaggcagaccacatgagagctgtggcttcttcttggattcaggttggataacccaattcagtaattaaatatgtaaattttnnnnnnnnnnnnnnnntgttttctaggaacttgaagagtacgtgacattataaaaaatgggtgttggaagactaattgtagaaatttgacctgagggccaatgttacttggtgtaagttcactcagacagacatgtcagaacatgcccaaagaagcctatatcttgctgctgggaaatgtaaagcagttggcatgtagaatacgataataaatcatttaagaaaccaccaaa

SEQ ID NO: 70579 - DNA, 666 bp, Homo Sapiens
ctactccaggtactcattgtcctgttactgattcacctttctgatccttttcaaccattttcccccaaggggggaattttacttaacctctagtatttgaacaactcaatatttgaattgttgccccatttgcttttacctgtactgtattcttggtcatctcaaatggcgtctaaacccagctactttgcattccagaagtttccattccctccaattccacctaatttttcatctgtcctagttactggctctttcttcatgtcttatttctcttgctttgggagcttaaaagattttacaagacctaattttgggttccttccttggagccatagttaccctgccaagaagagtagaaaatgggttcaactcctgtttcgctccaccaacacctctgtgagtctcatcatcagctgagcgatgatgccttacaggttgcatagcactggaactttcctagagtaacggctctgctgccagggtttctctgggctcattcttccactgacttaattatgatctatgcctaacagagccccagtacaactattttgcagaatggctgttaccctagaattactatagcacatattgagatatagttgtactccctagtagataggaactgaccccaacaataaactttgataataaagaaaaaaa

SEQ ID NO: 70580 - DNA, 709 bp, Homo Sapiens
  misc_feature (18)..(18): n is a, c, g, or t
actgccttagccatgatntcgttagtagacctatttatgattcaattgcaattttcagataggatgtgaacatggaatttcactgaaaatagtttaattttttatataaaaggttttgtatataatgtgtgtcagtgactattttcaaaatcattttcatcaagacaccttttttctaaaataggcattgcatacacatatgcacacgtatgtgcatgtgccacacattttttgtataatgttgggtttgattataaaagtgttgtcaaatgttttatttatctgcatatagcagtggttggcttttttgaattgaaatttttgcgcattgatgcattgaaataaggaaaattatttatctctgagcactaaacttatttttgcatatttctgtaatattgcagtccccagatccagaacatgggaagttagggaaaatgtgtgattttgtgttttgaattactgtcagaattacatacacaattacaacaaactttttttaaaagacatttcattgtactgcaaaaatctgaatatttatatttcttgtttttttctttatatgttttgcattttaatatgttgagccactggaaatttgtaacagattaatttgttataggagtttaaatgtgttgtcattgtctccattgtctttgtccagagcctattattatggaaacaataaaatttattgtgtcaaaaaaaa

SEQ ID NO: 70581 - DNA, 1019 bp, Homo Sapiens
  misc_feature (336)..(336): n is a, c, g, or t
attctacttggtcagctttgggacgatagtgcagctttgggtgatcttgaaaatcaaatactatcctatactccagctgcttaacttcattttattctttaatgtgtacctgaaagctcctggcaatgctggaaaatttttatcccagaggggtaggggggaggggaagccagagtccacttttgtcacaattcatttttattaatagaaaataaacacttattccagtttcaaagttgttatacttgaagttgctaatttaaaaaaacgaattttaaataatcacttaataatcctgctttgactaagacaatgaaatgtggctttaaaaaaaangtattcagcaccatttgctcataggtctttcagagtttgttcttaaagtttctggaactttcctgtctgtaaagtaacaggaattactgagctacattggaaagcctctctgggacaggcagtggggagttaagcagtcatcataaaggaatcagtgtacattcagcatggtgacttgactacacaacaatcccttcccctctactgtagctcaagagagacatgcttctaaccactgaggtatgaggagtctcagactgttatttgctgttagaattggtcttcccagctaataacagtacatctctggcacagatgctattggtccttaatgtcctgtgattttaggaaatagtttggatttagttcaatttattcagaaaccaaacgtgtttaattagcttcactactctggcagagtaagggtatgctggtttagtatctttataaaatatatataatgtataggtaaatcatagtcttaaatcatacctaaaatactgtatcatttaaaccaatatctattttaacaaaatgtttataactaaaaacagctgatgaaacactaaatccaaaggtatgacaaagaggactcagctctgtgttgcttaaagaacttttaaaaagcatgtgcccataacgtcattcgaggagagggaaggagcccccctcgctgtgccgaa

SEQ ID NO: 70582 - DNA, 1465 bp, Homo Sapiens
  misc_feature (98)..(132): n is a, c, g, or t
agacctttggaattacgaacttccacttaattaagtggggcgcctaagtcgccgcagcgaagacgagcgcagcgagtagtgagcgaggaagcggccgnnnnnnnnnnnnnnnnnnnnnnnnnnnnnnnnnnncagtcgacggtaccggacatatgcccgggaattcggccattacggccgggggagtttgcttggagctcctggggcctaacaaaaagaaacctgccatgctgctcttcctcctctctgcactggtcctgctcacacagcccctgggctacctggaagcagaaatgaagacctactcccacagaacaatgcccagtgcttgcaccctggtcatgtgtagctcagtggagagtggcctgcctggtcgcgatggacgggatgggagagagggccctcggggcgagaagggggacccaggtttgccaggagctgcagggcaagcagggatgcctggacaagctggcccagttgggcccaaaggggacaatggctctgttggagaacctggaccaaagggagacactgggccaagtggacctccaggacctcccggtgtgcctggtccagctggaagagaaggtcccctggggaagcaggggaacataggacctcagggcaagccaggcccaaaaggagaagctgggcccaaaggagaagtaggtgccccaggcatgcagggctcggcaggggcaagaggcctcgcaggccctaagggagagcgaggtgtccctggtgagcgtggagtccctggaaacgcaggggcagcagggtctgctggagccatgggtccccagggaagtccaggtgccaggggacccccgggattgaagggggacaaaggcattcctggagacaaaggagcaaagggagaaagtgggcttccagatgttgcttctctgaggcagcaggttgaggccttacagggacaagtacagcacctccaggctgctttctctcagtataagaaagttgagctcttcccaaatggccaaagtgtcggggagaagattttcaagacagcaggctttgtaaaaccatttacggaggcacagctgctgtgcacacaggctggtggacagttggcctctccacgctctgccgctgagaatgccgccttgcaacagctggtcgtagctaagaacgaggctgctttcctgagcatgactgattccaagacagagggcaagttcacctaccccacaggagagtccctggtctattccaactgggccccaggggagcccaacgatgatggcgggtcagaggactgtgtggagatcttcaccaatggcaagtggaatgacagggcttgtggagaaaagcgtcttgtggtctgcgagttctgagccaactggggtgggtggggcagtgcttggcccaggagtttggccagaagtcaaggcttagaccctcatgctgccaatatcctaataaaaaggtgaccatctgtgccggg

SEQ ID NO: 70583 - DNA, 623 bp, Homo Sapiens
  misc_feature (44)..(81): n is a, c, g, or t
caacactcttacacctgttatggaaaatgtcaacctttgtaagnnnnnnnnnnnnnnnnnnnnnnnnnnnnnnnnnnnnnnatttgcaccacttgtggcttttgaatatcttccacagagggaagtttaaaacccaaacttccaaaggtttaaactaccctcaaaaccactttccccatgagtgtgatcccacattgttaggtgctgaccctagaccagagatgaactgaggtccttgttttgttttgttccataatacaaaggtgctaattaatagtatttcagatacttgaagaatgttgatggtgctagaagaatttgagaagaaatactcctgtattgagttgtatcgtgtggtgtattttttaaaaaatttgatttagcattcatattttccatcttattcccaattaaaagtatgcagattatttgcccaaagttgtcctcttcttcagattcagcatttgttctttgccagtctcattttcatcttcttccatggttccacagaagctttgtttcttgggcaagcagaaaaattaaattgtacctattttgtatatgtgagatgtttaaataaattgtgaaaaaaatgaaataaagcatgtttggttttccaaaag

SEQ ID NO: 70584 - DNA, 1815 bp, Homo Sapiens
  misc_feature (1190)..(1198): n is a, c, g, or t
  misc_feature (1248)..(1271): n is a, c, g, or t
tgtcctggctccgtgggtcctgctggtcctaggggccctgctggtccttctggccctgctggaaaagatggtcgcactggacatcctggtacagttggacctgctggcattcgaggccctcagggtcaccaaggccctgctggcccccctggtccccctggccctcctggacctccaggtgtaagcggtggtggttatgactttggttacgatggagacttctacagggctgaccagcctcgctcagcaccttctctcagacccaaggactatgaagttgatgctactctgaagtctctcaacaaccagattgagacccttcttactcctgaaggctctagaaagaacccagctcgcacatgccgtgacttgagactcagccacccagagtggagcagtggttactactggattgaccctaaccaaggatgcactatggatgctatcaaagtatactgtgatttctctactggcgaaacctgtatccgggcccaacctgaaaacatcccagccaagaactggtataggagctccaaggacaagaaacacgtctggctaggagaaactatcaatgctggcagccagtttgaatataatgtagaaggagtgacttccaaggaaatggctacccaacttgccttcatgcgcctgctggccaactatgcctctcagaacatcacctaccactgcaagaacagcattgcatacatggatgaggagactggcaacctgaaaaaggctgtcattctacagggctctaatgatgttgaacttgttgctgagggcaacagcaggttcacttacactgttcttgtagatggctgctctaaaaagacaaatgaatggggaaagacaatcattgaatacaaaacaaataagccatcacgcctgcccttccttgatattgcacctttggacatcggtggtgctgaccaggaattctttgtggacattggcccagtctgtttcaaataaatgaactcaatctaaattaaaaaagaaagaaatttgaaaaacctttctctttgccatttcttcttcttcttttttaactgaaagctgaatccttccatttcttctgcacatctacttgcttaaattgtgggcaaaagagaaaaagaaggattgatcagagcattgtgcaatacagtttcattaactccttcccccgctcccccaaaaatttgaannnnnnnnncaacactcttacacctgttatggaaaatgtcaacctttgtaagaaacccnnnnnnnnnnnnnnnnnnnnnnnnccataaacatttgcaccacttgtggcttttgaatatcttccacagagggaagtttaaaacccaaacttccaaaggtttaaactacctcaaaacactttcccatgagtgtgatccacattgttaggtgctgacctagacagagatgaactgaggtccttgttttgttttgttcataatacaaaggtgctaattaatagtatttcagatacttgaagaatgttgatggtgctagaagaatttgagaagaaatactcctgtattgagttgtatcgtgtggtgtattttttaaaaaatttgatttagcattcatattttccatcttattcccaattaaaagtatgcagattatttgcccaaagttgtcctcttcttcagattcagcatttgttctttgccagtctcattttcatcttcttccatggttccacagaagctttgtttcttgggcaagcagaaaaattaaattgtacctattttgtatatgtgagatgtttaaataaattgtgaaaaaaatgaaataaagcatgtttggttttccaaaaga

SEQ ID NO: 70585 - DNA, 201 bp, Homo Sapiens
  misc_feature (23)..(23): n is a, c, g, or t
tccagtgataagagggggtgccntagagcacccccccacaccgccgaaaatacacactctgtttcttacctgccacaactcttcggatctcactcacaaaagtctggaggtaatatgggacacctgggctgtaatgggacgagagcccatgacctccgaaatccatggcaacgtaataaaagtctgaaacagagagaagcg

SEQ ID NO: 70586 - DNA, 740 bp, Homo Sapiens
  misc_feature (257)..(257): n is a, c, g, or t
  misc_feature (506)..(535): n is a, c, g, or t
ccttcttttccctttctccttatacattttctttctctactttaattctccttcctccttactgtagatcccaagcttctagcttaggtttgcaagtcatattgcttggccctccacattcactgagaggtgaagataggctgaccccctgtcctcttacatttgagggatcatagactgctgtgtgaattctggaaagtctcaggtccctaccagggcactgaatggcttctcaatggctgtagagacagtacagnttttccaaagcagcctaattcatctggacagctaccaggcactttggaaagttggttcagttactactatgaggccataatatatttgctggtattaaaattcttcagaattggaattactatttgaaataatattttggttgacttaagttttgagagacaattctaaaattgatctagagactcattcaatagcaatgtgaccttttaaatacttacattaagtaaaactgccagtagattaaatcnnnnnnnnnnnnnnnnnnnnnnnnnnnnnngtaagagcttcctctatttactactgttgaacttcagtaatttttagaggctaaataatggtcagaatgtttttaagtgtgctcttttattacatgcttgtgcaggttttgtaattcagtacagaaaagtttaaccttgtacatttttgtatgtaaaaagtcttttaagtagtcttatccttatttaaataaacagaataaaatt

SEQ ID NO: 70587 - DNA, 303 bp, Homo Sapiens
  misc_feature (69)..(98): n is a, c, g, or t
agactcattcaatagcaatgtgaccttttaaatacttacattaagtataactgccagtagattaaatcnnnnnnnnnnnnnnnnnnnnnnnnnnnnnngtaagagcttcctctatttactactgttgaacttcagtaatttttagaggctaaataatggtcagaatgtttttaagtgtgctcttttattacatgcttgtgcaggttttgtaattcagtacagaaaagtttaaccttgtacatttttgtatgtaaaaagtcttttaagtagtcttatccttatttaaataaacagaataaaatt

SEQ ID NO: 70588 - DNA, 2002 bp, Homo Sapiens
  misc_feature (1930)..(1941): n is a, c, g, or t
aagcgaggcctgggtggcgaattcggcacgaggagattggggaggagacggtgatcactgtggacactaaggcggcaggcaaaggcaaagtgacgtgcaccgtgtgcacgcctgatggctcagaggtggatgtggacgtggtggagaatgaggacggcactttcgacatcttctacacggccccccagccgggcaaatacgtcatctgtgtgcgctttggtggcgagcacgtgcccaacagccccttccaagtgacggctctggctggggaccagccctcggtgcagccccctctacggtctcagcagctggccccacagtacacctacgcccagggcggccagcagacttgggccccggagaggcccctggtgggtgtcaatgggctggatgtgaccagcctgaggccctttgaccttgtcatccccttcaccatcaagaagggcgagatcacaggggaggttcggatgccctcaggcaaggtggcgcagcccaccatcactgacaacaaagacggcaccgtgaccgtgcggtatgcacccagcgaggctggcctgcacgagatggacatccgctatgacaacatgcacatcccaggaagccccttgcagttctatgtggattacgtcaactgtggccatgtcactgcctatgggcctggcctcacccatggagtagtgaacaagcctgccaccttcaccgtcaacaccaaggatgcaggagaggggggcctgtctctggccattgagggcccgtccaaagcagaaatcagctgcactgacaaccaggatgggacatgcagcgtgtcctacctgcctgtgctgccgggggactacagcattctagtcaagtacaatgaacagcacgtcccaggcagccccttcactgctcgggtcacaggtgacgactccatgcgtatgtcccacctaaaggtcggctctgctgccgacatccccatcaacatctcagagacggatctcagcctgctgacggccactgtggtcccgccctcgggccgggaggagccctgtttgctgaagcggctgcgtaatggccacgtggggatttcattcgtgcccaaggagacgggggagcacctggtgcatgtgaagaaaaatggccagcacgtggccagcagccccatcccggtggtgatcagccagtcggaaattggggatgccagtcgtgttcgggtctctggtcagggccttcacgaaggccacacctttgagcctgcagagtttatcattgatacccgcgatgcaggctatggtgggctcagcctgtccattgagggccccagcaaggtggacatcaacacagaggacctggaggacgggacgtgcagggtcacctactgccccacagagccaggcaactacatcatcaacatcaagtttgccgaccagcacgtgcctggcagccccttctctgtgaaggtgacaggcgagggccgggtgaaagagagcatcacccgcaggcgtcgggctccttcagtggccaacgttggtagtcattgtgacctcagcctgaaaatccctgaaattagcatccaggatatgacagcccaggtgaccagcccatcgggcaagacccatgaggccgagatcgtggaaggggagaaccacacctactgcatccgctttgttcccgctgagatgggcacacacacagtcagcgtgaagtacaagggccagcacgtgcctgggagccccttccagttcaccgtggggcccctaggggaagggggagcccaccaaggtccgaactgggggccctggcctggagagagctgaaactggagtgccagcccgattcagtatctggacccggggaagctggtgctggaggcctgggccatttgctgtccaggggccccagcaaagcctgaagatctccttttgaaggacccccaaggaccggttccctnnnnnnnnnnnncttatgtggggcccacaggagccccggggggacttaccaaaaagtctttcaagttcaaggt

SEQ ID NO: 70589 - DNA, 1316 bp, Homo Sapiens
tctgggatttgcatgtgtcatagggaattccatttcgggcggccaagctcgctggtgcataccgcacggtcacggtcgttctttgttttcaatgatggtgggctgcgccaccttgccggagggcatccgaacctctcctgtgatctagcccttattgatggtgaaggagaagacaaggtcaaagggcctcaggcgggtcacatccagcccattgacacccaccaggggcctctccggggcccaagtctgctggccgccctgggcgtaggtgtactgtggggccagctgctgagaccgtagagggggctgcaccgagggctggtccccagccagagccgtcacttggaaggggctgttgggcacgtgctcgccaccaaagcgcacacagatgacgtatttgcccggctggggggccgtgtagaagatgtcgaaagtgccgtcctcattctccaccacgtccacatccacctctgagccatcaggcgtgcacacggtgcacgtcactttgcctttgcctgccgccttagtgtccacagtgatcaccgtctcctccccaatctgaatggtggggccgatgccagcacctagcccgtgacctccgattgacactgtgacagtgcacttgctggcgtccccggtgggcacggcacgcacgcggtacggggagaaggggatctcgtcaccaccgtacttgatgaggatggtgtagcgacctgtcacgtctggcacgtaggccactgtatacgtgccgtcatggttgtcttggatgtgtgtcttcttcggcttgccttcgggatccgtgatctggacagccagcaggccctccccggcgtcctttgcatcgatggtgaactccacgggcaggctggcaggcacgccagtggtgttgagcccggggccactggccttcaccttgctggcatcatgagtaggcagcaccttgaccttgaaggggctccggggtacctcttcatctccatacagtactgagatgctgtagggcccttctcggctgggcacataattgacggtctgggtgccatcagcgttgtctaccacgtccactggctccaccaggcctttgggcccttgcactttgacctgcaatggggccacaccagccttgcttgtgtccacctggaaggactgagggaggttggcacgaaccatgcctgggctcaggccgggcccagagcacttgaccttggacgcatctgtcacatcatgcacagggaccttgaaaggactgcctggcacttgatggccaccataggtgacgttgaggctgtaggtgccagcctcataagggatgtact

SEQ ID NO: 70590 - DNA, 2132 bp, Homo Sapiens
gtagcgaggcctgggtggcgaattcggcacgagggatacccgcgatgcaggctatggtgggctcagcctgtccattgagggccccagcaaggtggacatcaacacagaggacctggaggacgggacgtgcagggtcacctactgccccacagagccaggcaactacatcatcaacatcaagtttgccgaccagcacgtgcctggcagccccttctctgtgaaggtgacaggcgagggccgggtgaaagagagcatcacccgcaggcgtcgggctccttcagtggccaacgttggtagtcattgtgacctcagcctgaaaatccctgaaattagcatccaggatatgacagcccaggtgaccagcccatcgggcaagacccatgaggccgagatcgtggaaggggagaaccacacctactgcatccgctttgttcccgctgagatgggcacacacacagtcagcgtgaagtacaagggccagcacgtgcctgggagccccttccagttcaccgtggggcccctaggggaagggggagcccacaaggtccgagctgggggccctggcctggagagagctgaagctggagtgccagccgaattcagtatctggacccgggaagctggtgctggaggcctggccattgctgtcgagggccccagcaaggctgagatctcttttgaggaccgcaaggacggctcctgtggtgtggcttatgtggtccaggagccaggtgactacgaagtctcagtcaagttcaacgaggaacacattcccgacagccccttcgtggtgcctgtggcttctccgtctggcgacgcccgccgcctcactgtttctagccttcaggagtcagggctaaaggtcaaccagccagcctcttttgcagtcagcctgaacggggccaagggggcgatcgatgccaaggtgcacagcccctcaggagccctggaggagtgctatgtcacagaaattgaccaagataagtatgctgtgcgcttcatccctcgggagaatggcgtttacctgattgacgtcaagttcaacggcacccacatccctggaagccccttcaagatccgagttggggagcctgggcatggaggggacccaggcttggtgtctgcttacggagcaggtctggaaggcggtgtcacagggaacccagctgagttcgtcgtgaacacgagcaatgcgggagctggtgccctgtcggtgaccattgacggcccctccaaggtgaagatggattgccaggagtgccctgagggctaccgcgtcacctatacccccatggcacctggcagctacctcatctccatcaagtacggcggcccctaccacattgggggcagccccttcaaggccaaagtcacaggcccccgtctcgtcagcaaccacagcctccacgagacatcatcagtgtttgtagactctctgaccaaggccacctgtgccccccagcatggggccccgggtcctgggcctgctgacgccagcaaggtggtggccaagggcctggggctgagcaaggcctacgtaggccagaagagcagcttcacagtagactgcagcaaagcaggcaacaacatgctgctggtgggggttcatggcccaaggaccccctgcgaggagatcctggtgaagcacgtgggcagccggctctacagcgtgtcctacctgctcaaggacaagggggagtacacactggtggtcaaatggggggacgagcacatcccaggcagcccctaccgcgttgtggtgccctgagtctggggcccgtgccagccggcagcccccaagcctgccccgctacccaagcagccccgccctcttcccctcaaccccggcccaggccgccctggccgcccgcctgtcactgcagccgcccctgccctgtgccgtgctgcgctcacctgcctccccagccagccgctgacctctcggctttcacttgggcagagggagccatttggtggcgctgcttgtcttctttggttctgggaggggtgagggatgggggtcctgtacacaaccacccactagttctcttctccagccaagaggaataaagttttgcttccattctcaaaaaaacctcgtgccgaattcgccacccaggcctcgctacctt

SEQ ID NO: 70591 - DNA, 743 bp, Homo Sapiens
  misc_feature (176)..(176): n is a, c, g, or t
cacatcctccacccgggggggtgtgggccacccctctggtctgtgtagagaacagaggaaaacttggtgtgcctcctggtgtcacagaactggatcctctgcataccccagcttctccacatgccactgctaggggtaccccagctgctgccactcctgctggagggtgaactggngaccctgcaccctccgggaagccatggagtctgctggaggcaccatatcagcctgcgggactagggtggggagcaaacaggccagcggtggaggtctggacagttcaagtgtgatgcagctgtggcaaggagaaatccttccgcctctgggcctcaggctgcctgtccataaaatggggacatggccagctgacggacaactgagtctccggcccacctaccaccgccagccaggatcccccaaagtgtgcagagggctcagcagagaacagtatgggaccccctcaccaggcctggaacacctccagccacaaagaagccaaaggtcagtccctctgctccccagcaaacggtgcctcccaggcattctcagtgccagggcttcatccctgtgaaggcacagggcctgctagtgggcacaggggtggctagttggggcctggggcagaggagggctgcaccaggcgtcctggggaatgtgctcagtgaagacgacactgggctttgcacagcctggtgtcgctgtacagaaactgtcaagggaataaagtgttctttgttttttaa

SEQ ID NO: 70592 - DNA, 1271 bp, Homo Sapiens
  misc_feature (737)..(745): n is a, c, g, or t
  misc_feature (1000)..(1111): n is a, c, g, or t
  misc_feature (1113)..(1113): n is a, c, g, or t
  misc_feature (1116)..(1117): n is a, c, g, or t
  misc_feature (1127)..(1142): n is a, c, g, or t
  misc_feature (1186)..(1203): n is a, c, g, or t
cggtccggaattcccgggatatcgtcgacccacgcgtccgggttacgggcttcaggacaattcgtgatggcgggggctggttccgccgctgtatcgggggcagggaccccggtggcggggcccacaggccgcgaccttttcgccgaagggctgctggagttcctgcgacccgctgtgcagcagctcgactctcacgtacacgccgtcagagagagccaggtagagctccgggaacaaattgacaacctagccacagaactgtgccgcataaatgaggatcagaaggtggccctggatcttgacccctatgttaagaagctacttaatgcccggcgacgcgttgtcttggttaacaacattctacagaatgctcaggaacgactgagacggctaaaccacagtgttgccaaggaaacagcccgcaggagagcaatgctggattcgggaatttacccccctggctccccaggcaaataacagatgagcctatggactcagtagcacaagtactgttccccagctgccttgtttcaacagacatgcaaagatcctaggagacagtccccatagaccttcagacattaaaaagggagccgtacagtttgtttgaagcacttcgtcttacccatttatgtaggggccccaggaaacctacacacagccagaatgaggttcccaaaggacttacattaattatggctcttgcttcctttcacaaatgagctgaggcctctacnnnnnnnnnaaagctgcatacttgaggcttaccttcttcaggactagttaaccagaggggcttcctttgtatgttacatgcctggttacatgggcctggacagcatgtcctctacctgtgacttctcattttcctgtttacactggggatttggagggggcaggcaaagtcaaagtgaatgacctctgtccacccacttttttattgcactggcttgaatacagtagcagtgttgatagaatcattttattcaataaatacttnnnnnnnnnnnnnnnnnnnnnnnnnnnnnnnnnnnnnnnnnnnnnnnnnnnnnnnnnnnnnnnnnnnnnnnnnnnnnnnnnnnnnnnnnnnnnnnnnnnnnnnnnnnnnnnncnaanntttttgcggnnnnnnnnnnnnnnnnaagaaattttttaaaacctttttttgttggcccgcccggccccnnnnnnnnnnnnnnnnnnggggccaaaacttttttttccaaagaacacaccgcggcaaaaaacaaggggcttgggattctcccccc

SEQ ID NO: 70593 - DNA, 1495 bp, Homo Sapiens
  misc_feature (58)..(67): n is a, c, g, or t
  misc_feature (1424)..(1424): n is a, c, g, or t
cactttgaaaaatatatatttacaggaacaattccccattctcgtgggactctttagnnnnnnnnnnggtccatttttggggaagtaaaacaaacagtggagacgagtgtagcactgtcccccaaatcaccaacccccaggtcccaaggcctgggctgggccagcgctaacaggtgagcccaggagtcttttgaacccactctctcttgcctagaatagagacaggacaggctttatgtcccccattcctccctcccaactccagggacattgaaagggtcctttgtacccgcccgcaggaaattggggggctgggagggagggaactgaaaattcatgtttggtatcaaaaataaacacttggagtgggggaggcggcaggaagattcccccccaaatcccttccttcccacccaccccaccaaatataggaagagatgactccctctcccctattgaaaagccccatttaaaaatagattatactatcaaaatggcagcgggggagagacagggagacctggagtactggctggaggggccccccagacggggaccaccccccagaaaaccctccattgggaggaaacaggcaggaccccagggaggttggcagacaaaggaatggcttctcagggggaagaacaaaagggacattcctccctggccaaaaagttggttgaaaaggataagctgtctgagagaaaggttggggaggtggaaatttctattccaagggtgtgattcttccttggccaagactcccaacccattaaatggtacaaattcttcctggacccctgagtatggccaggaataataaaacaaaacaaactaactcttctactcacatccaaaaacgcagacagggctccctcatctccccaagggcaggctgagaaataaagaaagaaaggtcgttctcaagccagacctcgattgtcttgtcttggggaaaaaagtggggaggtgggggagatgtcctaaccaccctaaaaggttaggtcaggctcctcccagtggccttcaaaaaataaataaataaaccgcccctaccattgaagtaggagacgtgtaagggcggccactgggggactgacagaaaacagagaagttgtggaagctgtgtgttttctgtggaggagataatgagagttactcttgggagtaattcttcccaaggatccccaccccaccacaatcagagcatgagtctttcagttgaactatgtttctccttgagatggctggctggagagagcatggatggagtgaccccagaaggggtggtggtggtggtggtagtagtcatggcttctggggccctggggagagcaccacgggggtcgagaggccatccacgctgatagaagggatgtgcacctggcgctgccactggatggaaactggaaggagagcttggncgggctacggggcgcaatgggactcagggtgctccagaagtgaatgctaggaggcagcgagctgggtgtca

SEQ ID NO: 70594 - DNA, 822 bp, Homo Sapiens
tctttcccagaagttggttcctagaaaactcaataccatcatctcttatctctatacagggactaggtaataaaaccttcaaaggttgtcaaaggtcatcaagcagtgttcatttatcctgtcacatgtttctgtttctatagtaatttagaaattgcaaatagttaacttttcatcatgtaaaaagttaacattatcctatttccatagataccatggacggcggtgtggcctgagttgtcagtctttaatcctgagtcatgtggctctcttttcatctttgatgtcagttccaattatttggcatcaaaaaccttcatggtaggtagagttttaggtaaaagtggatctagggttactttctttattaacatttcctaaataactgaattgagagacatactctgctactatgtcctcaggttaatttttgtctgatcttacgatgccctgccttttactagctactttagaaatagaaaatgtgaagagtgactatttacatgtatactcctttggctgctagaactcatctgtagtcctttattatttacactgaattccaatttcatttctgcttccgctaagtaagagcacctcattcctgtgttttctctactattgagctgtagacgaactgtttctctaattataaagcaaactgtttgggatattcagggaaactaccccaatgttatgttgtcatttaatgggaaaggctgggatcatatgtatttctatgttctgtaaagtatttgacttactagttctcaataaaattttattaagcgactattcactggaaacaaaaacaccagggat

SEQ ID NO: 70595 - DNA, 1142 bp, Homo Sapiens
  misc_feature (42)..(88): n is a, c, g, or t
taacctcactaaagggaataagcttgcggccgctgctcaggnnnnnnnnnnnnnnnnnnnnnnnnnnnnnnnnnnnnnnnnnnnnnnnaaaacttacagtaaacaaaacaatcacttaaattgtcaaaagaacagcaattttacacaatgaagagcatacacaccaagccaaaatacaatagcactcaggtctatatgttgcagtggtgctggcgctggagggaatgcccagggaggctgcagtgctcaccacgaagcccaggtccacggagggagccaaggtccacagagggccccggggccagagggaggccgcccacactcccagcacatcacctgcctcaaagcactcccttcaggcatctgaagagggaaaggccatgtgtcttcctgggaggcactgaaaggccagccagcatctccaaaatgcaggccattttaacactgctgtgaatgtgctggggtcaccaagggggccccttagtggtcagatgcactttgtcacaatgtacacctacatggggtgattactaggcaacgggaggtttcctgaatttcacagccagatggggagctaaaagaaattcctgaacccaacgcgtaaatattttgttctgacaaagtaaattcacaagaacacatcaaacacaagacctaatgcaaggggcagtgccagggccgccgccgcctcctgtgagcagctcttcagcagcaggcatcaggtaactgcttagaacggcaatgccacagtggaataagggggactaacttggatacgaaagttcagaataatgcccaccaaaaatccatgtgactccatctctcttcccagttctaatgttctcagaacagcagccacccctgaatgcaagtggagacaggaaggggactaggggttggccggcgggaggggaggcagggtctggccaaacccaggcagctgccagaaagccttctgcactccgcaagacaccccagtaaactggggcgtcccaaggtggcaagccttcatgaaggcactgcccagctcacaatcctgtgggccaacttcagtcaactctcctttccattagatttgttcctaattaaaagaccactcataggccaggtgcggtcctcgtgccgaattcgccacccaggcc

SEQ ID NO: 70596 - DNA, 726 bp, Homo Sapiens
  misc_feature (552)..(573): n is a, c, g, or t
tgttcttgtgaatttactttgtcagaacaaaatatttacgcgttgggttcaggaatttcttttagctccccatctggctgtgaaattcaggaaacctcccgttgcctagtaatcaccccatgtaggtgtacattgtgacaaagtgcatctgaccactaaggggcccccttggtgaccccagcacattcacagcagtgttaaaatggcctgcattttggagatgctggctggcctttcagtgcctcccaggaagacacatggcctttccctcttcagatgcctgaagggagtgctttgaggcaggtgatgtgctgggagtgtgggcggcctccctctggccccggggccctctgtggaccttggctccctccgtggacctgggcttcgtggtgagcactgcagcctccctgggcattccctccagcgccagcaccactgcaacatatagacctgagtgctattgtattttggcttggtgtgtatgctcttcattgtgtaaaattgctgttcttttgacaatttaagtgattgttttgtttactgtaagtttgnnnnnnnnnnnnnnnnnnnnnnttccaatgactgtgctgtggttggagactttatttaccaagatgtttactcttcctttccccttccattttgaggagctgtgtcactcctcctcccccccagtgctttgtagtctctcctatgtcataataaagctacattttctctgagaaa

SEQ ID NO: 70597 - DNA, 1217 bp, Homo Sapiens
gtcgggcttgaagccatagctgcgggacctgtactcgtctcccccgacgcagaccatggagagcgcgctggcggtgccccggctgcccccgcatgatccagggacgccggtgctgtcggtggtggacatgcacacgggcggcgagcccttgcgtatcgtgctggcggggtgtccggaggtgtctgggcccaccctgctggccaagcggcgctacatgcgccagcaccttgaccacgtgcggcgacggctcatgttcgagccccgagggcaccgggacatgtacggggcggtcctagtcccgagcgagctgccggacgcgcatctgggcgtcctgttcctgcacaacgagggctacagctccatgtgcggccacgcagtgctggcgctgggccgcttcgctttggacttcgggcttgtgccggcgccccctgcgggcacccgcgaggcccgcgtcaatatccactgcccctgcgggctggtgaccgccttcgtggcatgcgaggacggccgcagccacggaccggtgcgcttccacagcgtcccggccttcgtgctggccacagatctcatggtggatgttcctggacatggaaaggtgatggtggacattgcatatggcggtgcattttatgcatttgttactgctgaaaagttaggactagacatttgttctgcaaagaccagggaccttgtggatgcagcgagtgcagtgacagaggcagtgaaagctcagtttaaaattaatcatcctgatagtgaagaccttgcctttttatatggaactatattaacagatggaaaagatgcttataccaaggaaccaaccaccaacatttgtgtttttgcagatgaacaggttgacagaagtcccactggctcaggagtgacagcccgaattgccttacagtatcacaaagggcttctggaactgaaccagatgagagccttcaaaagcagtgcaactggctcagtattcacagggaaagctgtgagggaagcgaaatgtggtgattttaaagctgttatagtggaagtatcaggacaagcccattacacgggtacagcaagctttataatagaagatgacgacccattgagggatggatttcttctcaagtgacttcttccatgattttaagggctttctttttaaagtaatcattatccttaaggactgttttctctaaattatatgaaaacaaataaattatacatat

SEQ ID NO: 70598 - DNA, 1357 bp, Homo Sapiens
  misc_feature (89)..(123): n is a, c, g, or t
ggggagaacttgatcatcactatagggcgctagctcggctgtagccgaacgaccgagcgcagcgaagtagtgagcgaggaagcggccgnnnnnnnnnnnnnnnnnnnnnnnnnnnnnnnnnnncagtcgacggtaccggacatatgcccgggaattcggccattacggccgggggcagacggcggagagcagagagggagcgcgccttggctcgctggccttggcggcggctcctcaggagagctggggcgcccacgagaggatccctcacccgggtctctcctcagggatgacatcatccgtccacctccttgtcttcaaggaccacctcctctccatgctgagctgctgccaaggggcctgctgcccatctacacctcacgagggcactaggagcacggtttcctggatcccaccaacatacaaagcagccactcactgacccccaggaccaggatggcaaaggatgaagaggaccggaactgaccagccagctgtccctcttacctaaagacttaaaccaatgccctagtgagggggcattgggcattaagccctgacctttgctatgctcatactttgactctatgagtactttcctataagtctttgcttgtgttcacctgctagcaaactggagtgtttccctccccaagggggtgtcagtctttgtcagactgactctgtcatcacccttatgatgtcctgaatgggcaggatccctttgggaaattctcaggaggggggacctgggccaatgggcttgggccagcatcctgctggcaatccaatggccctggtgttggctttctggacattgaggcaatgctactggattcacccaaaggcactgcacccacctctacttgaaagcatacttccctaatacctttacctgggcgcaacttgcggcgtcctcatgcagtagccaaactatcataaggagtgatgtttagtcacttaacttgacatacacacgagtgccccccagcgtcatggaatcccatggcattaacaatggacagtgttgctaccacgaacaacactgatctggtactgaaacacggggtcttgaaacgatgggtaacgacaccccatgctccgcatcaacacatatcttgaggctaaggtttcataacctcggggctctaaatttaattacttccaaaccatcgcacttccacatggaagacacacttgctacacaccgagaaacccaccctatgccttatagtccaagcacgactagtgaacagggtcaatgctaacagctgcagcaggtcatctaccatcactcaaccatcgccactttcttatcttccactccacccctgcctccttggatgtgctcacgtac

SEQ ID NO: 70599 - DNA, 990 bp, Homo Sapiens
  misc_feature (210)..(218): n is a, c, g, or t
  misc_feature (343)..(351): n is a, c, g, or t
  misc_feature (396)..(413): n is a, c, g, or t
  misc_feature (492)..(517): n is a, c, g, or t
ccggaaattgtctcaatacactgccgtggacacattgtctcgcgccgcgcattacctcgctgcgttaacaccgataaccctcaaggtgaatatgtcccccacgagcgcataatattctcttcggggagttgtcccccacaatgtgtgcccccctcccatatggggtttctcctcacacaagtgttgtcccagtcgccggtttttcgcctnnnnnnnnntcggtttaagccgcggccgcccgcgtcctcgcttttatatagctggtgcctcttttggggcccccctcgtacgcaaacgccgggtcccctactcgggcgccccccggggggttctttggcggcgnnnnnnnnntttctttttctgttcttcgtctgttgtgctcttttcgttctttgnnnnnnnnnnnnnnnnnngttaagacaggaaacacatttattgagagcacagtggggtgcgccaagccctgtgctttggaaccgcatcacagcgccnnnnnnnnnnnnnnnnnnnnnnnnnngaaggagcccacttcccacatgcagacactgaaggctcaacagctcccctaggcctcagggttcctgcggggtgggcaggggtccagcccacgggtctgaccccaggtcagcggcgtccatcagtcagagggcgggtctctactcaagggcaggccccgggtccagagtctctgggtccagcctgtcccgtgggaataggtgcagggtgtccccgtggctgtggagggatttcgagctggagaggggctggggtcccacattcgaggtcccttcccacgtaggcatccaggtgatggcttccgcccaaaccaggaaggagacgagaggcccgccaggaagaagacttgggtccgggatggtgggccccatcagggcctcttccgcagcttccatccgcagttcttcagccgacccagccgggccacggcccacgtgcctttgtgagcgtgcttccacggagtagagcgagtca

SEQ ID NO: 70600 - DNA, 890 bp, Homo Sapiens
  misc_feature (87)..(142): n is a, c, g, or t
  misc_feature (144)..(194): n is a, c, g, or t
gtgggcttctggaatgagcatgctactgaatcaccaaaggcacgccccacctctctgaagatcttcctatccttttctgggggaatnnnnnnnnnnnnnnnnnnnnnnnnnnnnnnnnnnnnnnnnnnnnnnnnnnnnnnnngnnnnnnnnnnnnnnnnnnnnnnnnnnnnnnnnnnnnnnnnnnnnnnnnnnnaaggtttgacaggtcagtcccttcccacccctcttgcttgtcttacttgtcttatttattctccaacagcactccaggcagcccttgtccacgggctctccttgcatcagccaagcttcttgaaaggcctgtctacacttgctgtcttccttcctcacctccaatttcctcttcaacccactgcttcctgactcgctctactccgtggaagcacgctcacaaaggcacgtgggccgtggcccgcctgggtcggctgaagaactgcggatggaaactgcggaagaggccctgatggggcccaccatcccggacccaagtcttcttcctggcgggcctctcgtctccttcctggtttgggcggaagccatcacctggatgcctacgtgggaagggacctcgaatgtgggaccccagcccctctccagctcgaaatccctccacagccacggggacaccctgcacctattcccacgggacaggctggacccagagactctggacccggggcctccccttgagtagagacccgccctctgactgatggacgccgctgacctggggtcagacccgtgggctggacgcctgcccacccgcgcaggaatccctgaggccataggggagctgttgagccttcagtgtctgcatgtgggaagtgggctccttcacctacctacagggctgttgtgaggggcgcta

SEQ ID NO: 70601 - DNA, 1081 bp, Homo Sapiens
cctcccccggggcttggtccagctccttcactctctagcagctgctggggcccacctcccatgccgaggaccagcaggggaaacctccacggagcatctgcaggctctgcttctgcccggctgctggcttgctctccctggtggctctccagcggccagcttcctcacccacccggcactctgctttgctctgtctcctgaggtgggcctgaccaacctccccttctctgcctcagtccctgggctccagggctcagctccacagccctctgcctagcaggctggttctccctgccaagcccatacctgtggtcacctggccctcctgtggtctgagtaccactcccctgccccaggagccactcccactccagctgcctgtttccagcaggttcccagtgtccccgacaagcccctgctggtgtccccatctcctgccaagcatcctccagtgcctcctcctgtgggcctggcctcagggctatggacagactcctgtcccatcccagagacccctcgtgatcgtgccctggcacgtgggccgtggcccggctgggtcggctgaagaactgcggatggaagctgcggaagaggccctgatggggcccaccatcccggacccaagtcttcttcctggcgggcctctcgtctccttcctggtttgggcggaagccatcacctggatgcctacgtgggaagggacctcgaatgtgggaccccagcccctctccagctcgaaatccctccacagccacggggacaccctgcacctattcccacgggacaggctggacccagagactctggacccggggcctccccttgagtagagacccgccctctgactgatggacgccgctgacctggggtcagacccgtgggctggacccctgcccaccccgcaggaaccctgaggcctaggggagctgttgagccttcagtgtctgcatgtgggaagtgggctccttcacctacctcacagggctgttgtgaggggcgctgtgatgcggttccaaagcacagggcttggcgcaccccactgtgctctcaataaatgtgtttcctgtcttaacaaaaaaaa

SEQ ID NO: 70602 - DNA, 732 bp, Homo Sapiens
aggaaaaacatcaaagctggataggttgggcagaagagctggggatagcatttagagaggctgagagtcctgggttctgggttatcaaggtgagagaaaccagaggttgccagttgtaggtgggcgtcaggactagagtgatgcttccagaagtttctgcaagtgggccgagtctaaggtagggcagggtacgccagaagttgaggggcactaggtagacaggccgagctggtggctgggtgctcccctcaccctccatgctgctaggagcccgtgagcagggacttgctctcctctccctccctcctggggcctgcctgtctgtctgtgaactcttgtcggccagcgaggccgggagcaggtggccttcatctgcaactgtgtctctctcagcctccacagccacggggacaccctgcacctattcccacgggacaggctggacccagagactctggacccggggcctccccttgagtagagacccgccctctgactgatggacgccgctgacctggggtcagacccgtgggctggacccctgcccaccccgcaggaaccctgaggcctaggggagctgttgagccttcagtgtctgcatgtgggaagtgggctccttcacctacctcacagggctgttgtgaggggcgctgtgatgcggttccaaagcacagggcttggcgcaccccactgtgctctcaataaatgtgtttcctgtcttaacaaaaaaaa

SEQ ID NO: 70603 - DNA, 2417 bp, Homo Sapiens
cagtcgacggtaccggacatatgcccgggaattcggccattacggccggggtttgaaggatactgccagaagtgtttcattgaagctcagaatcagagatttcatgaggccaaaaggacagaagagcaactgagatcgagccagcgcagagatgtgcctcgaaccacacaaagcacctcaaggcccaagtgcgcccgggcctcctgcaagaacatcctggctgccgcagcgaggagctctgcatggagtgtcagcatcccaaccagaggatgggccctggggcccaccggggtgagcctgcccccgaagacccccccaagcagcgttgccgggcccccgcctgtgatcattttggcaatgccaagtgcaacggctactgcaacgaatgctttcagttcaagcagatgtatggctaaccggaaacaggtgggtcacctcctgcaagaagtggggcctcgagctgtcagtcatcatggtgctatcctctgaacccctcagctgccactgcaacagtgggcttaagggtgtctgagcaggagaggaaagataagctcttcgtggtgcccacgatgctcaggtttggtaacccgggagtgttcccaggtggccttagaaagcaaagcttgtaactggcaagggatgatgtcagattcagcccaaggttcctcctctcctaccaagcaggaggccaggaacttctttggacttggaaggtgtgcggggactggccgaggcccctgcaccctgcgcatcaggactgcttcatcgtcttggctgagaaagggaaaagacacacaagtcgcgtgggttggagaagccagagccattccacctcccctcccccagcatctctcagagatgtgaagccagatcctcatggcagcgaggccctctgcaagaagctcaaggaagctcagggaaaatggacgtattcagagagtgttgtagttcatggtttttccctacctgcccggttcctttcctgaggacccggcagaaatgcagaaccatccatggactgtgattctgaggctgcgtgagactgaacatgttcacattgacagaaaaacaagctgctctttataatatgcaccttttaaaaaattagaatattttactgggaagacgtgtaactctttgggttattactgtctttacttctaaagaagttagcttgaactgaggagtaaaagtgtgtacatatataatatacccttacattatgtatgagggatttttttaaattatattgaaatgctgccctagaagtacaataggaaggctaaataataataacctgttttctggttgttgttggggcatgagcttgtgtatacactgcttgcataaactcaaccagctgcctttttaaagggagctctagtcctttttgtgtaattcactttatttattttattacaaacttcaagattatttaagtgaagatatttcttcagctctggggaaaatgccacagtgttctcctgagagaacatccttgctttgagtcaggctgtgggcaagttcctgaccacagggagtaaattggcctctttgatacacttttgcttgcctccccaggaaagaaggaattgcatccaaggtatacatacatattcatcgatgtttcgtgcttctccttatgaaactccagctatgtaataaaaaactatactctgtgttctgttaatgcctctgagtgtcctacctccttggagatgagatagggaaggagcagggatgagactggcaatggtcacagggaaagatgtggccttttgtgatggttttattttctgttaacactgtgtcctgggggggctgggaagtcccctgcatcccatggtaccctggtattgggacagcaaaagccagtaaccatgagtatgaggaaatctctttctgttgctggcttacagtttctctgtgtgctttgtggttgctgtcatatttgctctagaagaaacaaaacaaaggaggggaaatgcattttccccagagataaaggctgccattttgggggtctgtacttatggcctgaaaatatttgtgatccataactctacacagcctttactcatactattaggcacactttccccttagagccccctaagtttttcccagacgaatctttataatttctttccaaagataccaaataaacttcagtgttttcatctaattctcttaaagttgatatcttaatattttgtgttgatcattatttccattcttaatgtgaaaaaaagtaattatttatacttattataaaaagtatttgaaatttgcacatttaattgtccctaatagaaagccacctattctttgttggatttcttcaagtttttctaaataaatgtaacttttcacaagagtcaacattaaaaaataaattatttaagaacagaaaaaaa

SEQ ID NO: 70604 - DNA, 1974 bp, Homo Sapiens
  misc_feature (192)..(209): n is a, c, g, or t
  misc_feature (490)..(507): n is a, c, g, or t
  misc_feature (610)..(632): n is a, c, g, or t
  misc_feature (636)..(680): n is a, c, g, or t
  misc_feature (1607)..(1672): n is a, c, g, or t
ccatggacactatagaacagcgcgttaaaaaaagcaggctggtacggtcggaatccgggatatcgtcgacccacgcgtcgccacgcgtcgcccacgcgtcgaacattttccatggtttcttgcgactgtgtctcgttcttgtagtatgatgatgaacattgataatgaatgttctgtatattcagataaagnnnnnnnnnnnnnnnnnngcggtctgaatttaatagtgtttataataaaaattttaaaaatgaccctcatagcacgcaaaacaggatggggaatttcccctcttctttctgtgacaatgcgcatcattcctgcattagtttttaacaccagactacctacattcatcatttccctcatttttcttttattttcttgcatttgtgaattagttcaagaatgctagaaaagtgtcgagttgtgcacatccatttcttgtttcacaatgtttaaaagtgacagtaattcattttgtaaactnnnnnnnnnnnnnnnnnnggttggaatagtgagcataataggtacaacctaacacattattatgtttattaactttgacacccacaaataaattcttttcttttcttgattcttgctcttnnnnnnnnnnnnnnnnnnnnnnntgcnnnnnnnnnnnnnnnnnnnnnnnnnnnnnnnnnnnnnnnnnnnnnaattgtccggattatgaccttgctgtttttcttcaatatgtatacaaggtgatgtgaaaagatgacttgggcaaaggagtaacaacaagtaggcttgttcttctactttgcttcacaattcacctaatgccaaaaaccaaaatcaaacccatgttgatgcctccttgctcacctgcatttccaaaaagtgggacactcatgcactccctgagaaaaataaaatcagggacatacttctccttttagccttttaaaaattcaaaaacgtttagtccaagggaactttttatgctatcaggaaaggtttttgctgtttttgattctgattatcacagccaagtactttgttttatttctccctaattaataactacattccatgaggcctcttccaaccaaagaggccttttcttccaggagagtcccgcaggagatgctggtatgatgggcaccattggttaagtaaactacatgcaggaagaagtccttggggccagtctgccagctgagtcctggttttggatgaagagttaatgagatattgggccaggctcaatgctgtagttttaatgctaagaggttacgtttacttcacagagtacacctcttagtaacctctgacttaggcagctgcttaaagcaaattgcaaaactggcttgatttggaatgtttttattagaggaaaaaagaaagccatattatctggaaaaaaattcattttaaataccatcattcaacaaattatgttcagaaagtggtcagaacttaagcaagaaaagtaaagaaagaatgcagaattgtggagcaatgctttaggaaatatttctacctgaacacttgtactcttgaagtcacaacaaaataatgatgagcttttcacatcacctttatggtttcaatccctagctcaaagcttcctggaatcnnnnnnnnnnnnnnnnnnnnnnnnnnnnnnnnnnnnnnnnnnnnnnnnnnnnnnnnnnnnnnnnnnctctcttattacttctttcctttggcattttcaatttgaaatgctttcctttggttgttggttttattctccccctacccctccccttttcttattattcagaatataaacctgcaaagctctgctctgttttggttttgaaagtttaagcttttctgcttctgtgagagcacaggcttctgtcccttttgattccaactgaacttttgtgttctctaatgatactaacacggtgtaggttttacagtctcctaatttgtactggtaatgcatattccaaaataaatagtttcttttgttgc

SEQ ID NO: 70605 - DNA, 342 bp, Homo Sapiens
gttaaaataaataaaacattcaatgtttttctccttttctctcttattacttctttcctttggcattttcaatttgaaatgctttcctttggttgttggttttattctccccctacccctccccttttcttattattcagaatataaacctgcaaagctctgctctgttttggttttgaaagtttaagcttttctgcttctgtgagagcacaggcttctgtcccttttgattccaactgaacttttgtgttctctaatgatactaacacggtgtaggttttacagtctcctaatttgtactggtaatgcatattccaaataaatagtttcttttgaaaaaaa

SEQ ID NO: 70606 - DNA, 660 bp, Homo Sapiens
  misc_feature (59)..(59): n is a, c, g, or t
  misc_feature (532)..(544): n is a, c, g, or t
agtgaggagcagaagcagctgatgctgtactatcacagaagacaagaggagctcaagtnagcaggggacagatggctttctgcagtgctggcgcccacacatagcctgtggtgccttacctggggctgctggggagcagtgagctctgcagaatgccggggaggggtctttctagagcttctgtctgcaggtctgtcggggtcctgccaggtgtcccctggtgttagacatggcagtatcctgctcctagagggcagggagagggggaggtcagtcatggactctttcttcagtctctttatgtgcaaaacactttcctgaaatgcctgcctgaataaaacatacttatttccagagattggaagaaaatgatgatgatgcctatttaaactcaccatgggcggataacactgctttgaaaagacattttcatggagtgaaagacataaagtggagaccaagatgaagttcaccagctgatgacacttccaaagagattagctcacctttctcctaggcaattataattttnnnnnnnnnnnnnggccacttactgccctctgtaaaagatgttaacatttctagttttcttttagtgtgaatttttaaaatagcagttattcaaggttttagaacttaataaatacctagtcagaagaa

SEQ ID NO: 70607 - DNA, 1023 bp, Homo Sapiens
  misc_feature (118)..(119): n is a, c, g, or t
  misc_feature (133)..(281): n is a, c, g, or t
  misc_feature (896)..(909): n is a, c, g, or t
cgccggccacgatcatggcgggagcgagggcgccatacgcaacccctctcccgccgttgccgatcattatgcagctgcacgacagtttcccgactgaaagcggcagtagcgcacgcannttatgtgagtagcnnnnnnnnnnnnnnnnnnnnnnnnnnnnnnnnnnnnnnnnnnnnnnnnnnnnnnnnnnnnnnnnnnnnnnnnnnnnnnnnnnnnnnnnnnnnnnnnnnnnnnnnnnnnnnnnnnnnnnnnnnnnnnnnnnnnnnnnnnnnnnnnnnnnnaagaattcggcacgaggagactatagaagaagccaaagcaataatatctaagaaacaagtggaagccggtgtctgtgttaccatggagatggtgaaagatgccttggaccagcttcgaggcgcggtgatgattgtttaccccatggggttgccaccgtatgatcccatccgcatggagtttgaaaataaggaagacttgtcgggaacacaggcagggctcaacgtcattaaagaggcagaggcgcagctgtggtgggcagccaaggagctgagaagaacgaagaagctttcagactacgtggggaagaatgaaaaaaccaaaattatcgccaagattcagcaaaggggacagggagctccagcccgagagcctattattagcagtgaggagcagaagcagctgatgctgtactatcacagaagacaagaggagctcaagagattggaagaaaatgatgatgatgcctatttaaactcaccatgggcggataacactgctttgaaaagacattttcatggagtgaaagacataaagtggagaccaagatgaagttcaccagctgatgacacttccaaagagattagctcacctttctcctaggcaattataatttnnnnnnnnnnnnnnggccacttactgccctctgtaaaagatgttaacatttctagttttcttttagtgtgaatttttaaaatagcagttattcaaggttttagaacttaataaatacctagtcagaag

SEQ ID NO: 70608 - DNA, 1425 bp, Homo Sapiens
aaattaattgctagaagaaggtgagctatctcttggaagtcatacactgtgaactcctctgggtcggcacttatgccttcactccaggaatgtcctttgcaaagcagtgttatgcgcccctggtggagttttaatagggcatcatcatcatgttcgtccatctgctgagctcctcttgtgcttctgtgatagtacagcatcagctgcttctgctcctcagtgcctaatataggctctcgggctggagctccgtgtcccctttgcgtgaatcttggcgataatcttggtttttgtcattctgttccccacgtagtctgaaaagcttcttcgttcttctcagctccttggctgcccaccacagctgcgcctctggcctcgtttaatgacgttgagccctgcctgtgttcccgacaagtcttccttattttcaaactccatgcggatgggattcatacggtggcaaccccatggggtaaacaatcatcaccgcgcctcgaagctggtccaaggcattctttcaccatctccatggtaacacagacaccggcttccacttgtttcttagatattattgctttggcttcttctatagtcttctttaacacttgcttcatcttctcatttggagcttgcccattccttcggtccaatatcatcctttttaaacactgcacctccgctgggtacgcatttttcaccccattcatccttcaatttcaattcttcaatctgatcatcggtccagtccttgcatattaggagggagaaatatgccatgttcggctaattcttccatttctgagcagaggcgctgcacctggagccgcccattatagacccgggccacctgcaccgtgagctcctccagctcggtactcccaggcgcctgcagcaggaactggctctcgtcgccccgcttcacgtgcagcagaaccatggcggtcccgccgaggtactgaggcgttgagaaggccccggctgcgtggcccgcgggtcctgccggccgagggtcgccggatcgccagcagctgcgacgcactaacagccgctcacagtccggaatcccacgctccctagcccgcggtgagcgggggaaacggcactcgctcccggaagtggatgttgccaagagcaacagtgaagcagagttaaagagccgccagctcaagctcagaacccgagtgggggaggctggggtgcaccgaggcccagcaatccaagcccgtacggagctgcggccggggaaaccacccacacagtctgagaggacagctgattctgagcggaccgacggaaggagattcgcagagccccttcccggaagtgactgttgtcgcggcaactgccaaaacacagaccaagtcgctgaaggggagggcggacctcccaatcgactggtctggggcccgagatttccactcaggg

SEQ ID NO: 70609 - DNA, 1309 bp, Homo Sapiens
aagatagggctaggtacgaggctgggtggcgaattcggcacgaggccggccgcagctccgtacgggcttggattgctgggcctcggtgcaccccagcctcccccactcgggttctgagcttgagctggcggctctttaactctgcttcactgttgctcttggcaacatccacttccgggagcgagtgccgtttcccccgctcaccgcgggctagggagcgtgggattccggactgtgagcggctgttagtgcgtcgcagctgctggcgatccggcgaccctcggccggcaggacccgcgggccacgcagccggggccttctcaacgcctcagtacctcggcgggaccgccatggttctgctgcacgtgaagcggggcgacgagagccagttcctgctgcaggcgcctgggagtaccgagctggaggagctcacggtgcaggtggcccgggtctataatgggcggctcaaggtgcagcgcctctgctcagaaatggaagaattagccgaacatggcatatttctccctcctaatatgcaaggactgaccgatgatcagattgaagaattgaaattgaaggatgaatggggtgaaaaatgcgtacccagcggaggtgcagtgtttaaaaaggatgatattggacgaaggaatgggcaagctccaaatgagaagatgaagcaagtgttaaagaagactatagaagaagccaaagcaataatatctaagaaacaagtggaagccggtgtctgtgttaccatggagatggtgaaagatgccttggaccagcttcgaggcgcggtgatgattgtttaccccatggggttgccaccgtatgatcccatccgcatggagtttgaaaataaggaagacttgtcgggaacacaggcagggctcaacgtcattaaagaggcagaggcgcagctgtggtgggcagccaaggagctgagaagaacgaagaagctttcagactacgtggggaagaatgaaaaaacaaaattatcgccaggattcagcaaaggggacagggagctccagcccgagagccctattattagcagtgagggaccgaagcagcctgatgctgtactattccccgaggactagagggacctcccgaggattggaagaaaatgatgatgatggctatttaaacttccaaggggcgggaataccctggctttgaaaaaaccattttccggggaggtgaaaaaacttaaggggggagaccaagaatggaggttcccccctctggatgaaccttcccaaggaaattaagctccccttttctccccaaggcattttataatttt

SEQ ID NO: 70610 - DNA, 632 bp, Homo Sapiens
  misc_feature (144)..(172): n is a, c, g, or t
  misc_feature (195)..(273): n is a, c, g, or t
  misc_feature (301)..(324): n is a, c, g, or t
  misc_feature (342)..(401): n is a, c, g, or t
  misc_feature (403)..(587): n is a, c, g, or t
cttgaaataggaacttcaccgtctcttaagagcgatatatttaatacattcacaagattcgaaatgaaaaacaaacattattcatgctacaggtttttaattttccttggacaacaccaaaaacacagtactcaaacggcatgnnnnnnnnnnnnnnnnnnnnnnnnnnnnngagatggaatttcactcccgtcnnnnnnnnnnnnnnnnnnnnnnnnnnnnnnnnnnnnnnnnnnnnnnnnnnnnnnnnnnnnnnnnnnnnnnnnnnnnnnncaggcgcccaccgccacacctggataannnnnnnnnnnnnnnnnnnnnnnngagacggtgtctcactcnnnnnnnnnnnnnnnnnnnnnnnnnnnnnnnnnnnnnnnnnnnnnnnnnnnnnnnnnnnngnnnnnnnnnnnnnnnnnnnnnnnnnnnnnnnnnnnnnnnnnnnnnnnnnnnnnnnnnnnnnnnnnnnnnnnnnnnnnnnnnnnnnnnnnnnnnnnnnnnnnnnnnnnnnnnnnnnnnnnnnnnnnnnnnnnnnnnnnnnnnnnnnnnnnnnnnnnnnnnnnnnnnnnnnnnnnnnnnnnnnnnnnatgagccgccgcggccggcatttttgtattttaagtggagacgag

SEQ ID NO: 70611 - DNA, 1351 bp, Homo Sapiens
gaggcagtaacctcataacggttctaaggtagcgaggcctgggtggcgaattcagcacgaggggctctggtggcggcggcggcagacacttggggtctggacgcaacggaggcgggagcatgaacgcccctccagccttcgagtcgttcttgctcttcgagggcgagaagaagatcaccattaacaaggacaccaaggtacccaatgcctgtttattcaccatcaacaaagaagaccacacactgggaaacatcattaaatcacaacgtgacctaaaagacccgcaagtgctatttgctggctacaaagtcccccaccccttggagcacaagatcatcatccgagtgcagaccacgccggactacagcccccaggaagcctttaccaacgccatcaccgacctcatcagtgagctgtccctgctggaggagcgcttccgggtgagggcggggcctggaggggcagacggggtgggctggacactggcccgtgtgcccaggcctgggacagccctggccttgtttcttcggaggtcctcagggagaggcggcggtgatggaagaacagggacttccaccacaggctccaggacatgtggactgaggggctgtggagtctgggcctgtggctcccgtctgccccatggggaattctgtagtgctgcagggtccctcgggtgctgtgggccagatccgggcggggacctactgtccttgggggtgctcttctacgtcccttgtccggtgattggcaaggctggtccttccaggtctctgggaggcagctcaccccagggtggcccacacctgttcctggcagggcgcctgggaatctagaacagtttagaggggaaagagccacagcttgggggatttcaacgtctgagtcgtctgctcaccaggaagcctctggggcctctgactcctgccggggctgccatagagaatggctggattgggccagctgggagggccctttggctgctccactgtcctggggagtgtggcccatggctgccctccaggaagggcctggcgggggggatgctgggcatgtgtttccagcgtccttgccccagctgttccagctcagtctccaccaccttcttctctcccaggtggccataaaagacaagcaggaaggaattgagtaggggccagagggggctctgctcggcctgtgagccccgttcctacctgtgcctgaccctccgctccaggtaccacaccgaggagagcggccggtcccagccatggcccgccttgtggccacccctcaccctgacacgagacgtgtcctgtacatagattaggttttatattcctaataaagtatagcggaagagacctgg

SEQ ID NO: 70612 - DNA, 791 bp, Homo Sapiens
  misc_feature (80)..(114): n is a, c, g, or t
tgtatagatcactataggggctacgtccgttcatagcgaacgaccgagcgcagcgaagtagtgagcgaggaagcggccgnnnnnnnnnnnnnnnnnnnnnnnnnnnnnnnnnnncagtcgacggtaccggacatatgcccgggaattcggccattacggccggggagaggcctcttattagggctctggtggcggcggcggcggacccttggggtctggacgcgacggcggcgggagcatgaacgcccctccagccttcgagtcgttcttgctcttcgagggcgagaagaagatcaccattaacaaggacaccaaggtacccaatgcctgtttattcaccatcaacaaagaagaccacacactgggaaacatcattaaatcacaactcctaaaagacccgcaagtgctatttgctggctacaaagtcccccaccccttggagcacaagatcatcatccgagtgcagaccacgccggactacagcccccaggaagcctttaccaacgccatcaccgacctcatcagtgagctgtccctgctggaggagcgctttcgggtggccataaaagacaagcaggaaggaattgagtaggggccagagggggctctgctcggcctgtgagccccgttcctacctgtgcctgaccctccgctccaggtaccacaccgaggagagcggccggtcccagccatggcccgccttgtggccacccctcaccctgacaccgacgtgtcctgtacatagattaggttttatattcctaataaagtatagcgggagagacctgaaa

SEQ ID NO: 70613 - DNA, 698 bp, Homo Sapiens
gggagcacaacgtcgaaagcagccgttgggagcccaggaggcggggcgcctgtgggagccgtggagggaactttcccagtccccgaggcggatccggtgttgcatccttggagcgagctgagagctcgagtacagaacctgctaaggccatcaaacctattgatcggaagtcagtccatcagatttgctctgggccggtggtaccgagtctaagcactgcggtgaaggagttagtagaaaacagtctggatgctggtgccactaatattgatctaaagcttaaggactatggagtggatctcattgaagtttcaggcaatggatgtggggtagaagaagaaaacttcgaaggcttaactctgaaacatcacacatctaagattcaagagtttgccgacctacctcaggttgaaacttttggctttcggggggaagctctgagctcactttgtgcactgagtgatgtcaccatttctacctgccatgtatcggcgaaggttgggactcgactggtgtttgatcactatggggaaaatcatccagaaaaaccccctaacccccacccccaaaggggatggaccgggtccagtggggggaagccaagttaattttttccataaccgcctaacccttgggtgccaccccccttaaaaaggaaaatttttttccacaaaggggggaacatacttttttaaagg

SEQ ID NO: 70614 - DNA, 1049 bp, Homo Sapiens
aaggtagcgaggcctgggtggcgaattcggcacgaggagaggattggagaggaagagttggattccagaaatatgcaggaggtggccgcaggaattgggagataaggcagagggaagaggccatgcccagtttctgatgtggcctgggcgtgaatgcaaaaattggggtcttctgtgctttgcaagtgagtgcaccaccacagtttgctttacggcaaggccccaggaaaaggggttctggggatgtcatctcaacggcagtacagaacctgctaaggccatcaaacctattgatcggaagtcagtccatcagatttgctctgggccggtggtactgagtctaagcactggatgaagaagatagtagaaaacagtctggatgctggtgccactaatgttgatctaaagcttaaggactatggaatggatctcattgaagtttcaggcaatggatgtggggtagaagaagaaaacttcgaaggcttaatctctttcagctctgaaacatcacacatctaagattcaagagtttgccgacctaactcgggttgaaacttttggctttcgggggaaagctctgagctcactttgtgcactgagtgatgtcaccatttctacctgccacgtatcggcgaaggttgggactcgactggtgtttgatcacgatgggaaaatcatccagaaaaccccctacccccaccccagagggaccacagtcagcgtgaagcagttattttctacgctacctgtgcgccataaggaatttcaaaggaatattaagaagaaacgtgcctgcttccccttcgccttctgccgtgattgtcagtttcttgagggctccccagccatgcttcctgtacagcctgcaaaactgactcctagaagtaccccaccccacccctgctccttggaggacaacgtgatcactgtattcagctctgtcaagaatggtccaggttcttctagatgatctgcacaaatggttcctctcctccttcctgatgtctgccattagcattggaataaagttcctgctgaaaatccacatc

SEQ ID NO: 70615 - DNA, 917 bp, Homo Sapiens
attccccgttggggaatctgaggaaggcaggccatgggcttggaggcgggacacgcgtcagtagcaggtggcggcggggctatggagctcaaggatggagcaaatgtcaacaggcacagatgatgggaggtttaactgacgctgctgcactggataccccaccccggtgccgggcacataggtgcagcctgagagtaagcagacctgggttggaaggtcccgcgattcaccaccgacaggatgggcggccttggcaacccccgacccctcgcaggcctgttcccttatccatgagatggaactcggacaaggtggccacaggaaggctttgcaaactgtgaagtgcagtgcctacgtgggcgtgccagtggcctcgccggagccggtagggaacactctgcagtccaggccaggccccggtaggacacccagctgtgcatcccgcccgtggccgcaaggcccgcaccttggccaacaggagcagggtgcggctggtgcgggcgtccgcgtggcgctcccgcaggtggaagagcttgggcgacatgatggcgggagagaagaagcgcaggcacaggaagctggtgacggcgatgaacggtacattctggaggggttgccggaaagagcgcgggctggagttccccaagaccagggctcctgggcagacccctccccttaggctccggccctgaccctcgccgggacaacaggctccctgggtcctccccagcgctccctgggttcccaagcgatccttacggcccggaccattggcccgaggcccaaggccaaagccagggccaagactagacccaagagggttggacgggagacacactcgtgagtggggacgccgtgggaattgccgatcggcacagcgcgcggagaaaatgtcggagaaaggttggcgagcgcac

SEQ ID NO: 70616 - DNA, 973 bp, Homo Sapiens
  misc_feature (508)..(593): n is a, c, g, or t
gcagcggacgctgagtttgcaggcgccacctgtgaaggaggggccactcttcatccacaggaccaagggcaagggccccctcatgtcctcctccttcaagaagctctacttctccctcactaccgaggccctcagcttcgcgaagacgcccagctccaagtgtgtgaatgagcttaaccagtggctgtctgcgctgcggaaggtgagcatcaacaacaccggactgctgggctcctaccaccctggcgtcttccgtggggacaagtggagctgctgccaccaaaaagagaagacaggtcagggctgcgataagacccggtcacgggtgaccctgcaggagtggaatgaccctcttgaccatgaccttgaggcccagctcatctaccggcacctgctgggcgtggaggccatgctgtggatcaccattaacaaggacaccaaggtacccaatgcctgtttattcaccatcaacaaagaagaccacacactgggaaacatcattaaatcnnnnnnnnnnnnnnnnnnnnnnnnnnnnnnnnnnnnnnnnnnnnnnnnnnnnnnnnnnnnnnnnnnnnnnnnnnnnnnnnnnnnnnttctggcatggaaaagcccctgtgcaactggtaaagatatcaactaagcaccaggaggtatctaaatccaccaggagccataggcatcacgttgacgtccatttaccagtcttccctggcaagattcttctgaattgtgctgccttggccaaaagagctgccccagagcacatcagctatgtgccccagttcttcaaacgacaccttggcggggaagctcacccgttccaccttcacgcctggagcagcctctaggccagttcagcagccagacattctgattggatccaccggctggtggggccctcagcacggcaccctgagcttcggccccggcaaacaggactccggtctgcgctttccagagggtcgatctccct

SEQ ID NO: 70617 - DNA, 855 bp, Homo Sapiens
cggtccggaattcccgggatccagcttctccagggccaagctgttgggggtgaggtgcagcccgaagcagccagaccagcccctgagcctcccgggtgctggcagctgtcatggggctaccctgggggcagcctcacctagggctgcagatgctcctcctggcattgaactgtctccggcccagcctgagcctgggtgagtgggggtcctggatggacgcgtccagccagacccaaggggctgggggccctgctggagtgattggaccctgggcgcccgcccccctccgattgggagaggcagccccagggacccccacgccctgtctccgtggctcaccttttgtcccccgtggccacagagctggtgccctacacaccacagataacagcttgggacctggaagggaaggtcacagccaccaccttctccctggagcagccgcgctgtgtcttcgatgggcttgccagcgccagcgataccgtctggctcgtggcggccttcagcaatgcctccaggggcttccacaacccggagacactggctgacattccggcctccccacagctgctgaccgatggccactacatgacgctgcccctgtctccggaacagctgccctgtggcgaccccatggcgggcagcggaggcgcccccgtgctgcgggtgggccatgaccacggctgcaacagcagaccttctgcaacgcgcccctcgctgtgcctggaccctatcgggaagacccccggatccatcgacactggacagggcggcgaagtggcagcatgatcgtcattacctccatcctctcttctctggccggcctcctactcttggcttcttggcagctttaac

SEQ ID NO: 70618 - DNA, 1924 bp, Homo Sapiens
gcgagatactggaggggcccatgcacgctcgggatggctggctggcatctggggttccagtggaccctctcgcttggctctggcagtgtggctggatactggcctgcctccgcttaccagagttcccccagcctcctccctgctgtgtggctgcctgcgaggagatggggtggggtgcacttacatttgtcgtctttccagcccctggtgcatctgattaaccagtttcttccatggccaagctgttgggggtgaggtgcagcccgaagcagccagaccagcccctgagcctcccgggtgctggcagctgtcatggggctaccctgggggcagcctcacctagggctgcagatgctcctcctggcgttgaactgtctccggcccagcctgagcctggagctggtgccctacacaccacagataacagcttgggacctggaagggaaggtcacagccaccaccttctccctggagcagccgcgctgtgtcttcgatgggcttgccagcgccagcgataccgtctggctcgtggtggccttcagcaatgcctccaggggcttccagaacccggagacactggctgacattccggcctccccacagctgctgaccgatggccactacatgacgctgcccctgtctccggaccagctgccctgtggcgaccccatggcgggcagcggaggcgcccccgtgctgcgggtgggccatgaccacggctgccaccagcagcccttctgcaacgcgcccctccctggccctggaccctatcgggtgaagttcctcctgatggacaccaggggctcacccagggctgagaccaagtggtcagaccccatcactctccaccaagggaagacccccggatccatcgacacctggccagggcggcgaagtggcagcatgatcgtcattacctccatcctctcttctctggccggcctcctactcttggccttcttggcagcctctaccatgcgcttctccagcctgtggtggccggaggaggccccggagcagctgcggatcggctccttcatgggcaagcgctacatgacccaccacatcccacccagcgaggccgccacactgccggtgggctgcaagcctggcctggaccccctccccagcctcagcccctagcctggcctctttgcatggggctgggggagatggggcgccgggagtgagtgcatggtgctttgtcccagctcctgcacccacaggccccctcagggctccttgcctttcccccccaccagcacaccccgtaccctgcctggaatcccagcaccagcccccctgcctctcctctgcctttctggtttctctccctctccaagcatctgtaagttgcactcaggagggtttaggggagggccatgggcaggctggtctcgtgatagtgagtgagtgctcatgggatctggttgtttagaagcatgcagcacctcctgcttcactctctctgtctctcctgctccaccatggccagaaacgtgcctgcttccccttcgccttctgccgtgattgtcagtttcttgagggctccccagccatgcttcctgtacagcctgcaaaactgtgagtcaattaaacctcttttcttcataaattccccagtttccagtagttctttatagcagtgtgaaaacagactaatggacccttctggttgaaggaatgtagccattctgcttgtttaagtatttcctttctattcatctctatttcccgggaggtgtttatccaagtgcaataggagatattggtgactgcagagtcccctcagtgttctgctagtaaatagttgaaggttgatcagtgatctccagcattttcagtctggcatggaaaagcccccatgtaactggtaaaggtatcagtaagcacacaggaggtatctaaatccaccagagcctga

SEQ ID NO: 70619 - DNA, 1503 bp, Homo Sapiens
tcccgggatgcacgagaatgtaccgttcatcgccgtcaccagcttcctgtgcctgcgcttcttctctcccgccatcatgtcgcccaagctcttccacctgcgggagcgccacgcggacgcccgcaccagccgcaccctgctcctgttggccaaggcagtccagaacgtgggcaacatggacacgccggcttccagggccaaggaggcttggatggagccgctgcagcccaccgtgcgccagggcgtggcgcagctgaaggacttcatcaccaagctcgtggacatcgaggagaaggacgagctggacctgcagcggacgctgagtttgcaggcgccacctgtgaaggaggggccactcttcatccacaggaccaagggcaagggccccctcatgtcctcctccttcaagaagctctacttctccctcactaccgaggccctcagcttcgcgaagacgcccagctccaagaaaagcgccctcatcaagttagccaacatccgggcagcggaaaaggttgaggaaaagagctttggcggctcgcacgtcatgcaggtcatctacacggacgacgccggcaggccccagactgcctacctgcagtgcaagtgtgtgaatgagcttaaccagtggctgtctgcgctgcggaaggtgagcatcaacaacaccggactgctgggctcctaccaccctggcgtcttccgtggggacaagtggagctgctgccaccaaaaagagaagacaggtcagggctgcgataagacccggtcacgggtgacccctgcaggagtggaatgaccctcttgaccatgacccttgaggcccagctcatctaccggcacctgctgggcgtggaggccatgctgtgggagaggcacggggagctgagcgggggcgcagaggcaggcacggtgcccacgagccctggcaaagtccccgaggactcattggcccggctgctccgggtgctgcaggacctccgcgaggcccatagctccagcccggccggctccccaccctcagagcccaactgcctcctggagctgcagacgtgaggcccgccctacgctccccttgctgagtcccctgccaagcgctcggagcccccccaggacactctgcaccccctcaccccggtcctcctcattagggtgcagggcctaggtctcttccaggtgggggaggggggagagtcaggaataaggggatccccagaagtgcagagctgagcaggcttgggcctgtcatggctggccggaagtgtccccagctccctacagacgctgtagccatcactgcctctccagggaccctcctctcctgcccaggacagacccagccagaaccactgctaggatgggccgcacccaggggtctggcctccagggacctagagaatgggagggagaacggggccccaggagacccggccgccaccccacccgctacccttgggtgccacagggctgtgctgttgccaacagtaaacctgctcttactgtcca

SEQ ID NO: 70620 - DNA, 515 bp, Homo Sapiens
attcaaaggtttccggacctccctaaggttgaaacttctgcgttcggggggaagctctgagctcactttgtgcactgagtgatgtaaccatttctacctgccatgtatcggcgaaggttggactcgactggtgtttgatcactatgggaaaatcatccagaaaaccccctacccccaccccagagggatgacattcagtgtgaagcatttattttctacgctacctgtgcaccataaagaatttcaaaggaatattaagaagaaacgtgcctgcttccccttcgccttctgccgtgattgtcagtttcctgaggcctccccagccatgcttcctgtacagcctgcagaactgactcctagaagtaccccaccccacccctgctccttggaggacaacgtgatcactgtattcagctctgtcaagaatggtccaggttcttctagatgatctgcacaaatggctcctctcctccttcctgatgtctgccattagcactggaataaagttcctgctg

SEQ ID NO: 70621 - DNA, 539 bp, Homo Sapiens
  misc_feature (62)..(193): n is a, c, g, or t
tttcaagaccatccgggcaaacatggtgaaccccgtctctactgaaaatgcggaaattggcnnnnnnnnnnnnnnnnnnnnnnnnnnnnnnnnnnnnnnnnnnnnnnnnnnnnnnnnnnnnnnnnnnnnnnnnnnnnnnnnnnnnnnnnnnnnnnnnnnnnnnnnnnnnnnnnnnnnnnnnnnnnnnnnnnnnggaccccatctcagtcaatcaatcaatctcagtggttgaactacccttggtatggttcagctctgtatccccaaccaaatctcatgtccaattgcaattcccagtgttgagggagggacctggtgggagatgattggctcatggcggctgacgtcccccttgctggtctcgtgatagtgagtgagcgctcatgggatctggttgtttagaagcatgcagcacctcctgcttcactctctctgtctctcctgctccaccatggccagaaacgtgcctgcttccccttcccttctgccgtgattgtcagcttcttgagggctccccagccatgcttcccccgtatcag

SEQ ID NO: 70622 - DNA, 406 bp, Homo Sapiens
caggttgtactggaagcatggctggggagccctcaagaagctgacaatcacggcagaaggcgaaggggaagcaggcacgtggcttcttaatattcctttgaaattccttatggcgcacaggtagcgtagaaaataactgcttcacgctgactgtggtccctctggggtgggggtagggggttttctggatgattttcccatcgtgatcaaacaccagtcgagtcccaaccttcgccgatacgtggcaggtagaaatggtgacatcaccgtgagagaataccaggcatggtgtgttcagtgagagatccgtgatgttgggcactgactactcttttcttcacttgctattctctcaagattttcttacaaagctgatgatccctctgagataaccgagatctaaacg

SEQ ID NO: 70623 - DNA, 369 bp, Homo Sapiens
tgtcggagtgcaatggctgtcaggaagcgtggctggggaggcatcaggaaactgacaatcacggcagaaggcgaaggggaagcaggcacgtctggccatgttggagcaggagagacagagagagtgaagtgggagggctgcacgcttttaaacaaccagatcccacaagcgctcactcaatatcacgagaacagcaagggggaagtcggcccccatgagccaatcacctcccaccaggtccctcccacaacactgggaattacaatttgacatgagatttgggtgtggatacagagctgaaccatgtcaagggtagttcaaccgctgagattgattgattgattgattgactgagatggagtcctgctc

SEQ ID NO: 70624 - DNA, 660 bp, Homo Sapiens
  misc_feature (56)..(74): n is a, c, g, or t
  misc_feature (599)..(599): n is a, c, g, or t
ctgcatcagtaattttaatagagactcttagtggttatcaacaactggtcagttgnnnnnnnnnnnnnnnnnnnccacactgctctctggattcgaacctagtgaattctgggctcagtcctcctcctccatctcgttcttgatccagtccacgtagttgagcactttggtgtagaagccatagcccctgctgcacccgatgccccaggacacgatgcccgtggccacccagcgatcagtgttcgggtcccttactgcaaaaacgcccccactatccccctggcaggcgtcctgctttagagatgggtgtccagcacagaacatgttttgagagaacacatccatcctattctttccccggagccagttctcacaggcctgtggattagctacgggcagacggacaaacctgaggtcatgagcaatcttctcctccatgaccccgaagccactgacatagcccatcaagcccaggtcgtagaaggtatcgttgtcagggaaggcagatggggaggaggttgggacccagggtgacactattttccagctccagaagggcgatgtgcccatcaaaattgtaggactcatcccgacggtantccgggtggacgctgaccctgcggatggggtgatttcctagcttcatgagctcttccacat

SEQ ID NO: 70625 - DNA, 991 bp, Homo Sapiens
  misc_feature (14)..(14): n is a, c, g, or t
  misc_feature (919)..(936): n is a, c, g, or t
attcggcacgatgngcagggagtctgagcaaggggtgtacacctgcacagcacagggcatttggaagaatgaacagaagggagagaagattcctcggtgcttgccagtgtgtgggaagcccgtgaaccccgtggaacagaggcagcgcatcatcggagggcaaaaagccaagatgggcaacttcccctggcaggtgttcaccaacatccacgggcgcgggggcggggccctgctgggcgaccgctggatcctcacagctgcccacaccctgtatcccaaggaacacgaagcgcaaagcaacgcctctttggatgtgttcctgggccacacaaatgtggaagagctcatgaagctaggaaatcaccccatccgcagggtcagcgtccacccggactaccgtcaggatgagtcctacaattttgagggggacatcgccctgctggagctggaaaatagtgtcaccctgggtcccaacctcctccccatctgcctccctgacaacgataccttctacgacctgggcttgatgggctatgtcagtggcttcggggtcatggaggagaagattgctcatgacctcaggtttgtccgtctgcccgtagctaatccacaggcctgtgagaactggctccggggaaagaataggatggatgtgttctctcaaaacatgttctgtgctggacacccatctctaaagcaggacgcctgccagggggatagtggggggcgtttttgcagtaagggacccgaacactgatcgctgggtggccacgggcatcgtgtcctggggcatcgggtgcagcaggggctatggcttctacaccaaagtgctcaactacgtggactggatcaagaaagagatggaggaggaggactgagcccagaattcactaggttcgaatccagagagcagtgtggnnnnnnnnnnnnnnnnnncaactgaccagttgttgataaccactaagagtctctattaaaattactgatgcag

SEQ ID NO: 70626 - DNA, 426 bp, Homo Sapiens
tattgaaaaggatcaatgatctgtgttgccaagtccaatttgcctcaaagccctgccccgctccagggcttggggaggctggcccagtccccatttctggcaaaagagagaggggcagcattgagcacagtgtctttcccccagctgcatgttttggcttcagtggcctggggatggtcccaatggcgctgggaaccccgaggtggcaggcctgcttctaactccatcttctttctgtcactgcgccccctccacccctcccctcagcgatttgcataaccaaatgatcaagagcatcaaaggattgccctggcagggcgaggacccccgtagccttctccagtccctcagtcggctccagaaaccccgcgccttcatcctgaaaagtaaaggtatcaaacaaaagcagatcattccaaaggtaaa

SEQ ID NO: 70627 - DNA, 827 bp, Homo Sapiens
  misc_feature (544)..(561): n is a, c, g, or t
ccgagggtcaggttcaccggaattacgttagggatagtccttcattttgagggggacatcgccctgcggaagctgaaaatagtgtcaccctgggtcccactctcccccccatctgcctccctgacaacgataccttctacgaccggggcttgatgggctatgtcagtggcttcggggtcatggaggagaagattgctcatgacctcaggtttgtccgtctgcccgtagctaatccacaggcctgtgagaactggctccggggaaagaataggatggatgtgttctctcaaaacatgttctgtgctggacacccatctctaaagcaggacgcctgccagggggatagtgggggcgtttttgcagtaagggacccgaacactgatcgctgggtggccacgggcatcgtgtcctggggcatcgggtgcagcaggggctatggcttctacaccaaagtgctcaactacgtggactggatcaagaaagagatggaggaggaggactgagcccagaattcactaggttcgaatccagagagcagtgtggnnnnnnnnnnnnnnnnnncaactgaccagttgttgataaccactaagagtctctattaaaattactgatgcagaaagaccgtgtgtgaaattctctttcctgtagtcccattgatgtactttacctgaaacaacccaaagggcccctttctttcttctgaggattgcagaggatatagttatcaatctctagttgtcactttcctcttccactttgataccattgggtcattgaatataactttttccaaataaagttttatgagaaatgccagtgtgcaaaaa

SEQ ID NO: 70628 - DNA, 688 bp, Homo Sapiens
  misc_feature (123)..(123): n is a, c, g, or t
  misc_feature (159)..(159): n is a, c, g, or t
  misc_feature (615)..(632): n is a, c, g, or t
ctctttgaatgtgtcttggcccacacaaatgggaagagctcatgaggttaggaatcaccccatcccgcagggtcagcgtccacccggactacggtcagaatgagtcctacaattttgaggggnacatcgccttgctggagctggaaaatagtgtcaccntgggtcccaacctctccccccatctgcctccctgacaacgatacccttctacgaccggggcttgatgggctatgtcagtggcttcggggtcatggaggagaagattgctcatgacctcaggtttgtccgtctgcccgtagctaatccacaggcctgtgagaactggctccggggaaagaataggatggatgtgttctctcaaaacatgttctgtgctggacacccatctctaaagcaggacgcctgccagggggatagtgggggcgtttttgcagtaagggacccgaacactgatcgctgggtggccacgggcatcgtgtcctggggcatcgggtgcagcaggggctatggcttctacaccaaagtgctcaactacgtggactggatcaagaaagagatggaggaggaggactgagcccagaattcactaggttcgaatccagagagcagtgtggnnnnnnnnnnnnnnnnnncaactgaccagttgttgataaccactaagagtctctattaaaattactgatgcaga

SEQ ID NO: 70629 - DNA, 1139 bp, Homo Sapiens
  misc_feature (81)..(115): n is a, c, g, or t
  misc_feature (892)..(980): n is a, c, g, or t
  misc_feature (994)..(994): n is a, c, g, or t
  misc_feature (1030)..(1048): n is a, c, g, or t
aaaattgtaaatcactataggcgctagctcgttatagccgaacgacgagcgcagcgaagtagtgagcgaggaagcggccgnnnnnnnnnnnnnnnnnnnnnnnnnnnnnnnnnnncagtcgacggtaccggacatatgcccgggaattcggccattacggccggggtcattacacatgctattgatgcttgcttaaaatcgagtaacagcatcgcacccatttatgactgccgtagatctaatggaagcaagccaactgtgtagcatggactcgaaagcaaatattgtacatggtctatcagtcttggaaatctgtcttataatagcaatgaaacatttaaatgacatctatgaggaagagccatttaattttcaaatggtctataatgagtttcagaagtttgttcaaaggaaagcacattccgtttataattttgaaaaacctgttgtcatgaaggcttttgaacacttgcagcaattagaattaataaagcccatggaaagaacttcaggaaattcacagagagagtaccagctgatgaaactgcttttggataatactcaaattatgaatgctctgcagaaatatcccaactgtcctacagatgtgaggcagtgggcaacatcctcactaagctggttatgaatataaccagtgacttcaactttggcatttcattcatacttctgtagagaacggaaaactattgtccattaacatgatatgctaaacattctataaacattcttgtatttatgtgagacttgcccatctactgtcttggctgtgtcttgccttttaatcatgaacagttacatgatttataatttcactgattgagattactttgtaagtagctgttcagaagaataaaatatgactgttttaggnnnnnnnnnnnnnnnnnnnnnnnnnnnnnnnnnnnnnnnnnnnnnnnnnnnnnnnnnnnnnnnnnnnnnnnnnnnnnnnnnnnnnnnnngagccgacaaaaanaaacccgttttgttgcgggccccctccggccccttnnnnnnnnnnnnnnnnnnncctcttccttttgtggggcgcgggggccccccaaagagaaaagggaaaccgggggccaaaaggtggtttccccaaagaaaaaccggggccc

SEQ ID NO: 70630 - DNA, 680 bp, Homo Sapiens
  misc_feature (12)..(12): n is a, c, g, or t
  misc_feature (106)..(106): n is a, c, g, or t
catcactgggcnccagagagagctgtccgccagtgcatcattaggggtctttcattgctagtgactagccccttaaatgccagcctgagtacctgaaggaatctgngaattagccctggcctgaaagtggcccatcattcatacccactgttctgaaggcttgaaaacaaaacatatccacaacattggcttgatgtgatcatcatctcataactgagcaagaagactatgcaaatcttagggcgctcgctccctgcacacggaaagaactctgtttaaatgctcagttcagaacactttgggccacatagtgattttggaaaacaggataatcgtggtgtaaatgagtgtttcctttcaaagtccactgcagagcttttatccatatggtatgcacatgtagccaatattggtttctttttcttaatatatatattttattttaaaacaacaaaaagggagggcgttgacaccattccccacagagatagtcatgctgagtgtgggttgtttaaacatgcatattgaaataacacatatagtaacgtgggaatactaaaaaataaccaagattttatatttttgtaaattatactttctatactgtagattgtgtatgttatgtgtttttatggaaagctaataaattaaaggtacagtggtatcttgaaaaactgaat

SEQ ID NO: 70631 - DNA, 755 bp, Homo Sapiens
ggggccgcacgttgggccccagcgccaggtacatggtcgctgtccacatgcacaggctctatgagaagtacagccggcaggcgcgcggccgggagggggcaacacggtccgcagcttcagggccaggctggaagtggtcgaccagaaggccgtgtatttcttcaacctgacttccatgcaagactcggaaatgatccttacggccactttccacttctactcagagccgcctcggtggcctcgagcgctcgaggtgctatgcaagccgcgggccaagaacgcttcaggccgcccgctgcccctgggcccgcccacacgccagcacctgctcttccgcagcctctcgcagaacacggccacacaggggctactccgcggggccatggccctggcgcccccaccgcgcggcctgtggcaggccaaggacatctcccccatcgtcaaggcggcccgccgggatggcgagctgctcctctccgcccagctggattctgaggagagggacccgggggtgccccggcccagcccctatgcgccctacatcctagtctatgccaacgatctggccatctcggagcccaacagcgtggcagtgacgctgcagagatacgagcccttccctgccggagaccccgagccccgaagcaggccccaacaactcagcggacccccgcgtgcgccgagccgcgcaggccactgggaccctccaggacaacgagctgccggggctggcatgagaggccgacgcagcgcca

SEQ ID NO: 70632 - DNA, 576 bp, Homo Sapiens
cctggacttccagcctctagaactatgagaaagaagtttctgctgtttataagataccctcatttatggtgttttgttattcagatcgaacagactaggaaatagtatggagtcccatttcgtggtatgctgtttggaggagattttcacaagtgatgataacctgtttttcttccaactctgactttggaaaacatcgtaaaagataaagaagttgtaatacaacatggatgaaccctgaaaacattatgccaaatgaaagaagccattcacaaaagatcatatattgaaataccagaaaggaaccagggtccggttgcggctattagatcttgaacttacgtctaggttcctgggagcaacaacagatacaactgtactagaggctaatgcagttctcttgggaatccaggagagtaaagactcaagatcgaaagaagaacatcatgaaaaataaatgaactttgcttagtggattgactcctttgctgaagtcagttattcatcaagaatgcaattagactaattgtgaataaatgattgaatgaagatataataaataaaagctataattat

SEQ ID NO: 70633 - DNA, 839 bp, Homo Sapiens; identical to SEQ ID NO: 3590

SEQ ID NO: 70634 - DNA, 665 bp, Homo Sapiens
  misc_feature (189)..(270): n is a, c, g, or t
  misc_feature (530)..(530): n is a, c, g, or t
caagaccatccaataatttactgtgatcccatctgtgcccgacaagggcccacagaggcctgggaggggagctaagggctggggttccggtggcatttgggatgttcaagacagtctgtgcacagcctccctgggagggtctgcagtcacctcggcccacggtcccggggtgactgggctccagcagcnnnnnnnnnnnnnnnnnnnnnnnnnnnnnnnnnnnnnnnnnnnnnnnnnnnnnnnnnnnnnnnnnnnnnnnnnnnnnnnnnntgagcttgtgctgcgtcaggagagcacacacttgcagctcatgcagccggggccactctcatcaggagggttcagcttccgcagcttgtgctgccggatctcacgcaccaacgtgtagaaggcatcctccactccagcgcgaggggccgctgggtcacatgggtcccggggggtcccagagggtcccggagctggagctagagccagagcggctgccctgccgggtcttggccgaggtctcgatgtaggggatgccgtancttcgggcgaggtcctgagcctgccgagattccacagtgcgtgcagccaggtcacacttgttccccaccagcaccatgggcacgtcatccgagtccttcacccgtttgatctgctccctgtactggtggatgtcc

SEQ ID NO: 70635 - DNA, 1040 bp, Homo Sapiens
  misc_feature (58)..(110): n is a, c, g, or t
  misc_feature (793)..(848): n is a, c, g, or t
ggcacgggggcaacccgagccgcacccgccgcggacggagcccatgcgcggggcgaannnnnnnnnnnnnnnnnnnnnnnnnnnnnnnnnnnnnnnnnnnnnnnnnnnnnggggcagtcgcgcctgtgaacggtggggcaggagaccctgtaggaggaccccgggccgcaggcccctgaggagcgatgacggaatataagctggtggtggtgggcgccggcggtgtgggcaagagtgcgctgaccatccagctgatccagaaccattttgtggacgaatacgaccccactatagaggattcctaccggaagcaggtggtcattgatggggagacgtgcctgttggacatcctggataccgccggccaggaggagtacagcgccatgcgggaccagtacatgcgcaccggggagggcttcctggtgtgtgtttgccatcaacaacaccaagtcttttgaggacatccaccagtacagggagcagatcaaacgggtgaaggactcggatgacgtgcccatggtgctggtggggaacaagtgtgacctggctgcacgcactgtggaatctcggcaggctcaggacctcgcccgaagctacggcatcccctacatcgagacctcggccaagacccggcagggagtggaggatgccttctacacgttggtgcgtgagatccggcagcacaagctgcggaagctgaaccctcctgatgagagtggccccggctgcatgagctgcaagtgtgtgctctcctgacgcagcacaagctcaggacatggaggtgccggatgcnnnnnnnnnnnnnnnnnnnnnnnnnnnnnnnnnnnnnnnnnnnnnnnnnnnnnnnngaagggctgctggagcccagtcaccccgggaccgtgggccgaggtgactgcagaccctcccagggaggctgtgcacagactgtcttgaacatcccaaatgccaccggaaccccagcccttagctcccctcccaggcctctgtggcgcttgtcgggcacagatgggatcacagtaaattattggatggtcttg

SEQ ID NO: 70636 - DNA, 210 bp, Homo Sapiens
gcccgacaagggcccacagaggcctgggaggggagctaagggctggggttccggtggcatttgggatgttcaagacagtctgtgcacagcctccctgggagggtctgcagtcacctcggcccacggtcccggggtgactgggctccagcagcccttccttccttccttgcttctagaactataagaaataaatttctgttgttcataagc

SEQ ID NO: 70637 - DNA, 606 bp, Homo Sapiens
tgcaggacaggggcaagaagttgccaaaaggtctggaatggagcttggaaaaatgttggatatcagcaacatggggctttcactgcagcagcaggtctgttttctacctcaagtctgtctgtctggcccttcctttcctggcgcagtctttgtcttaccttctgtctccaacttccttaaaccttctaaagaagaggataaagtagtttatgactcagccctccccaccccacctctatgaccccaaggccttgagtgaggcatccacgtccgtcctgttcccctcatcctagtcagtccatctgtttgcccctgccaaggggccctgaggtccgtgaatgcatgtgtcttccttgacccactccatgtctatatgtcaccttcccctggccctgcctccccacgtctcccccttgtgtctcccttctccctcacctgctgcttcccctcacagagaccttggccagtgccaaggaggagaacgtcgagattcaccagaccttggaccagaccctgctggaactcaacaacctgtgagggccagccccacccccagccaggctatggttgccaccccaacccaataaaactgatgttactagcctc

SEQ ID NO: 70638 - DNA, 598 bp, Homo Sapiens
agtaaatgtggggaccaagagaaggagctgaaaattgttaccaacaacttgaaatccctgagaggcccaggcggacaagtattccaccaaagaagataaatatgaagaggaggatcaaactgttgaaggagaagctgaaggaggctgagacccgagcagagtttgccgagaggtctgtggcaaagttggagaaaaccatcgatgacctagaagatgaagtctatgcccagaagatgaagtacaaggccattagcgaggaactggacaacgcactcaatgacatcacctccctctgagccccacgccagcgtggccacctcagctctcttctctcctctcctttccattctctctatggggaggggagcaggcaggaggagcagaaattgccaacattgcacagccaggctgggagcagcctagggagagcccccatcatgcccaccacccactctggcactggcttcatcctttacctatccccttccaccctcctttgctgcttaataaattctgaacttggtctccatgctgttttcctgccctccagagagcacctctatcgccaccacggagcactggttcactcctgacaccc

SEQ ID NO: 70639 - DNA, 1114 bp, Homo Sapiens
  misc_feature (28)..(28): n is a, c, g, or t
ggggtccggaaattcccgggaatatcgntcgaacccacgcgtccgcccacgcgtccgcgcccgcgtggccgggacgtcccagtcccgctccgtcctcctcgcctgccaccggtgcacccagtccgctcacccagcccagtccgtccggtcctcaccgcctgccggccggcccaccccccaccgcagccatggacgccatcaagaagaagatgcagatgctgaagctggacaaggagaacgccatcgaccgcgccgagcaggccgaagccgacaagaagcaagctgaggaccgctgcaagcagctggaggaggagcagcaggccctccagaagaagctgaaggggacagaggatgaggtggaaaagtattctgaatccgtgaaggaggcccaggagaaactggagcaggccgagaagaaggccactgatgctgaggcagatgtggcctccctgaaccgccgcattcagctggttgaggaggagctggaccgggcccaggagcgcctggctacagccctgcagaagctggaggaggccgagaaggcggctgatgagagcgagagaggaatgaaggtcatcgaaaaccgggccatgaaggatgaggagaagatggaactgcaggagatgcagctgaaggaggccaagcacatcgctgaggattcagaccgcaaatatgaagaggtggccaggaagctggtgatcctggaaggagagctggagcgctcggaggagagggctgaggtggccgagagccgagccagacagctggaggaggaacttcgaaccatggaccaggccctcaagtccctgatggcctcagaggaggagtattccaccaaagaagataaatatgaagaggagatcaaactgttggaggagaagctgaaggaggctgagacccgagcagagtttgccgagaggtctgtggcaaagttggagaaaaccatcgatgacctagaagagaccttggccagtgccaaggaggagaacgtcgagattcaccagaccttggaccagaccctgctggaactcaacaacctgtgagggccagccccacccccagccaggctatggttgccaccccaacccaataaaactgatgttactagcctctc

SEQ ID NO: 70640 - DNA, 670 bp, Homo Sapiens
  misc_feature (20)..(20): n is a, c, g, or t
  misc_feature (32)..(32): n is a, c, g, or t
  misc_feature (73)..(73): n is a, c, g, or t
cctgcagaagctggaggagnccgagaaggcgnctgatgagagcgagagaggaatgaagtcatcgaaaaccggnccatgaaggatgaggagaagatggaactgcaggagatgcagctgaaggaggccaagcacatcgctgaggattcagaccgcaaatatgaagaggtggccaggaagctggtgatcctggaaggagagctggagcgctcggaggagagggctgaggtggccgagagccgagccagacagctggaggaggaacttcgaaccatggaccaggccctcaagtccctgatggcctcagaggaggagtaaatgtggggacctagaggaggagctgaaaattgttaccaacaacttgaaatccctggaggcccaggcggacaagtattccaccaaagaagataaatatgaagaggagatcaaactgttggaggagaagctgaaggaggctgagacccgagcagagtttgccgagaggtctgtggcaaagttggagaaaaccatcgatgacctagaagagaccttggccagtgccaaggaggagaacgtcgagattcaccagaccttggaccagaccctgctggaactcaacaacctgtgagggccagccccacccccagccaggctatggttgccaccccaacccaataaaactgatgttactagc

SEQ ID NO: 70641 - DNA, 1735 bp, Homo Sapiens
ccccaaagctccttgagacagtgcggtttccgctgatggaagctgaggtcctgcagcggctgcatgacaagctggaccccagccctttgagggacacagtggccagcgccctcatgtaccaccggaacgagagcctacagcccagcctgcagagcccgcaaacggagctgcggtcggacttccagtgcgttgtgggcttcgggggcattcactccacgccgtccactgtcctcagcgaccaggccaagtatctaaaccccttactgggagagtggaagcacttcactgcctccctggccccccgcatgtccaaccagggcatcgcggtgctcaacaacttcgtatacttgattggaggggacaacaatgtccaaggatttcgagcagagtcccgatgctggaggtatgacccacggcacaaccgctggttccagatccagtccctgcagcaggagcacgccgacctgtccgtgtgtgttgtaggcaggtacatctacgctgtggcgggccgtgactaccacaatgacctgaatgctgtggagcgctacgaccctgccaccaactcctgggcatacgtggccccactcaagagggaggtgtatgcccacgcaggcgcgacgctggaggggaagatgtatatcacctgcggccgcagaggggaggattacctgaaagagacacactgctacgatccaggcagcaacacttggcacacactggctgatgggcctgtgcggcgcgcctggcacggcatggcaaccctcctcaacaagctgtatgtgatcgggggcagcaacaacgatgccggatacaggagggacgtgcaccaggtggcctgctacagctgcacgtctggacagtggtcatctgtctgcccactccctgctgggcacggtgagcctggcattgctgtgctggacaacaggatctatgtgttaggtggccgctcacacaaccgcggcagccgcacaggctacgtgcacatttacgatgtggagaaggactgctgggaggaagggccccagctggacaactccatctcaggcctggcggcctgtgtgctcaccctgccccgctccctgctccttgagccgccccgcgggacccctgaccgcagccaggccgacccggactttgcctctgaggtgatgagtgtgtctgactgggaggagtttgacaactccagtgaggactaggctccctgtgcctggcatcagagggaagggaggctggggctgcagggcagtgaaacccacgcagcctaggccagagcactttactccaggcagggcccctgcccctgttggccacagcttatgggccctgccctctttcttcacaccagccccttggccagcctgccgcaggcatctcagggccatgcagatcccaggctgtggattacgtcactgcaggaactgcttctgaaaggctttggccttcctcagtgagccctggaggggttggccttctctcctccctgcctagatcagtccttctccaaaaggacctgggagctggcagcctgggcaggggggctgaggcacgtggtagccctctttctgtgaatggggtggggctgtgggggcagctggggttggaggatgagagctcctgaggggcagaggagcagagatgcatcagctcgcctgggactggctctgtgataaaaagacccctcccgctgggttttcagaccccatgttgttggtcaatgaaataaagcatcttacag

SEQ ID NO: 70642 - DNA, 1882 bp, Homo Sapiens
  misc_feature (1097)..(1144): n is a, c, g, or t
  misc_feature (1301)..(1310): n is a, c, g, or t
  misc_feature (1699)..(1699): n is a, c, g, or t
  misc_feature (1847)..(1847): n is a, c, g, or t
  misc_feature (1861)..(1861): n is a, c, g, or t
ctgatggcaaaatggttcctataatccctggtggaaatagtatcccactcacattttccaacaggaaggaatatgtggagagggccattgaatatcgacttcatgagatggacagacaggtggctgcagtccgagaagggatgtcctggattgttcctgtgccgctgctgtccctcctcacagcaaaacaactggagcagatggtgtgtgggatgcccgagatctctgtggaagtcttgaagaaagtggtgcggtaccgtgaggtggatgagcagcatcagctggtgcagtggttctggcacacgctggaagagttctccaatgaggagcgggtgcttttcatgaggtttgtgtcaggaagatctcgactaccagccaacactgctgacatttctcagagatttcaaatcatgaaggttgataggccttacgacagtctgcctacctcacagacctgcttcttccagctgaggctgcccccgtactccagccagctggtcatggccgagcgcctgcgctatgccatcaacaactgccgctcaatcgacatggacaactacatgctctcgagaaacgtggacaacgccgagggctccgacactgactactgaccgtgcgggtgctctcaccctcccttctctccctcaataatgctcacttctgatttgatgttgatatacttttatggtaactacatagatgttataagaacataaaccaacattataaacaatggccacatttagttactctaaatgtaacaaagaaattagatgtttttatttttctgtgattgtacaaaaacaacaaaaacgaagtgctctcagtcaggtttttccctccatatttttggtcacttttgataagtttgcatgaaaccattttggtgcatttttagttgggaatggtacatttttgtaaatccacccagtgaacatgaaattgtacattgtgtataattgttcattagaaaggacagttttacatgaatattcatatatttattttgttttaatttgaattgcctgttcagggttccttatgcagagaaataaagcagattcaggaacaaccaaacaaccaaaccacaaccaggnnnnnnnnnnnnnnnnnnnnnnnnnnnnnnnnnnnnnnnnnnnnnnnngccttggtcggccgcctccgccccctcaaaacatttttctaaacacctttctgttggggcggcggggcgccccaaaaggaaaagggaaacttgggccataagctggttccctaaaagaaatcctgggccatgaaaaaagggcttgggatttcccccnnnnnnnnnncccccccgggggaaacccaagcttttttgaaacaaattcccgatgggagtttcggagggtcattaccgggattttatcaaacgggggtgcccaaggggaggcttcgaatataaaaatttaagcccccccggccgttggcccattcatatgggaaatagaggtggtgtaaatattaaataaaagcgattttctgcccggaacgtgggaagacgcccccccaccaaacgcgggtttggaataaacctttgaaattcgcccggggggaggaatataagaacaccatttgtgtcgcccttggcggacaaataaacatatatttcgccccacgtgcgagagaaacaaaccggcggggcgccgtacacacagacattcgttctccgactttattntgggcccacacacctctattataatactatacacacgacgtgtgctgtgaagagatacactcccaccacccgaggggagtatcgcgccctgtggcaaacacacacaaacacactactatattctctctacacataagatcaccccttnttatatagagagangaaacatatggagccgcgccg

SEQ ID NO: 70643 - DNA, 326 bp, Homo Sapiens
gttccttttgtacagtttggtttcaatgacaaattataaaaatgatattgttcttacatgtgttttgattattttcagtttgtcttgatgtttgtggataatagttaaacttattttcaagtttaaaatattttacaaacttgctatgcaaagtggttttaaaaatctcatttctaagcagttttatttaattatgtatggttcatcaaaatatatgttaacaaaatataagataactgaggaaaattaattgccatttgtatattccttagtaccagattatcgttgattatgtgtaatggagagagaataaatagctgaaacct

SEQ ID NO: 70644 - DNA, 1521 bp, Homo Sapiens
cgtacattgacccagatgttgttcactggggcatcttcaggcgaagctcatgcctttcggcagcctctccaggcccagctcctcctgcctcccagtggacctctttcggcccagcccagctcatgcctcccggctggccttcccaagccccgcttttgactttcggtggcctctgcaggcctcgacaaggcccagcctcctgcctcccgaaggcctgcacaggcccagcctatgcctcacagcggactctccacgcccagctagctgttgcctcactgcggcctcccgagtccaaagctcctgcctatcggccgcttcggcaggcccagctcccgcctgccagtggcctcttcaggcccatggggctcattcctgacaacggcctttccaggcccagtttttcccttccggcggcctctccgggcccagaacctcctcaagtcggcctctccagacccacttgcaccctccgggcgtcctctccgggcccagctcttcttcctggttgcgtctccaggcccgactcctgcctctcaacaacctctttggactcagtgcctacccatctcctggcggcattggtcggcccacagcttcctcaagccaagctccccaggcccaggtcaggcctcacggtggcctctccaggatgagctcctgccctccgatggcatctccaggccccaaatggcctccggtcggtgggctcctccacgccaagcttgggcctcccggcggcctctgcaggcccaaatcgtcccgaagtcagtctctccaggcttagctccagcctcccggcggcctctgcaggcccaagtcgtcctcaagtcggcctggaagtgggcctggaagagcagcaagtcggcctccctgggcccagctccgtcctctcgacggcctctccaggtgcaaaacttcctcgagtcagcctctccaggcccagctcctcctgcctcccagtggcctctttcggcccagcccagctcatggctctcggcggccttcccaggccccgcttttgacttttggcagcctcttcaggcgcagaacttgatctccagtcggcctttgcaggcccggcctcctgcctctcgaaggcctgcacgggcccggcctcggcctcggcctcacagcggactctccacgcccagctagctctcgcctcactgcggcctccccagtccaaagctcctgcctttcggccacttcggcaggtccagctcctgcctgccagtggcctctttaggcccagctcattcctcacgtcggccattccaggccccgtttttcccttccggcagcctcttggcctctaatttgtttatcttttgtgtataaatcccaaaatatggaattttggaatatttccaccattatgtaaatattttggtaggtaatttatttggagtgagtttctgcaccaagcccgaattttttattttattttccttattatttggtgttaaacaggtttaatgacagtgatggcaactttttggcacaataaaaaatatccccatg

SEQ ID NO: 70645 - DNA, 818 bp, Homo Sapiens
gcagttagttacgagtcggcgcacgcggcctcggtccggttgactttgcggagccatggagggcggcttcggctccgatttcgggggctccggcagcgggaagctggacccagggctcataatggagcaggtgaaagtgcagatcgccgtggccaacgcgcaggagctgctgcagaggatgacggacaagtgtttccggaagtgtatagggaaacctgggggctccctggacaactccgagcagaagtgcatcgccatgtgcatggaccgctacatggacgcctggaacaccgtgtctcgcgcctacaactcgcggctgcagcgggaacgagccaacatgtgaccggcgagcgcgggccaccccaccctgttcatttccataaacgtgctttgagaggcggggtccgcatgtacgtactgcctgcccggggcttaggagggtggcaccggtgctgggacacacgggactgtgtcctcgccaccccccgccctgccccctgccagccagtgcagcttggatctcgggggtgtggggccctgtgccttcctgaagtgctggcagcccagtggcacctccttcaggcctttggggtattcccctagtgtgcccaagtcagcctcatattctgggcggacagcttgtctggacttcggagttgggggtggtcagacaccacaggagctgtcacctcctgcggatgcgcaaataacattggtggcaggacggagcagaaacctcttcatttccctcctgaggggtctctgggaagaggtgacgcgtgtcctggaaccccagctcggagggtctcaggctcccg

SEQ ID NO: 70646 - DNA, 735 bp, Homo Sapiens
aaacgtagctagtacgagcctggtgtcgaatcggcacgaggcatggagggcggcttcggctccgatttcgggggctccggcagcgggaagctggacccagggctcataatggagcaggtgaaagtgcagatcgccgtggccaacgcgcaggagctgctgcagaggatgacggacaagtgtttccggaagtgtatagggaaacctgggggctccctggacaactccgagcagaagtgcatcgccatgtgcatggaccgctacatggacgcctggaacaccgtgtctcgcgcctacaactcgcggctgcagcgggaacgagccaacatgtgaccggcgagcgcgggccaccccaccctgttcatttccataaacgtgctttgagaggcggggtccgcatgtacgtactgcctgcccggggcttaggagggtggcaccggtgctgggacagacgggactgtgtcctcgccaccccccgccctgccccctgccagccagtgcagcttggatctcgggggtgtggggccctgtgccttcctgaagtgctggcagcccagtggcacctccttcaggcctttggggtattcccctagtgtgcccaagtcagcctcatattctgggcggacagcttgtctggacttcggagttgggggtggtcagacaccacaggagctgtcacctcctgcggatgggcaaataaattggtggaggacggaaaaaaactaaaaacaaacacat

SEQ ID NO: 70647 - DNA, 1017 bp, Homo Sapiens
  misc_feature (33)..(33): n is a, c, g, or t
cccccccgacctgtgagtagaaacaaaaccgcnctgtaaaaggtcctaagtagcgaggcctgggtggcgaattcggcacgagggcgcggcaggcccttcgggacgagctggaggcagagcgtgagtacaaagtgatcggcctcggccgcacgcagtagcccccctactccccggccaagtcagggcctccctcttcccgcggagtcgcaaccacgggtagctcgtgtaggtaacggcaggtccaggcctccgcatgagcggagggccccccgcgcgaccttgaatggcccgggcgcgcgcggtcgtgtgggagttgtagtcctccgtccccgtccgcgcggactccgtttcccgtggtgccccgggcggcccgcttccggcgcagttagttacgagtcggcgcacgcggcctcggtccggttgactttgcggagccatggagggcggcttcggctccgatttcgggggctccggcagcgggaagctggacccagggctcataatggagcaggtgaaagtgcagatcgccgtggccaacgcgcaggagctgctgcagaggatgacggacaagtgtttccggaagtgtatagggaaacctgggggctccctggacaactccgagcagaagtgcatcgccatgtgcatggaccgctacatggacgcctggaacaccgtgtcctcgcgcctacaactcgcggctgcagcgggaacgagccaacatgtgaccggcgagcgcgggcaacccaacctgttcatttccataaacgtgctttgagaggcggggtccgcatgtacgtactgcctgcccggggcttaggaggggtggcaccggtgctgggacacacggggactgtgtcctctgcaacccgccggcctgccccctgccagccagtgcagctttggatctcggggggtgtggggccctgttgccttccctgaagtgcttggcaggcccagtggcacctcctttcaggcccttggaggtattccgcttagtgttgcccaagtcaggctcaa

SEQ ID NO: 70648 - DNA, 646 bp, Homo Sapiens
  misc_feature (65)..(65): n is a, c, g, or t
aaagagctggctccagatgaaaagggcaccatctccagctcttggaagcagagagggtggtcctntggattcccagtggcagcagcaaccaacctggcccttagtagtttctaagttacaccatgttaatggataaaggaattactcagcttgaagggatctgtttcctttacactggcctgatgtgtggggagaaaggggccaaaaagtttaggatttggagttaacatcgtaatttctgctttgttggtcagggtttacagcattaatggacaggttcaccctgacctacaagtcggaacgtgacatggacaaactggcccatatcttcagttattacattagtgacatcgtggagcgtgagtgatcattgtagggtaacaaggtgtggtgctgggctcctgggggtttataaaagaagggggccagaagtactttaaaacaggtaccaaagggtcattcctttagcatcattcatctttggtttcttcaagttgccactgaaaagctagacctttgcctattatctgctaatctacccagtctcacattctattgactcattgttcaaagggggggcaggaggagctaatttcctttgcacatttgtattttatttcaaaataaagtattctcttctaacaat

SEQ ID NO: 70649 - DNA, 1082 bp, Homo Sapiens
  misc_feature (445)..(527): n is a, c, g, or t
atgcagtccggataggaggagatggggaatggaaccaggttcacagggactttcaggcgtggaaaaggcattttccggcactcccctccccctgctcccaggttgtcatgaaggttgacgtggtgtatgagaagcagatgctctacctctacgtgctgagcggcatcggggggctgctgctgctgctgctcattttcatagtgctgtacaaggttggtttcttcaaacggaacctgaaggagaagatggaggctggcagaggtgtcccgaatggaatccctgcagaagactctgagcagctggcatctgggcaagaggctggggatcccggctgcctgaagcccctccatgagaaggactctgagagtggtggtggcaaggactgagtccaggcctgtgaggtgcagagtgcccagaactggactcaggatgcccagggccactnnnnnnnnnnnnnnnnnnnnnnnnnnnnnnnnnnnnnnnnnnnnnnnnnnnnnnnnnnnnnnnnnnnnnnnnnnnnnnnnnnnaactcattcctgcctgtctcctttgcaggctcatagggaagacctgctgagggaccagccaagagggctgcaaaagtgagggcttgtcattaccagacggttcaccagcctctcttggtttccttccttggaagagaatgtctgatctaaatgtggagaaactgtagtctcaggacctagggatgttctggccctcacccctgccctgggatgtccacagatgcctccaccccccagaacctgtccttgcacactcccctgcactggagtccagtctcttctgctggcagaaagcaaatgtgacctgtgtcactacgtgactgtggcacacgccttgttcttggccaaagaccaaattccttggcatgccttccagcaccctgcaaaatgagaccctcgtggccttccccagcctcttctagagccgtgatgcctccctgttgaagctctggtgacaccagcctttctcccaggccaggctccttcctgtcttcctgcattcacccagacagctccctctgcctgaaccgttctctctccactcccgggtaccga

SEQ ID NO: 70650 - DNA, 678 bp, Homo Sapiens
  misc_feature (19)..(19): n is a, c, g, or t
  misc_feature (36)..(36): n is a, c, g, or t
tggagggtagcacatcttnccagcctcccagggctntgcagcctgcagatgccacctgtccctgagagaagttagcgtccctggccctggccggtgtctctcatccttgtgtgctgctctgctaagagatgtccaaggcggagccggggcaagatccttccagactcatctgtcagagccccaagccctttagacccagagcccaaggaccatgcctttgggacattaggactgcagcctttgcttctgtgtattttggagttttggtgacttttgtcacctggacacactcatttgttagccatagtgggttcccttggtcagcaacagtgcatgtacctctggatgtcatctgaggtgagaccaccgaggccttttctctctgtgtacagaggggagttaggagttgctggactggatgcattacgaggactggggacagggtagagggacatccagggatcagggcatgagtgggggcaaccccccggcctctgccctggcatggtctccgcatgggctgaggtgtagctgattggctgccacatttcggccatgctggctggcgtgcccatgttgcagatattttcccgagttccccagaatggatggtattgaatctcagccacatgcaacactgtgtccagcattctttgcaataaatactttttaaaaaaa

SEQ ID NO: 70651 - DNA, 711 bp, Homo Sapiens
  misc_feature (61)..(104): n is a, c, g, or t
gttctttaaagcactttattaatgaaagttggaaacctaaaaattgaacagtagtttaatnnnnnnnnnnnnnnnnnnnnnnnnnnnnnnnnnnnnnnnnnnnntagaaatatacttgacacagcaagacagtcatggtattgttgagtgaaaaaaagttacaaaacagtatgtacactttgatcccattaaaaatatctataaatgcacagaaaagtctggaaggccatatacttaaataacagtggttctccctggatgatggaattatcagtgatttttctttctcactgaatcttttttctttttgccaacagggctatgacttgtattataaaaaagcattaacaattctttaaaaagtgtcctttgaagtaagaatgagagcagaacttagcaatctaagaggcacagggatgtacacatggtttctgatactgttttaacggtttgtcaaggtgttttgatgttagtcaccaattaaaaggcactgtgttgagtgaaaacgtggatggtggtagtgcttactttagactaagcaatccattcctagaaaccttccacagcaaacaagtactggcattctaagcaatacttcccactatgatatccttataccttcctacccacttgtaatacagcccagaagtttcccctacatggacagggcactgttgttggtaagggttacagaaggcagagaggattttt

SEQ ID NO: 70652 - DNA, 970 bp, Homo Sapiens
aaccatcgcaggcccgggtcattgaatttgaagacttacaaacctatgggattgacatcttcatttctgaaatttatccaggaaagtgaagagaaagaagatgattttgatgattgggagccttcagagcacttaacattaagtaattcttcacagtccagtaatgatttaacagggaatgttgtggcaaataatatggtgaatgacagtgaacctgaagttgacatacctcattcttccagtgactctacaattcatgagaacctgactgcaatcccacctttaatagtagctgaaacaacaacagttccttccttggaaaacctgagggttgtattggacaaagcattaacagactgtggagagcttgccttaaaacagcttcattatcttcggccagtggtggttcttgaaagatctaagttttccacaccaattttagacttatttccaacaaaaaagacagatgagctttgtgtaggaagttcataagtagcaattttgttttagtaacagactggctccaacactgcaacatggggacatttgccaactcgaacaaaggctgagaagcagccacaccgttgtttagggtagaataggctgtgtatttacatgaatgtataatatctatgtcagcagtattggctgagtccattagctctccagttggtttaatgattgggtttatttttgtttgtttgtttattaaaaaaatggaactgtacacttgtttggtgctaattaatacatcaaaatatactggggcttcctttttcaaattaagtgtgcatgattgtatatggaacaaatactaaggtcccagggtgggagggctagggaaagggatatggagttcttacttgacttgaatgtgcacctgagggtgctttgtgtaatatattgtacactacagcatcttatattttttgagttgagtttcaataaattacaatttttcacccaaaaa

SEQ ID NO: 70653 - DNA, 815 bp, Homo Sapiens
gcggccgcctgcggagtcgtctggcgcggtttgggaacccgcggaaccatgtgctgaagcccaataaacctctcattctagctaaccgcgtcggggagcggcgccgggagaagggcgaggcgacttgcatcacggagatgtcggtgatgatggcttgctggaagcagaatgaattccgcgacgatgcgtgcagaaaagagatccagggcttcctcgattgtgccgcgagggctcaggaagcccgaaagatgagatcaatacaggaaaccctgggagagtctgggagtttacttccaaataaattgaataagttgttacagaggtttcctaacaaaccttacctcagctgaaaatggacaagtattttcaatgactgaaatatagcttctgacaactatgcagaggcattttagagacattggcattgccatgccctctttggagggtagaagaggcaaaacacttttttcaccctttggaatcatagtatgggtagaagttatgatttatcttgaaataaaatcctctgaacagaacttggccttttgttgtgaattaggtactctcttcattcttgagcctcccctagaccctggaaattctttccttcctgatttgccctaggagcaggacaaataccgttgtattgtctttccctgcatttgaagtcttttacaccatttagtgcccttgcttttggatgcaataaggaagttgaagttgccttcgtctgtaaatacttagtgattgcctattttgtgcgtagtccctgcaaggtgctctctgaataataaagttaacaaactggtgaccta

SEQ ID NO: 70654 - DNA, 1020 bp, Homo Sapiens
atacggcaggtacgaggcctgggtgttgaattcggcacgagggcatttccggcagccatccccgcggtgctgacatcccggttgttcttctgtgccgggggtcttcctgctgtcatgaaggacgtaccgggcttcctacagcagagccagagctccgggcccgggcagcccgctgtgtggcaccgtctggaggagctctacacgaagaagttgtggcatcagctgacacttcaggtgcttgattttgtgcaggatccgtgctttgcccaaggagatggtctcattaagctttatgaaaactttatcagtgaatttgaacacagggtgaatcctctgtccctcgtggaaatcattcttcacgtagttagacagatgactgatcctaatgtggctcttacttttctggaaaagactcgtgagaaggtgaaaagtagtgatgaggcagtgatcctgtgtaaaacagcaattggagctctaaaattaaacatcggggacctacaggttacaaaggaaacaattgaagatgttgaagaaatgctcaacaaccttcctggtgtgacatcggttcacagtcgtttctatgatctctccagtaaatactatcaaacaatcggaaaccacgcgtcctactacaaagatgctctgcggtttttgggctgtgttgacatcaaggatctaccagtgtctgagcagcaggagagagccttcacgctggggctagcaggacttctcggcgagggagtttttaaactttgggagaactcctcatgcaccctgtgctggagtccctgaggaatactgaccggcaatggctgattgacaccctctatgcccttcacagtgggcaacgtaaagcggttccagactctgaaaactgcctgggggcagcagccctgattaccagctaatggaaccccagctctgaggaaaattcatttgttgtggcctcctggaaatgacttttccacaacctggcaatcccagaccactcccttttgaagaaatgccaaaagtgctaaa

SEQ ID NO: 70655 - DNA, 1640 bp, Homo Sapiens
cggaactggcagtaactataacggtacttaaggtagcgaggcctgggtggcgaattcggcacgaggccccgcggtgctgacatcccggttgttcttctgtgccgggggtcttcctgctgtcatgaaggacgtaccgggcttcctacagcagagccagagctccgggcccgggcagcccgctgtgtggcaccgtctggaggagctctacacgaagaagttgtggcatcagctgacacttcaggtgcttgattttgtgcaggatccgtgctttgcccaaggagatggtctcattaagctttatgaaaactttatcagtgaatttgaacacagggtgaatcctctgtccctcgtggaaatcattcttcacgtagttagacagatgactgatcctaatgtggctcttacttttctggaaaagactcgtgagaaggtgaaaagtagtgatgaggcagtgatcctgtgtaaaacagcaattggagctctaaaattaaacatcggggacctacaggttacaaaggaaacaattgaagatgttgaagaaatgctcaacaaccttcctggtgtgacatcggttcacagtcgtttctatgatctctccagtaaatactatcaaacaatcggaaaccacgcgtcctactacaaagatgctctgcggtttttgggctgtgttgacatcaaggatctaccagtgtctgagcagcaggagagagccttcacgctggggctagcaggacttctcggcgagggagtttttaactttggagaactcctcatgcaccctgtgctggagtccctgaggaatactgaccggcagtggctgattgacaccctctatgccttcaacagtggcaacgtagagcggttccagactctgaagactgcctggggccagcagcctgatttagcagctaatgaagcccagcttctgaggaaaattcagttgttgtgcctcatggagatgactttcacacgacctgccaatcacagacaactcacttttgaagaaattgccaaaagtgctaaaatcacagtgaatgaggtggagcttctggtgatgaaggccctttcggtggggctggtgaaaggcagtatagacgaggtggacaaacgagtccacatgacctgggtgcagccccgagtgttggatttgcaacagatcaagggaatgaaggaccgcctggagttctggtgcacggatgtgaagagcatggagatgctggtggagcaccaggcccatgacatcctcacctagggccccctggttccccgtcgtgtctcctttgactcacctgagagaggcgtttgcagccaatgaagctggctgctcagacggtcgacattgaatttgggtgggggttgggatcctgtctgaagtacagactgttcttgctctaaaaacaggactgtccctgatgggagccaggccacagggaggaggcttctttgtgggtctctcctgcagagggtgggggtctcagggtcttaggtgatacgggagagaaagaacgtgccaggcaggaggccccctgaagtctgtgtactccgaggtggatctccatccccatccacctgtacggacatcttttccgttgcggtttgagaatgttcctataataaacccctctgctttgttcttaaaa

SEQ ID NO: 70656 - DNA, 865 bp, Homo Sapiens
tactatgaacccgtggttaaaaaagcaggctggtacggtcggaattcccgggatatcgtcgacccacgcgttcgcgcggtgctgacatcccggtacgttcttctgtgccgggggtcttcctgctgtcatgaaggacgtaccgggcttcctacagcagagccagagctccgggcccgggcagcccgctgtgtggcaccgtctggaggagctctacacgaagaagttgtggcatcagctgacacttcaggtgcttgattttgtgccaggatccgtgctttgcccaaggagatggtctcattaagggtgaatcctctgtccctcgtggaaatcattcttcacgtagttagacagatgactgatcctaatgtggctcttacttttctggaaaagactcgttgagaaggtgaaaagtagtgatgaggcagtgatcctgtgtaaaacagcaattggagctctaaaattaaacatcggggacctacaggttacaaaggaaacaattgaacgatgttgaagaaatgctcaacaaccttcctggtgtgacatcggttcacagtcgtttctatgatctctccagtaaatactatcaaacaatcggaaaccacgcgtctactacaaagatgctctgcggttttgggctgtgttgacatcaaggatctaccagtgtctgagcagcaggagagagccttcagctgggggctagcaaggacttctcggggagggagtttttaactttggagaactcctcatgcaacctgtgctggagtcctgaggaatactgacgggaggtggtggttgaacccttatgctttcaaagtgggaacgtaaagggtcacaatttgagatggctgggcagagctggttgaac

SEQ ID NO: 70657 - DNA, 689 bp, Homo Sapiens
aggaaatcaggtagcccagactggtgatggagcagagtctgggggaagggtcgtgggtggggaattatcaccaacatccattgtagggggaatctatgattctgcttccccagcggattcccactctgtccaccaagtggggggtagcacagcctcacagcaaccgccctgaccttgggcagtctagtgttcctgcattctagtccctgctgtgctgcaggactttgggcaagtgacctgccctctgtgagcctccctctgacacagaggaggtggctccccttccccacaccttagagtggctgggagggtaacaaagagggcctgcccctttagtctcctgcacccctgccccctggttcaccagagggagcggatgaaggatggcagcatctcacatgccccatcaccaactctgaggcacctggggtgggggggcggagcccaggcctctggctgctcccctgtgggagccattggaatgtatcccctgacaggcccccttccgcctccacctcaacccaggtcttggatttcaggtccctccacccccattctgagtctctgtccttctccttccacccgctcccagggtttcccaccacagggtctggaagtgtgtgtgacgcccattgagctgttacccgaagtcagattaaaaatcagggagtgttttccctcgtttctgt

SEQ ID NO: 70658 - DNA, 2073 bp, Homo Sapiens
  misc_feature (708)..(724): n is a, c, g, or t
  misc_feature (1190)..(1206): n is a, c, g, or t
  misc_feature (1562)..(1571): n is a, c, g, or t
  misc_feature (1637)..(1645): n is a, c, g, or t
  misc_feature (1700)..(1700): n is a, c, g, or t
  misc_feature (1823)..(1823): n is a, c, g, or t
  misc_feature (1873)..(1873): n is a, c, g, or t
ctcttcatccaagaccccaccatgccaccccacccagctcccaaccccctaacccagctggccagcgtgcgcgccggtgctgcacgtggtaccagccgtgtcggacatggagctctccgagacagaggacaagatcgcagaggaaggtgggcggcgggagtgcccagccgtgtgacagcatcgttgtggcgtactacttctgcggggaacccatcccctaccgcaccctggtgaggggccgcgctgtcaccctgggccagttcaaggagctgctgaccaaaaagggcagctacagatactacttcaagaaagtgagcgacgagtttgactgtggggtggtgtttgaggaggttcgagaggacgaggccgtcctgcccgtctttgaggagaagatcatcggcaaagtggagaaggtggactgataggctggtgggctggccgctgtgccaggcgaggcccttggcgggcacgggtgtcacggccaggcagatgacctcgtactcaggagcccgatggggaacagtgttgggtgtaccacccatccctgtggtctacccgtgtctagaggcaggtagggggtccctccaagtggtccacaagcttctgtcctgcccccaaggaggcagcctggaccactcctcatagcaatacttggagggcccagcccaagtgaggcagccgaggtccctgctgccagcttcaggtgannnnnnnnnnnnnnnnnggcacctcccttgggcacgtgtgctgggatctactttccctctgggatttgcccacgtacccaggtctggctggggcccaggcccggatgcagaggcctgcagggcctctgtcaattgtacgcgccaccgagtgccttcaacacagcttgtctcttgcctgccactgtgtgaatcggcgacggagcactgcacctgcctccagccgccggctgtgcagtcctgggtcctcctttctgagggcccgtgtaaatatgtacatttctcaggctaggccagcaggggctgcccgagtctgtttttcatgcgatgacacttgtacaattaattatcttttcaaaggtacttggataataatgaaataaaactgtttttgaacctgacacaagaaaccgaaacaagccaagaacaaacccccaagggctcctccccacccccgacgttgctcggcggcgcaaaacgcgcgcnnnnnnnnnnnnnnnnnccttgccggcggcccccggggccccccaaaagaattttgcaaaaccgttgctgtgggcggcccaccggcccccgaaaaggagagcgggaaatgggggcgtaaagcgggttttcccgccgggagaaaccccgcacgcctctgggctgaagggcggctggaacttttcccccccaaaacaaaaaagagacgccccccggggcggggccaaaccccgcgggggggtggtctcgggacgcacatcgcccgcaaaaaaccaacacttccccttggcaccacacacaaactcaccccgcggcgcgcctccgtaagtgcgcagacagtggggggtggttactcaaacagaggcccgccggggnnnnnnnnnnaccaagaggcgcaccccttaaaatatttttttctctactccaacccggccgatggggcgccccccnnnnnnnnntcgagtgaaggggcgtgcgtcagcgctatcgcggggcaactggaaaaatgtcttntccggggttctctttgtacaaaaaaatgtcgcttcggctgcacgtgcgcggaccagaaccgctgtagttctaacgtaacccgcgaactccagccattttttatactaaataaatacgcgcccntttcttccttaagaagcacaaacgccgggtgggcgcctataagcgagggngggtggtgcccgccgcgcgggggtaatgatgccgtgacgacggggaggacgcgggggggtgtgtcctctaacaaacaccccttcttggtggttgaaactccccccgactgttaagcgctcgtaccaaaataaacaactttattgtcgcccgcccctatggtgtgggcgggggaacacagacagtagggggggaccagcac

SEQ ID NO: 70659 - DNA, 1886 bp, Homo Sapiens
  misc_feature (1215)..(1236): n is a, c, g, or t
  misc_feature (1254)..(1753): n is a, c, g, or t
  misc_feature (1792)..(1792): n is a, c, g, or t
acccctcagggctaggtagcgaggcctgggtgttgaattcggcacgagggctctggctgcgcgcggagcgggctccggagggaagtcccgagacaaagggaagcgccgccgccgccgccccgctcggtcctccacctgtccgctacgctcgccggggctgcggccgcccgagggactttgaacatgtcggggatcgccctcagcagactcgcccaggagaggaaagcatggaggaaagaccacccatttggtttcgtggctgtcccaacaaaaaatcccgatggcacgatgaacctcatgaactgggagtgcgccattccaggaaagaaagggactccgtgggaaggaggcttgtttaaactacggatgcttttcaaagatgattatccatcttcgccaccaaaatgtaaattcgaaccaccattatttcacccgaatgtgtacccttcggggacagtgtgcctgtccatcttagaggaggacaaggactggaggccagccatcacaatcaaacagatcctattaggaatacaggaacttctaaatgaaccaaatatccaagacccagctcaagcagaggcctacacgatttactgccaaaacagagtggagtacgagaaaagggtccgagcacaagccaagaagtttgcgccctcataagcagcgaccttgtggcatcgtcagaaggaagggattggtttggcaagaacttgtttacaacatttttgcaaatctaaagttgctccatacaatgactagtcacctgggggggttgggcgggcgccatcttccattgccgccgcgggtgtgcggtctcgattcgctgaattgcccgtttccatacagggtctcttccttcggtcttttgtatttttgattgttatgtaaaactcgcttttattttaatattgatgtcagtatttcaactgctgtaaaattataaacttttatacttgggtaagtcccccaggggcgagttcctcgctctgggatgcaggcatgcttctcaccgtgcagagctgcacttggcctcagctggctgtatggaaatgcaccctccctcctgccgctcctctctagaaccttctagaacctgggctgtgctgcttttgagcctcagaccccagggcagcatctcggttctgcgccacttcctttgtgtttatatggcgttttgtctgtgttgctgtttagagtaaataaactgtttatatnnnnnnnnnnnnnnnnnnnnnncctcgtgccgaattcttnnnnnnnnnnnnnnnnnnnnnnnnnnnnnnnnnnnnnnnnnnnnnnnnnnnnnnnnnnnnnnnnnnnnnnnnnnnnnnnnnnnnnnnnnnnnnnnnnnnnnnnnnnnnnnnnnnnnnnnnnnnnnnnnnnnnnnnnnnnnnnnnnnnnnnnnnnnnnnnnnnnnnnnnnnnnnnnnnnnnnnnnnnnnnnnnnnnnnnnnnnnnnnnnnnnnnnnnnnnnnnnnnnnnnnnnnnnnnnnnnnnnnnnnnnnnnnnnnnnnnnnnnnnnnnnnnnnnnnnnnnnnnnnnnnnnnnnnnnnnnnnnnnnnnnnnnnnnnnnnnnnnnnnnnnnnnnnnnnnnnnnnnnnnnnnnnnnnnnnnnnnnnnnnnnnnnnnnnnnnnnnnnnnnnnnnnnnnnnnnnnnnnnnnnnnnnnnnnnnnnnnnnnnnnnnnnnnnnnnnnnnnnnnnnnnnnnnnnnnnnnnnnnnnnnnnnnnnnnnnnnnnnnnnnnnnnnnnnnnnggcgaacccgacagactataagtacaagcgttcccctgnagtcctcgtggtctctgttcgactgcgctacggaactgtcgctttccctcgggaagggggctcccaactagcttagtaccatcggttagcgtcg

SEQ ID NO: 70660 - DNA, 699 bp, Homo Sapiens
  misc_feature (81)..(185): n is a, c, g, or t
tcctgggtacaagcgattcttgtgcctcagcttcccaagcagtgggattacaggtgcccgcaccagcccagtaattttggnnnnnnnnnnnnnnnnnnnnnnnnnnnnnnnnnnnnnnnnnnnnnnnnnnnnnnnnnnnnnnnnnnnnnnnnnnnnnnnnnnnnnnnnnnnnnnnnnnnnnnnnnatgaaccaccaggccgggctggaatacttactcttgtcgggagattgaaccactaaaatgttagagcagaattcattatgctgtggtcacaggggtgtcttgtctgagaacaaatacaattcagtcttctctttggggttttagtatgtgtcaaacataggactggaagtttgcccctgttcttttttcttttgaaagaacatcagttcatgcctgaggcatgagtgactgtgcatttgagaatagttttccctattctgtggatacagtcccagagttttcagggagtacacaggtagattagtttgaagcattgaccttttatttattccttatttctctttcatcaaaacaaaacagcagctgtgggaggagaaatgagagggcttaaatgaaatttaaaataagctatattatacaaatactatctctgtattgttctgaccctggtgaatatatttcaaaacttcagatgacaaggattagaacactcattaaagatgctattcttcag

SEQ ID NO: 70661 - DNA, 1622 bp, Homo Sapiens
  misc_feature (1107)..(1352): n is a, c, g, or t
agtggagtcctgagatgaagaatgcccgctgtgtacaaaaagaaaatccgttaacacaggcagtgcctaaatgtcagcgctgggagaaactgcagaattcaagatgtgtttgtaaaatgccctacgaatgtggaccttccttggatgtatgtgctcaagatgagagaagcaaaaggatactgcctctgacagtttgcaagatgcatgttctccactgtcagggtagaaattacacccttactggtagggacagctgtactctgcctgcctcagctgagaaagcttgtggtgcctgcccactgtggggaaaatgtgatgctgagagcagcaaatgtgtctgccgagaagcatcggagtgcgaggaagaagggtttagcatttgtgtggaagtgaacggcaaggagcagacgatgtctgagtgtgaggcgggcgctctgagatgcagagggcagagcatctctgtcaccagcataaggccttgtgctgcggaaacccagtaggctcctggaggccctggtcagcttgcttggaatccagcaggcagctggggctgagtgaaaacatctgcacaactgggcactggacagcttttccttctccagtgtctaccttcctcctcaactcccagccatctgtataaacacaatcctttgttctcccaaatctgaatcgaattactcttttgcctcctttttaatgtcagtaaggatatgagcctttgcacaggctggctgcgtgttcttgaaataggtgttaccttctctgggccttggttttttaaaatctgtaaaattagaggattgcactagagaaacttgaatgctccattcaggcctatcattttattaagtatgattgacacagcccatgggccagaacacactctacaaaatgactaggataacagaaagaacgtgatctcctgattagagagggtggttttcctcaatggaaccaaatataaagaggacttgaacaaaaatgacagatacaaaccatttctatcctgagtagtaatctcacacttcatcctatagcagtcaaccaccacagataggaattccttattctttttctaatttttttaagacagagtctcacttagtnnnnnnnnnnnnnnnnnnnnnnnnnnnnnnnnnnnnnnnnnnnnnnnnnnnnnnnnnnnnnnnnnnnnnnnnnnnnnnnnnnnnnnnnnnnnnnnnnnnnnnnnnnnnnnnnnnnnnnnnnnnnnnnnnnnnnnnnnnnnnnnnnnnnnnnnnnnnnnnnnnnnnnnnnnnnnnnnnnnnnnnnnnnnnnnnnnnnnnnnnnnnnnnnnnnnnnnnnnnnnnnnnnnnnnnnnnnnnnnnnnnnnnatgaaccaccacgcctggctggcaatacttactctgtcgggagattgaacgactaaatgtcagagcagaatccatatgctggggtcacacgggtgtcctggcactgagaacaaatacaattcagcctcaccatagggagataacgctgtgtcaacataggactgaacgttggcccgggtctaagcatggaaagaacacacgtcagccgaagcagcggaacgggctttaaaacaggaaccacacagggaaagaccaacacagggaaaccgg

SEQ ID NO: 70662 - DNA, 727 bp, Homo Sapiens
  misc_feature (33)..(33): n is a, c, g, or t
  misc_feature (64)..(64): n is a, c, g, or t
  misc_feature (92)..(92): n is a, c, g, or t
  misc_feature (100)..(100): n is a, c, g, or t
aggtccttcagcatttctctgtgctcagccccntaagtgagtccctgagatgaagaatgccgcntgtgtcaaaagaaatccgtttacacagncaggtgcntaaatgtcagcgcggggagaaactcagaaatcaagaatgtgtttgtaaaatgccctacgaatgtgaacctcccttggatgtatgtgctcaagatgagagaagcaaaaggatactcgcctctgacagtttgcaagatgcatgttctccactgtcagggtagaaattacacccttactggtagggacagctgtactctgcctgcctcagctgagaaagcttgtggtgcctgcccactgtggggaaaatgtgatgtttagcagtgggccgaagaagatacttgaggatgttaaagactcagactgatttgacatgcactgacctctcctatacccctcactggagaagggcacagatcacagacctcagaggattaagattccccacatttcctgatggtggaaatgttctcccaaacaggggtgattccatgccaccttcatgatttttactctgtccttgtattatccatattgtgtactcattttttaaaagtctgacataaaaataacttaaaaatgaaaactttatatcatgtccttaaaaggagcgtatcacttgccataaatactaggtaactataaaagttatatgtaatggaactaaataaagttgtggactctaaaaaaa

SEQ ID NO: 70663 - DNA, 815 bp, Homo Sapiens
cggcagtaactataacggtcctaaggtagcgaggcctgggtggcgaattcggcacgagggtctcctgctgggggccacgggcgtcgggaagacgctgctggtgaaacggctgcaggaggtgagctcccgggatgggaaaggcgacctgggggagccgcccccgacacggcccacggtgggcaccaatcttactgacatcgtggcacagagaaagatcaccatccgggagcttggggggtgcatgggccccatctggtccagttactatggaaactgccgttctctcctgtttgtgatggacgcctctgaccccacccagctctctgcatcctgtgtgcagctcttaggtctcctttctgcagaacaacttgcagaagcatcggtgctgatactcttcaataaaatcgacctaccctgttacatgtccacggaggagatgaagtcattaatcaggcttccagacatcattgcttgtgccaagcagaacatcaccacggcagaaatcagcgcccgtgaaggcactggcttagcaggggtgctggcctggctccaggccacccacagagccaacgattgactgcacggcagaggcgcagctggcctgagctggggagaggtggcagagggcagtatggctttgctgccaatagtttcttctcacaggggcagaataacccaaagtaaccctacatgatggggctctgtgctgagatgcaatgatgtgtaaactgaggcatgtggagatggaagttgacatctggcctctgaaaaaagtgtccccagggcccaggcatggtggtcacacctgtaatcca

SEQ ID NO: 70664 - DNA, 1104 bp, Homo Sapiens
  misc_feature (374)..(674): n is a, c, g, or t
  misc_feature (858)..(858): n is a, c, g, or t
  misc_feature (989)..(989): n is a, c, g, or t
  misc_feature (1043)..(1043): n is a, c, g, or t
  misc_feature (1068)..(1068): n is a, c, g, or t
ggaattcccgggatctgctgggggccacgggcgtcgggaagacgctgctggtgaaacggctgcaggaggtgagctcccgggatgggaaaggcgacctgggggagccgcccccgacacggcccacggtgggcaccaatcttactgacatcgtggcacagagaaagatcaccatccgggagcttggggggtgcatgggccccatctggtccagttactatggaaactgccgttctctcctggcctgtgccgcggataccagtatggagaactgatggccacatgaggacagagacgagtgacaccaggtcgtcttcataaaactcgattccctctgcttctgcttgttcccaaagctttgtttaaagctactttgnnnnnnnnnnnnnnnnnnnnnnnnnnnnnnnnnnnnnnnnnnnnnnnnnnnnnnnnnnnnnnnnnnnnnnnnnnnnnnnnnnnnnnnnnnnnnnnnnnnnnnnnnnnnnnnnnnnnnnnnnnnnnnnnnnnnnnnnnnnnnnnnnnnnnnnnnnnnnnnnnnnnnnnnnnnnnnnnnnnnnnnnnnnnnnnnnnnnnnnnnnnnnnnnnnnnnnnnnnnnnnnnnnnnnnnnnnnnnnnnnnnnnnnnnnnnnnnnnnnnnnnnnnnnnnnnnnnnnnnnnnnnnnnnnnnnnnnnnnnnngcagttttgctctcccagtgccaggtctgtgaggcccaggggaggaagtttggcagcggggcattgctgctgtctttttctttttccccagtttgtgatggacgcctctgaccccacccagctctctgcatcctgtgtgcagctcttaggtctcctttctgcagaacaacttgcagaagcatcnggtgctgatactcttcaataaaatcgacctaccctgttacatgtcccacggaggaagatgaagtccattaatcaggctttccagacatcattgcttgtgccaagcagaacatcacccacgccagaaatcancgcccgtgaaagcactggccttaaccagggggtggctggccctggctcccaggnccacccaccgaagccaaccaattgnactggcaccgccaaaaagcgccaactgggccccttc

SEQ ID NO: 70665 - DNA, 2443 bp, Homo Sapiens
  misc_feature (236)..(274): n is a, c, g, or t
  misc_feature (1602)..(1635): n is a, c, g, or t
  misc_feature (2221)..(2221): n is a, c, g, or t
  misc_feature (2250)..(2250): n is a, c, g, or t
  misc_feature (2318)..(2319): n is a, c, g, or t
  misc_feature (2372)..(2372): n is a, c, g, or t
  misc_feature (2376)..(2376): n is a, c, g, or t
  misc_feature (2413)..(2413): n is a, c, g, or t
ctgggccgcggctacccagagtcaggccacggagcttaggagaccttgggtcagctctgcaaaggggtgtttactgaatgcttctggtatctgcagccccgctggggttcggacagggggtctggaatagggcttcacaactacagcagggctaggaccctcttgggctggaaggagctggagaggcctctgcaagctgtcacaggctcttggtgctggcactggctcaggctttnnnnnnnnnnnnnnnnnnnnnnnnnnnnnnnnnnnnnnnggacaggcacccccttggtggccttcacagtttcaccttcaggctcaaagctggctctgcaggggacatgagaggcacaccgaagacccacctcctggccttctccctcctctgcctcctctcaaaggtgcgtacccagctgtgcccgacaccatgtacctgcccctggccacctccccgatgcccgctgggagtacccctggtgctggatggctgtggctgctgccgggtatgtgcacggcggctgggggagccctgcgaccaactccacgtctgcgacgccagccagggcctggtctgccagcccggggcaggacccggtggacggggggccctgtgcctcttggcagaggacgacagcagctgtgaggtgaacggccgcctgtatcgggaaggggagaccttccagccccactgcagcatccgctgccgctgcgaggacggcggcttcacctgcgtgccgctgtgcagcgaggatgtgcggctgcccagctgggactgcccccaccccaggagggtcgaggtcctgggcaagtgctgccctgagtgggtgtgcggccaaggagggggactggggacccagccccttccagcccaaggaccccagttttctggccttgtctcttccctgccccctggtgtcccctgcccagaatggagcacgggcctggggaccctgctcgaccacctgtgggctgggcatggccacccgggtgtccaaccagaacccgcttctgccgactggagacccagcgccgcctgtgcctgtccaggccctgcccaccctccaggggtcgcagtccacaaaacagtgccttctagagccgggctgggaatggggacacggtgtccaccatccccagctggtggccctgtgcctgggccctgggctgatggaagatggtccgtgcccaggcccttggctgcaggcaacactttagcttgggtccaccatgcagaacaccaatattaacacgctgcctggtctgtctggatcccgaggtatggcagaggtgcaagacctagtcctctttcctctaactcactgcctaggaggctggccaaggtgtccagggtcctctagcccactccctgcctacacacacagcctatatcaaacatgcacacgggcgagctttctctccgacttcccctgggcaagagatgggacaagcagtcccttaatattgaggctgcagcaggtgctgggctggactggccatttttctgggggtaggatgaagagaaggcacacagagattctggatctcctgctgccttttctggagtttgtaaaattgttcctgaatacaagcctatgcgtgacnnnnnnnnnnnnnnnnnnnnnnnnnnnnnnnnnngagagaaacacggacacaacgagccaagcaaaaaaccatacccgcgtgcgacaaccgctacaacaaaacgcgcgaacgacctaatgcagccacacgaccatttccgtgggcgtccggtaacagatccgcaaaaaaagccaatcaaaactctcaggctgggggcgccggcgccgccgtataccgccaacatcgcctttgcccgtaacactgcgcccctgctgcgggtctttagtaacacacactcagcgccttttgacgatccgccgccgccctaaatatatgacggccgggatgcgagtacccaccacacttttcctctaagacgccacacccccacgcgccgccacatccatcgatggtgtttcatctccctgccacttcatccccagaaaaaacacacgcccccgcggggacccttccctcggaccacgaacagtggtagacggcacgcccgcaccccgcacgcccgctcactatcggtgcgagcgcgtcctagagagacgagacatttgacgctactcagcgacgaccctccctctgagagccaacgtacgatgcagagaacctatcctgccaatacgaagancacaccgtcatctcacgaccgatatctanagcccgcatctgcgtataccgcagcgcgcacgggcgcagcatgtactgaaccgacgtcggttgacatnnacagtatctcgtcgagtgcgacacgaatgatatcacatcctatcagtaccccncctncgcgacgcgtcgatatctcttctctgcttcgtctgancactatcatacaacatatatgcactccgcc

SEQ ID NO: 70666 - DNA, 699 bp, Homo Sapiens
gtaaagacaactggaaatgccacagtggaccactctccaagtacttggcccatgcgcattgccatcgagcggaggcaacagcaggaagcaggggagccaggagggcctggaggggctgcctctgacaccgaaggacctgatgggtgtggcggggagggtgggggtgccggaggaggtgacggtcctgaggagcctgctttgcccagcctggagggcgtcagtgaaaagcagtacaccatctacatcgcacctggaggcggggcgttcacgacgttgaatggctcgctgaccctggagctggtgaatgagaaattctggaaggtgtcccggccactggagctgtgctatgctcccaccaaggatccaaagtgaccccaccaggggacagccagaggaaggggaccatggggtatccctgtgtcctggtctatcaccccagcttctttgtcccccagtacccccagcccagccagccaataagaggacacaaatgaggacacgtggcttttatacaaagtatctatatgagattcttctatattgtacagagtggggcaaaacacgcccccatctgctgccttttctattgccctgcaacgtcccatctatacgaggtgttggagaaggtgaagaaccctcccattcacgcccgcctaccaacaacaaacgtgcttttttcctctttgaaacctgcaaaaa

SEQ ID NO: 70667 - DNA, 1058 bp, Homo Sapiens
tgcggccgcctaaagccccagtcaacccagcctgtgtctgagcagacagggcgaacaagcaggccacaccgtctcgagggaggaggccagatgcggccagcgtctccaacagggtgaccatccgctcggcttgctgagcgtttaaacaaatgtttagacaggctgtggggactcccctgagttgagccttggccaggggtccggtgctgtcgcgggaaacctccagccttgttcttcaaaccactcagctcatgtgttttgcactgactagtactgaataatacaaccactcttatttaatgttagtattatttatttgacaactcagtgtctaacagcttgatatgcaggtccttgcatcctacatttctttaggaagttacccatttgtaactttaaaaacaggaaaaatatcagttggcaaatgcaatcttttttctttttaagctaaaggtgggtgaactggaatgaaaatctttctgatgttgtgtctataagcagccttgatgggatatgttagaagtgtcatgaaagtgtgattctacttttgcagaaaaatctaaagatcaatttatatagctttattttttactttatcaaagtatacagaattttaatatgcatatattgtgtctgacttaaaattataatgtctgcgtcaccatttaaaatgtctgttcattatgtaatgtaataaaagaaggtcttcaaaaatgtatttaacatgaatggtatccatagttgtcatcatcataaatactggagtttatttttaaattattaaacatagtaggtgcattaacataaatcagtctccacacagtaacatttaactgataattcattaatcagctttgaaaaattaaattgttaattaaaccaatctaacatttcagtaaagtttattttgtatgcttctgtttttaacttttatttctgtagataaactgactggataatattatattggacttttctctagattatctaagcaggagacctgaatctgcttgcaataaagaataaaagtctgcttcagtttctttataaagaaactc

SEQ ID NO: 70668 - DNA, 2142 bp, Homo Sapiens
  misc_feature (1560)..(1560): n is a, c, g, or t
  misc_feature (1564)..(1694): n is a, c, g, or t
  misc_feature (1720)..(1831): n is a, c, g, or t
aaggagcgaggcctgggtggcgaattcggcacgaggatcaaactgaagcgtgaggaagagaccctggacaccatcaagcagtactatgtcctgtgcagcagcagagacgagaagttccaggccttgtgtaacctctacggggccatcaccattgctcaagccatgatcttctgccatactcgcaaaacagctagttggctggcagcagagctctcaaaagaaggccaccaggtggctctgctgagtggggagatgatggtggaacagaaggctgcagtgattgagcgcttccgagagggcaaagagaaggttttggtgaccaccaacgtgtgtgcccgcggcattgatgttgaacaagtgtctgtcgtcatcaactttgatcttcccgtggacaaggacgggaatcctgacaatgagacctacctgcaccggatcgggcgcacgggccgctttggcaagaggggcctggcagtgaacatggtggacagcaagcacagcatgaacatcctgaacagaatccaggagcattttaataagaagatagaaagattggacacagatgatttggacgagattgagaaaatagccaactgagaagctccaccagccactgatgccagccctggcactgcccctgcacaggagacaagtgcatttagggcacaggccccgacatcaccccaaggacaacggcagaagtagagagaaactacctacctcacttcaaattatgtttggacttgacaaaaataggtgcaaatgatggggggcaatagaagaaaaaatttgcattttgggaaaatggggtcctttccccacttttttaaagccacatttcccccatctttataataatctggtcacagtggtagtcgctggccccaggacccccctcctgattttggctaggcatcgtggaaacaggctccagcccctgaagaaacgatagatgtgcaggttgtgcggaagaggctgagtggaaaatggtgtgagccccaccgctgtgcatcgaatgagggaagtggcagcagagaggccagagctgccccctctctgtctcttcaatggacccttcacaagtgtttctcctgcccttggggctgtcttccttctcctgaaatccagagactttcttgctcatcccttctccctttcacttctgttctctgctgcagaaagcagacttgcatatccctgatgagcagctcggctacttttgtaaacttcagatttggagagaaacacgaaagtctgaatcctgaccccttgagagagagtgatctggcgagggccgatgaaggggctgggcctggtcttgccttctcttctctcggttgctccctctgcctaggcccctggtactcagtcacggcagccaggagaccccaggtgagtttctgagcgcatacgtagttggttcttacccccaggtgtcacacggggccgagagctgagcaagaatttggaatggaagttatgaccaagggaattatgctgttcatttataatagtggacattatggagagctctgattcctacataatatgaataagatggantagnnnnnnnnnnnnnnnnnnnnnnnnnnnnnnnnnnnnnnnnnnnnnnnnnnnnnnnnnnnnnnnnnnnnnnnnnnnnnnnnnnnnnnnnnnnnnnnnnnnnnnnnnnnnnnnnnnnnnnnnnnnnnnnnnnntaatatagccgggcctggtggcgcannnnnnnnnnnnnnnnnnnnnnnnnnnnnnnnnnnnnnnnnnnnnnnnnnnnnnnnnnnnnnnnnnnnnnnnnnnnnnnnnnnnnnnnnnnnnnnnnnnnnnnnnnnnnnnngagaccccgactcaataaataaataaggatggataaattgtagcgtatgcaccattcattatgctaagacattttaaagtaattatgagaaacgctctactaatgatttgtttttatttgtatttttctgcttattagacaaatatatactcattttaaaaaggcgtgtgtgtatataaagtgagagtgctttctatcccttctcttcggggaccctgattcctggcagcttgggtgaatattctaccatatggccttttattggcataaacccatttttcttttacaaaaaccagtacattctgttcaca

SEQ ID NO: 70669 - DNA, 1462 bp, Homo Sapiens
  misc_feature (841)..(852): n is a, c, g, or t
cggccgccaactttcgatctacactggccatggattgggacagtgaaactcggagactttactatgatgagcaagaatctgaggcctacgagaagcatgtgagcatgttgcagcctcagaagaagaagaagaccacagtggccctgagagactgcatcgagctcttcaccaccatggagacccttggggagcatgacccctggtactgtcccaactgtaagaagcatcaacaggccacaaaaaagtttgacctatggtccttgcccaagatcctggtgtccacctcaaacgtttctcctacaacagatactggagggataagctcgacacagtcgtagaattcccaatcagagggctgaacatgtccgagtttgtctgtaacctgtcagcaaggccttatgtgtacgacctcattgccgtgtccaatcattatggagccatgggggttggccactacactgcatatgcgaagaacaaactgaatggtaaatggtattactttgatgatagcaacgtgtccctggcctctgaggatcagatagtgactaaagcagcttatgtgctattttaccaacgtcgagatgatgaattttataagacaccttcacttagcagttctggttcctctgatggagggacacgaccaagcagctctcagcagggctttggggatgatgaggcttgcagcatggacaccaactaatgctgactccacgatcctgccaccctgtagcgccagtgtaatcccccaggagaacatctttgacactctgcagactgctagtgttctgtctaaaaaccagacaaggaaatacccttcttttatgagcagaaggaaacnnnnnnnnnnnngaagaccgtttacctagaagaagctatgtcaagaggctgaattatttttatttttaaacaggtggtgagaaatttctgtgaaacctgtgaagctgaaaagggggtgggatgggggtactcaatggagtatgtctgatggatcccgaagaatggagaggaacacaggcgctgagtatggagcagcctggagacccaccccacctgcagggctgccctgagcgcctggatttctggttctgatgccaatactagtcaccccaagtagtctgctcacagtaacccaaacctcaagtaaactcccctttccctcgctatgtgcactgatatgggtttataattttctgaaagttacccactgaagcccatttctccgttgagtcatcttgtaatttccagctttctccccgctaaggaagatatctagtgttggggatcctggcccctcaacctcctgtggaacccagcagttctgttatatcccctgctaccctagatgaattaagacggttaaatactgtgtggaacttttattagataacacactttttattagataacgcttaaaggaagtcagtacataaaactgcccggtgctgtgtcccgtcaaaaa

SEQ ID NO: 70670 - DNA, 717 bp, Homo Sapiens
cctgaatatgagttcttctgggggcttgcgctcctaccacgagactagcaagatgaaagtcctcaagtttgcatgcagggtgcagaagaaagaccccaaggactgggctgtgcagtaccgcgaggcagtggagatggaagtccaagctgcagctgtggctgtggctgaggctgaagccagggctgagtggttccaacaccagcactggctttactggcgaacccagcaccagcacgggcttcagtagtggacccagttctattgttggcttcagcggtggaccaagcactggtgttggcttctgcagtggaccaagcaccagtggcttcagcggtggaccgagcacaggagctggcttcggcggtggaccaaacactggtgctggctttggtggtggaccgagcaccagtgctggctttggcagtggagccgccagtcttggtgcctgtggcttctcgtatggctagtgaggtttcagatttattccccatgtttacagataccgctaataaattgcagtagtccttcccatggagccaaagtacatccttggaatctttgtccacacagcagtcaaggcagttatggccaatcagctgagggtgtcatgtgatggaaaaatctgtttgctgttcctgctttattgtttgctttctgtgtgctgtcatattttggtatcagagttacattaaatttgcaaaatgaattggaaaaaaa

SEQ ID NO: 70671 - DNA, 692 bp, Homo Sapiens
aagtaacacagctttcacaagagcttgacagagccaattcgctattaaaccagactcaacagccttacaggtatctcattgaatcagtgcgtcagagagattctaagattgattcactgacggaatctattgcacaacttgagaaagatgtcagcaacttaaataaagaaaagtcagctttactacagacgaagaatcaaatggcattagatttagaacaacttctaaatcatcgtgaggaattggcagcaatgaaacagattctcgttaagatgcatagtaaacattctgagaacagcttacttctcactaaaacagaaccaaaacatgtgacagaaaatcagaaatcaaagactttgaatgtgcctaaagagcatgaagacaatatatttacacctaaaccaacactctttactaaaaaagaagcacctgagtggtctaagaaacaaaagatgaagacctagtgttttggatgggaagcacctgtagaccattatatactcctgaagttctttttctgatggaaaacaaaattcagcttaatcgtgtactcagcattttttaaataacaatgtttatttgaactaatattaaattaacaaattcagtgtaatcaaaatgtgtaaagaacaatcaatatactttaattttttttctattttataaaataaatatatacgctatgctttaaa

SEQ ID NO: 70672 - DNA, 1066 bp, Homo Sapiens
  misc_feature (53)..(53): n is a, c, g, or t
  misc_feature (62)..(62): n is a, c, g, or t
  misc_feature (74)..(74): n is a, c, g, or t
  misc_feature (623)..(623): n is a, c, g, or t
  misc_feature (951)..(985): n is a, c, g, or t
tgccccctatcgaaagcatccatcccgaaaccctgcgggtaagggttggcccnacacccaangcctgaggcccnagtcaaatgcccatatttgtgggcggcagcctcagacactgcatgagcgacccattgaggatttgatcggtaaccaggatgcataccaaccaggcaccgtggacaatcacggcaccagttgctgttgcctggaatcgtggccagcgtcatagctggtaaagggcgctcccactgtggaggctcagggaatcccctgcagtgccctctgagaacttgcccaagtgccagctggtagtggtcttacctcaccgattagcggaaggtcgcatagtggcgaaagtacggttaccattaaaggtcttccagctgctacccgcagctcccagttaccctggagagtaagctggtgcaatgtctcagtccccagccagattcagactcttggttcccgatacctgctctgtaggaggaccaagagcggaagaaatccacagaaccatcctggcgcctctgaaacaccagccagccgcccccctcggtgtccatgtcacaaaagactgggagggccctgccctcaggtaggcacagatggtaccagccgctcaagtnggcgccctggctcaacagctcccggcagtttctggggcctggctcacccttggggcccatcttgcctggtggtccaggtggcccttgaggacctggggctcccttctccccaggacttcctggagctccgggacaactgggcaggaggacaactttgctggcttccagttcctgggtcctgggcagctggggtgttcctgggtcttcaggcaggcaggccccccaagcaggagaagccacagggagggcaggatccacagtagatccatcttgctgccccggccgtaatggccgaattcccgggcatatgtccggtaccgtcgactgnnnnnnnnnnnnnnnnnnnnnnnnnnnnnnnnnnncggccgcttcctcgctcagctgactctgctgcgctcgtcgttcggctacaacgagctagcgccctatagtgatctatcgag

SEQ ID NO: 70673 - DNA, 1175 bp, Homo Sapiens
  misc_feature (78)..(112): n is a, c, g, or t
aactgtatagactatatagggcctagcgttgagcagcgaacgacgagcgcagcgagttagtgagcgaggaagcggcgnnnnnnnnnnnnnnnnnnnnnnnnnnnnnnnnnnncagtcgacggtaccggacatatgcccgggaattcggccattacggccggggaatctggcatccttcccctggtgggcccagcaagatggatctactgtggatcctgccctccctgtggcttctcctgcttggggggcctgcctgcctgaagacccagtgaacaccccagctgcccaggacccagggaactggaagccagcaaagttgtcctcctgcccagttgtcccggagctccaggaagtcctggggagaagggagccccaggtcctcaatgggccacctggaccaccaggcaagatgggccccaagggtgagccaggagatccagtgaacctgctccggtgccaggaaggccccagaaactgccgggagctgttgagccagggcgccaccttgagcggctggtaccatctgtgcctacctgagggcagggccctcccagtcttttgtgacatggacaccgaggggggcggctggctggtgtttcagaggcgccaggatggttctgtggatttcttccgctcttggtcctcctacagagcaggttttgggaaccaagagtctgaattctggctgggaaatgagaatttgcaccagcttactctccagggtaactgggagctgcgggtagagctggaagactttaatggtaaccgtactttcgcccactatgcgaccttccgcctcctcggtgaggtagaccactaccagctggcactgggcaagttctcagaagggcactgcaggggattccctgagcctccacagtgggaggccctttaccacctatgacgctgaccacgaattcaaggcaacagcaactgtgcaggtgattgtccacgggtgcctggtggtatgcattcctgttaccgattcaatctcaatgggtcgctatgcagtgtcgtgaaggttgccgccacagatatcgccttgactgggcctcaagccgtggtgtgggcaaccctacgcaaggtacgaataagcctcgaattaggcactctgcagcaagtcctaattcctccagttacggtccggagacgaagccacttgcgttgccacacct

SEQ ID NO: 70674 - DNA, 1161 bp, Homo Sapiens
  misc_feature (44)..(78): n is a, c, g, or t
cgaacgacgagcgcaggcgagtagtgagcgaggaagcggcccgnnnnnnnnnnnnnnnnnnnnnnnnnnnnnnnnnnncagtcgacggtaccggacatatgcccgggaattcggccattacggccggggcagcaagatggatctactgtggatcctgccctccctgtggcttctcctgcttggggggcctgcctgcctgaagacccaggaacaccccagctgcccaggacccaggaactggaagccagcaaagttgtcctcctgcccagttgtcccggagctccaggaagtcctggggagaagggagccccaggtcctcaagggccacctggaccaccaggcaagatgggccccaagggtgagccaggagatccagtgaacctgctccggtgccaggaaggccccagaaactgccgggagctgttgagccagggcgccaccttgagcggctggtaccatctgtgcctacctgagggcagggccctcccagtcttttgtgacatggacaccgaggggggcggctggctggtgtttcagaggcgccaggatggttctgtggatttcttccgctcttggtcctcctacagagcaggttttgggaaccaagagtctgaattctggctgggaaatgagaatttgcaccagcttactctccagggtaactgggagctgcgggtagagctggaagactttaatggtaaccgtactttcgcccactatgcgaccttccgcctcctcggtgaggtagaccactaccagctggcactgggcaagttctcagagggcactgcaggggattccctgagcctccacagtgggaggccctttaccacctatgacgctgaccacgattcaagcaacagcaactgtgcagtgattgtccacggtgcctggtggtatgcatcctgttaccgatcaaatctcaatggtcgctatgcagtgtctgaggctgccgcccacaaatatggcattgactgggcctcaggccgtggtgtgggccacccctaccgcagggttcggatgatgcttcgatagggcactctggcagccagtgcccttatctctcctgtacagcttccggatcgtcagccaccttgcctttgccaaccacctctgcttgcctgtccacatttaaaaataaaatcattttagccctttcaa

SEQ ID NO: 70675 - DNA, 1024 bp, Homo Sapiens
  misc_feature (42)..(81): n is a, c, g, or t
  misc_feature (85)..(119): n is a, c, g, or t
cgggagactgatagatcactatagggcgtagcgtgtattagnnnnnnnnnnnnnnnnnnnnnnnnnnnnnnnnnnnnnnnnccgnnnnnnnnnnnnnnnnnnnnnnnnnnnnnnnnnnncagtcgacggtaccggacatatgcccgggaattcggccattacggccggggagcaagatggatctactgtggatcctgccctccctgtggcttctcctgcttggggggcctgcctgcctgaagacccaggaacaccccagctgcccaggaccaggaactggaagccagcaaagttgtcctcctgcccagttgtcccggagctccaggaagtcctggggagaagggagccccaggtcctcaagggccacctggaccaccaggcaagatgggccccaagggtgagccaggccccagaaactgccgggagctgttgagccaggcgccacttgagcggctggtaccatctgtgcctacctgagggcagggccctcccagtcttttgtgacatggacaccgaggggggcggctggctggtgtatcagaggcgccaggatggttctgtggatttcttccgctcttggtcctcctacagagccacggtctcagggaaccaagagtctgcaattctggctgggaacatgagaatatgcaccagcttactcctccagggctaactgggcagctgcgggtacgagctggaagacttcaactggtcaccggacctttcgaccactatgcgaaccttccgactcctcggtgagggtaagaccaataccagctggcactgggcaagttctcagagggcccctgaaggggactccctgagcctcacaacagtggagaaggccccttataccagctatgaacggctgaaccaccgaagtgcaaagcaaacaggaactggcggcacgcgcatcggtcccacggggcactgagaggcaatgccatccggtcaaccggatacaacatcgccaagggtccgcaaatgcccgacgtctggaggctcgccgccacaaatacatggc

SEQ ID NO: 70676 - DNA, 544 bp, Homo Sapiens
  misc_feature (371)..(387): n is a, c, g, or t
  misc_feature (500)..(500): n is a, c, g, or t
gtaaaagccacgctaataattacccctgcacaatgtaacagtcacaaaacagccagccatggcctgctggaagccaggggacaattcttcatacacaggcttgcgggggagagtatgcaacacagagcaactggagtaaccctcagtcccaggacacaggatggcaggacaagcactgagcaggctcccagaggtgtcttctcctgggaaaagggctgccgagtgaccatggcggaggcaagtgctggatgtggggacaggccatgtccccaaagcccctagagggtgttctctgaagaaccccagggccagatcctccaaaatgtcttgagctggttctcccttctgcctgcccccactctgaggtcccnnnnnnnnnnnnnnnnncccgtcgtcaatgactcctgacaagggtggcacagacgcacctcacctgccaaggaccaccctggaaaagtctgtggccacagctccttgaccacttgtcaccccttcctcanatggcagggtgggaggcatgggactcaagctaccaacggaagcg

SEQ ID NO: 70677 - DNA, 738 bp, Homo Sapiens
tcacagaaactaggcacaaatttaaaaaaacattctagtctctaaaacccattactaatgattaacattaaaatattggaactcttagaaaggggcattactaagacgactttaacttgttatgaaatctttgttgtgtgatgcaggtacagtgcgcccattccaactggaatagcagtttgattttaattgtaaaactaaacttcgggaatatgtatgcccaaagtaagtaggatgagaatagtatacatgggatatggtccaatgaatttaagccccaagatacagctaaatacatttatgatttcataaaatctagtttagatagcattgtgatgcaatttccagaaatccatttgtgtttagagtaaataccatgtttagaagatgttttgtggtttggatttatatatttgtaaggtttttttaaaaaaatgttcgttttgtttgaaatgtaacattgagtaaattggtgagttatataatgagatttctagaaagctctggacatgggtacgatgtgttttgcttctctgtataatgtctacagtgataaacttgtgtctccgtgtattgtggcagtctttttttctagttaatttggctttagagagcaatctttgtatgacaccagaaaactcttcatgctattgaatgataaaaagataatgctttaatattttattcactgtgatactattttgtttgtctattaaattgttattatttcaaagttta

SEQ ID NO: 70678 - DNA, 674 bp, Homo Sapiens
  misc_feature (43)..(43): n is a, c, g, or t
actatgtgaataactgaagtaacactagactgaatctcctttntggagtatgtatcttctctcacttgtcaaagtacaggcacactgttcaaccgcatggtatctttctgttgtgtgacttctacaaatgtaattttaaatgaaattaagttaacatggattcattacgttcctggccctgtagacacgtgtaagattatttaaaattctttcatttttttctgcctcttactatacgactgtagtgcaacaaatattttaaagcccccttttcttctttattttcattagttgtacattgatttcagtgtcaacacatttaaagattcattcatgttgcacagtggcttacatgaacgtgaaactgtgatataaggttttctttcatactcataattagcccaaaacagttgccaaactttgccattgtgctcctgcatttgtgtttgagctgctatatatttgtggaaattacactgaaagttgactaagagactattgaaaaagcatgaataattaaatatacatgtgagagacatctcatctgctgtattttacttagtgaatattgttcactcttccgtgtctgatgtcttgctgaatgctgtgactcatagtttacttttgttcaaaatagtttgcactttttgttaataaaatcaacttgagaaaat

SEQ ID NO: 70679 - DNA, 1268 bp, Homo Sapiens
  misc_feature (79)..(113): n is a, c, g, or t
ttgatagatcactatagggcgctagctcgtcgtagccgaacgacgagcgcagcgagtcaggtgagcgaggaagcggcgnnnnnnnnnnnnnnnnnnnnnnnnnnnnnnnnnnncagtcgacggtaccggacatatgcccgggaattcggccattacggccggggagatcggcttccggttccggtgggctctgaaccctgaaaggctcgcgatgcctctacacaagtatcccgtgtggctctggaagcggctgcagctgcgggagggcatctgttcccgcctgcccggccactacctgcgctccctggaggaggagcggacgcccactcccgtgcactataggcctcatggggccaagttcaagatcaaccccaagaacgggcagcgggagcgtgtggaggacgtgcccattcccatctactttccccccgaatcccagcgggggttgtggggcggcgagggctggatcctgggccaaatatatgccaacaacgacaagctctccaagaggctgaagaaagtgtggaagccacagctgtttgagcgagagttctacagtgagatcctggacaagaagttcacagtgactgtgaccatgcggaccctggacctcatcgatgaggcttatgggctcgacttttacatcctcaagaccccgaaggaggacctgtgctccaagtttgggatggacctgaagcgagggatgctgctgcggcttgcccggcaggacccccagctgcaccccgaggaccccgagcggcgggcagccatctacgacaagtacaaggaatttgccatcccagaggaggaggcagagtgggtgggcctcacgctggaggaggccattgagaagcagagacttttggaggagaaggaccctgtacccctgttcaagatctatgtggcggagctgatccagcagctgcagcagcaggcactgtcagagccggcggtggtgcagaagagagccagtggccagtgaccacacagctcctccatgcctgaccaacaggcccagctttccctgccaggccctttgcactgaggacacagatcccggggagctgtgagggccaccggtgggcagtgggtggatcctggtttcgtgtgctgcccatgcaccttccagcccggggccagcttggcagggatccccaggaggcctgggccgcccagaggctcctctcaggctgggccccgacgtttgcggcagtgttccttgtgcccgtggggccgggagcgagtaaagtctgggccaggcaaaaaaa

SEQ ID NO: 70680 - DNA, 918 bp, Homo Sapiens
  misc_feature (869)..(869): n is a, c, g, or t
catagcagtacaggcctggtgttaaatcggcacgaggggtgggctctgaaccctgaaaggctcgcgatgcctctacacaagtatcccgtgtggctctggaagcggctgcagctgcgggagggcatctgttcccgcctgcccggccactacctgcgctccctggaggaggagcggacgcccactcccgtgcactataggcctcatggggccaagttcaagatcaaccccaagaacgggcagcgggagcgtgtggaggacgtgcccattcccatctactttccccccgaatcccagcgggggttgtggggcggcgagggctggatcctgggccaaatatatgccaacaacgacaagctctccaagaggctgaagaaagtgtggaagccacagctgtttgagcgagagttctacagtgagatcctggacaagaagttcacagtgactgtgaccatgcggaccctggacctcatcgatgaggcttatgggctcgacttttacatcctcaagaccccgaaggaggacctgtgctccaagtttgggatggacctgaagcgagggatgctgctgcggcttgcccggcaggacccccagctgcaccccgaggaccccgagcggcgggcagccatctacgacaagtacaaggaatttgccatcccagaggaggaggcagagtgggtgggcctcacgctggaggaggccattgagaagcagagacttttggaggagaaggaccctgtacccctgttcaagatctatgtggcggagctgatccagcagctgcagcagcaggcactgtcagaagccggcggtggtgcagaagagagccagtggccagtgaccacacagctcctccatgcctgaccaacagnccccagctttccctgcccgggccctttgcactggaggacaccagatccc

SEQ ID NO: 70681 - DNA, 589 bp, Homo Sapiens
  misc_feature (490)..(490): n is a, c, g, or t
  misc_feature (545)..(545): n is a, c, g, or t
gtgtgagccactgcactggacttgcaaaggactttaggtccattgtccttttattcttagatacctccttcactgagaccttttccttacctcacctctctaggtggaacggcacatgtgtgatggggacattgttatcttcaaccggcagccaactctgcacaaaatgtccatgatggggcatcgggtccgcattctcccatggtctacctttcgcttgaatcttagtgtgacaactccgtacaatgcagactttgacggggatgagatgaacttgcacctgccacagtctctggagacgcgagcagagatccaggagctggccatggttcctcgcatgattgtcaccccccagagcaatcggcctgtcatgggtattgtgcaggacacactcacagcagtgcgcaaattcaccaagagagacgtcttcctggagcggggtgaagtgatgaacctcctgatgttcctgtcgacgtgggatgggaaggtncacagccggccatcctaaagccccggcccctgtggacaggcaagcaatcttctcnctcatcatacctggtcacatcaattgtatccgtaccacagcacc

SEQ ID NO: 70682 - DNA, 905 bp, Homo Sapiens
aaatgtaccaggaagctctatagctcatccaatcctttagcccaggcatacaaaacaatatatccttattgcagcagtgccttgtcattactgctatggaaggcaagttgagccaggctgttactgtcttattttggcgacagtaagcaacagtataaacggcaaaaatagtaccttatattccatttctgagcacattaatttgtctttacaaattgtacgaacctttcagccagcatggtgtttgccaagattatgtataattatgtataatttaactttcaagacttgacttggaagttactttgaaacaaacagtctaggaaaatgaaaaactaaaccactcagcacctatggacatactaaagatggtgactatggtgatgccaaacttcacagaaacaaattctaaaatgaggacagtctgtacttcctgctgattatataaaatcactgccaagaaaaacacactacccgtactttcaatctttcaatgttacaacctgttactattcaaatgctttagtcactgctcaattcttgccttatctagtaatgtaaatctacgtaggctctgtctgctttaaaacagctaacacatgtaagtctgaagaaaccaatgggtacgaaagcacaagtgagcaaaattaaagagcagaattgtactgagtggctttatatgttcatctagtaccagaggctccacttttttttcctttgccaacaggccaccaagctacccctgaaaactaccatatgcctcaaatagtagttataaatgcttataagtacactagactgtaagaactccactaaattgttataggctggtatcttttgagatgacacccaaaattaaaatttggagcattaaaaataaaactaaattttactttacaaacaag

SEQ ID NO: 70683 - DNA, 1494 bp, Homo Sapiens
  misc_feature (1042)..(1059): n is a, c, g, or t
  misc_feature (1068)..(1106): n is a, c, g, or t
  misc_feature (1153)..(1225): n is a, c, g, or t
  misc_feature (1279)..(1346): n is a, c, g, or t
ttttctgtcactggacgccaaggagttttcggtggctcagctgggtaaccggggatcaccatggcggcctcattggtggggaagaagatcgtgtttgtaacggggaacgccaagaagctggaggaggtcgttcagattctaggagataagtttccatgcactttggtggcacagaaaattgacctgccggagtaccaaggggagccggatgagatttccatacagaaatgtcaggaggcagttcgccaggtacaggggcccgtgctggttgaggacacttgtctgtgcttcaatgcccttggagggctccccggcccctacataaagtggtttctggagaagttaaagcctgaaggtctccaccagctcctggccgggttcgaggacaagtcagcctatgcgctctgcacgtttgcactcagcaccggggacccaagccagcccgtgcgcctgttcaggggccggacctcgggccggatcgtggcacccagaggctgccaggactttggctgggacccctgctttcagcctgatggatatgagcagacgtacgcagagatgcctaaggcggagaagaacgctgtctcccatcgcttccgggccctgctggagctgcaggagtactttggcagtttggcagcttgacttctgcagctggaggaggcccctcaggccggggatctggggagggctagcccaaaacctcccgcatcgggcaggcaccccctgaagtacttccttcagggtttcccctttgtgagggtgtcgagtagcctcaccggcctgtctggaggagcagctggctctgctctgagaaactctggcaagtggacgccattctcttgcccttaggattcactgctctctcctacagccgccaggcctggggtcctgaaaggaccttgggtggtaaagctgtacttggtgggagtgagggcgtggggaggaaccatgcaaatcgccttccatggtttttaaatgcagtaaataacatttctggatgagacttgtttccaaaataaaccagctatatctgttttgnnnnnnnnnnnnnnnnnnctcgaggcnnnnnnnnnnnnnnnnnnnnnnnnnnnnnnnnnnnnnnncatggtcatagctgtttcctgacccagctttcttgtacaaagtggtnnnnnnnnnnnnnnnnnnnnnnnnnnnnnnnnnnnnnnnnnnnnnnnnnnnnnnnnnnnnnnnnnnnnnnnnntgcagtacccgggaatttaacccgcctaatgagcgggcttttttttgtggatcnnnnnnnnnnnnnnnnnnnnnnnnnnnnnnnnnnnnnnnnnnnnnnnnnnnnnnnnnnnnnnnnnnnntcccaggggggggtttgtttgcccggatccaagagctacccacctctttttttccaaggggaactgggtttccgccgaagcgccaaaataccaaaaaactgggtcttttctaaggggaacccccgaatttagggccccacccccttta

SEQ ID NO: 70684 - DNA, 1500 bp, Homo Sapiens
tgcgctaggtagcgagtgctgggtggtgaattcggcacgagggtggcgccgctctagccagcgcctgggctctgtggcgggcgccgcagctccgcgtcccccgcgcctcctcccagcgcagacttcaagggctaccactggacccttcccctgtcttgaaccctgagccggcaccatgcacggacgcctgaaggtgaagacgtcagaagagcaggcggaggccaaaaggctagagcgagagcagaagctgaagctataccagtcagccacccaggccgtattccagaagcgccaggctggtgagctggatgagtccgtgctggaactgacaagccagattctgggagccaaccctgattttgccaccctctggaactgccgacgagaggtgctccagcagctggagactcagaagtctcctgaagagttggctgctctggtgaaggcagaactgggcttcctggagagctgcctgcgggtgaaccccaagtcttatggtacctggcaccaccgatgctggctgctaggccgcctgcctgagcccaactggacccgagagctggagctctgtgcccgtttcctggaggtggatgagcggaactttcactgctgggactatcggcggtttgtggccacacaggcagccgtgccccctgcagaagagctagccttcactgacagcctcatcacccgaaacttctccaactactcttcctggcattaccgctcctgtctcttgccccagctgcacccccagccggattctggaccacaggggcgcctccctgaggatgtgctgctcaaagagctggagctggtgcagaatgccttcttcactgaccccaatgaccagagtgcctggttttatcaccgttggctcctaggccgagctgacccccaggatgcactgcgctgcctgcatgtgagccgggacgaggcctgtctgactgtctccttctctcggcccctcttagtgggctccagggatggaaatcttgctgctcatggttgatgattctcccctgattggtggagtggaaggaccccaaatggcagggaaccggcccagccatgtctgggctctgtgacctgcctgctgcctccctcaacgaccagttgccccaacatacatttcgcgtcatttggacagcaggcgatgtccagaaagaatgcgtgcttttaaaaggccgccaggagggctggtgccgggactccacgacagacgagcagctattcaggtgtggactgtcagtggagaagtccacagtgctggcgtctgagctggaatcctgtaaagagctgcaggaactggagcctgagaataaatggtgcccggcttaccatcatcctgctgatgcgggcactggaccccccggttggatgaaaaaggagaccctggcacaacttccagaacccctcaggggccgggaaccccatgcggggcaccgtatcttggaggacccggcgcccccaagttccttgctggaaaaatagcctgcc

SEQ ID NO: 70685 - DNA, 1248 bp, Homo Sapiens
cagaatgccttcttcactgaccccaatgaccagagtgcctggttttatcaccgttggctcctaggccgagctgacccccaggatgcactgcgctgcctgcatgtgagccgggacgaggcctgtctgactgtctccttctctcggcccctcttagtgggctccaggatggagatcttgctgctcatggttgatgattctcccctgattgtggagtggaggaccccagatggcaggaaccggcccagccatgtctgggtatcccaggattggtggggcagaagttggggtctggggcagggctgggtgggacagtcaaaaaaagtggttaggctggggcatttccttgacccagtactcccagctctgtgacctgcctgctgcctccctcaacgaccagttgccccaacatacatttcgcgtcatttggacagcaggcgatgtccagaaagaatgcgtgcttttaaaaggccgccaggagggctggtgccgggactccacgacagacgagcagctattcaggtgtgagctgtcagtggagaagtccacagtgctgcagtctgagctggaatcctgtaaggagctgcaggagctggagcctgagaataaatggtgcctgcttaccatcatcctgctgatgcgggcactggaccccctgctgtatgagaaggagaccctgcagtacttccagaccctcaaggccgtggaccccatgcgggcagcgtatctggatgacctgcgcagcaagttcttgctggagaatagcgtgctcaagatggagtatgccgaggtgcgtgtgctgcacctggctcacaaggatctgacagtgctctgccatctggaacagctgctcttggtcacccatcttgacttgtcacacaatcgtctccgaaccctgccacctgcactggctgccctgcgctgccttgaggtgctgcaggccagtgataatgccatagagtccctggacggcgtcaccaacctaccccggctgcaggagctgctactgtgcaacaaccgcctccagcagcctgcagtgctccagcctcttgcctcctgccccaggctggtcctcctcaacctgcagggtaacccgctgtgccaagcggtgggcatcttggagcaactggctgaactgctgccttcagttagcagcgtcctcacctaagaggccctgccccctacccttgccctttaacttattgggactgaataaagaatggagaggccctctcaggctaccaaaaaaaa

SEQ ID NO: 70686 - DNA, 1680 bp, Homo Sapiens
tgaggagtcaacagcagaggatgaggatgcaacacatcttgaagataacgaatgtgatatcaaattggcaggagatagtttcatagtaagttctgaattccctgtaagactgagtgtatacttagaagaagaggatattactgaagaagctgctttgtctaaaaagagagctacaaaagccaaaaatactggacagagaggcctgaaaatgtgacaggatcatgaatgtcaaaggcttttatcttgagaacatggtgtctggagttaaaggtattggcatactccacacatctgtaccattcttgagtgatcgcttaggaatgaatgtgatttgaactcattcatgttgagagggtgtcaaattgagaaccaggtagatccccaccacctacagtaaaaaggaccctaaagtaaattggttgaagaaattagatcccaaagattcttggtgaattttgaagtcttcatcagtatatccatattaaaacgagatgacagaagccaaagtaattatgggctgacaggacaactggatcagtttcattaaaaagggcaaacttgaagataaatcttttgactccagctctttagaggatctaaagtgaccttgatggacagtggaagaaatcacaacatggaattcctcgaataacaatttattgactttaaataattttgtctaatgctacatatacacaattaaaaaacctttacactatttctagaaagtcagcatgtatttttggctcgaagtttctctagtgttttctgtggaaggaataaaaatttgagtttcagttgtgtacttcatgcttgaaaaattaagtccttccccctcagttatactcaccttatggaattcttttgcccttgctctgttttgggcataagcttcttgttttgttttttcttccttttgttgtttcacttcagctagttgattgtataaccttagacccctttggtgccttagagcctgtgtagtctttctgtcttcaggaaaagatgctctgactttattcacgccctttagacgactcacagatgaacttatagatggtttctctttaactgttttgatttgagaattttcagagacatgaattttattccttatttctttctgcctctggtgggatctctccataaatgattttttcctctttataaatgcttcttgtaagctccctggtacaggtgtaagcctgcgaggggtttctgctgtagatgctgtccttggtttttctatggaaagttctgatacagctggataatctgaggcttctgttgctgatacaagaggcagaaacacactcacctgaaagaagcattttgcttcattctcgctcttctcttctagggttaaatttgccaaaatccatttcagcaatactggtatcagtggtgcttattaaagtaagttctggttcttccattataccatggccagtttctgtttcccagactggtatagagctctgtaatgaaaatgatccagaacttgcaaaaagctctgattctcctagttgagatagttttttggtgatttttggaatgtctgtttcagctgaattctcaaaatatttttcattttgagtagttaaggaatatggtgcctgaattgaagttccccggccgtaatggccgaattcccgggcatatgtccggtaccgtcgactg

SEQ ID NO: 70687 - DNA, 737 bp, Homo Sapiens
  misc_feature (37)..(37): n is a, c, g, or t
  misc_feature (60)..(68): n is a, c, g, or t
tcaagtgattcagcaagaatcacacgattttaaaagnacatggcagatcctgtgtctttnnnnnnnnntcaaaaccttgtaaatagtggttgaggtctatcccgatggggcttttcctgtagcctgcacatcgttggaaacgcctcatagagtaactctgtggttttactttactcacaggactattgttagatctgtgggaaggaattacaagacagttgctaaaagtttgaaaaagacggttgctaaacgttatgaaaaaccagataatctacttttttaccttaggtattggcatactccacacatctgtaccattcttgagtgatcgcttaggaatgaatgtgatttgaactcattcatgttgagagggtgtcaaattgagaaccaggtagatccccaccacctacagtaaaaaggaccctaaagtaaattggttgaagaaattagatcccaaagattcttggtgaattttgaagtcttcatcagtatatccatattaaaacgagatgacagaagccaaagtaattatgggctgacaggacaactggatcagtttcattaaaaagggcaaacttgaagataaatcttttgactccagctctttagaggatctaaagtgaccttgatggacagtggaagaaatcacaacatggaattcctcgaataacaatttattgactttaaataattttgtctaatgctacatatacacaattaaaaaacctttacacgaa

SEQ ID NO: 70688 - DNA, 694 bp, Homo Sapiens
  misc_feature (90)..(138): n is a, c, g, or t
aaaatgtaaaaactagctgggtagtggggcgtgtgcctgtagttgcagctactcaggaaggcgaggctgaggcaaaaggattgagcccannnnnnnnnnnnnnnnnnnnnnnnnnnnnnnnnnnnnnnnnnnnnnnnntcgtaacaaagaccttgtctcctaaaaaaaagattgattctaggactgtagaatagatagttaaacagcatgggatatgagggaaatcctcagcagtattaattttgcattccaatttcatgttgatgagacatacgatggctttttgttttaaaagcttttatcttgagaacatgatgtctggagttaaaggtattggcatattccacacatctgtactattcttgagtgagatggcttaaggtgtcaaattgataacctggcagatccccacgaccgacagtataaaggaccctaaagtaaattggttgaagaaattagatcccaaagattcttggtgaattttgaagtcttcatcagtatatccacattaaaaggagacgacaggaagccaaagtaattatgggctgacaggacaactggatcagtttcattaaaaaggctaacttgaagataaatcttttgactccagctctttagaggatctaaagtgaccttgatggacagtggaagaaatcacaacatggaattccttgaataaaaatttattgacttt

SEQ ID NO: 70689 - DNA, 563 bp, Homo Sapiens
  misc_feature (42)..(42): n is a, c, g, or t
  misc_feature (45)..(45): n is a, c, g, or t
  misc_feature (86)..(86): n is a, c, g, or t
  misc_feature (137)..(137): n is a, c, g, or t
cagtacgtagatgagatgcccagcgtcctgacgtcacagagnccntctgtcctcctcactttgcgtggcgtcaacacgacaagcgncagggtctgcagggaggcctcctttgacggcatcagcaagttcgaagtcancaataccattcttcacccagagatcgttgagtgctgggagctctgactcgcctcgtcttagagcttgggaccaaggaggtatcctgaaagatgaatgggcatcggctgtggaaaaagaaggagtaggagagagtgaccctggcaaaaggaccactcgttcacagaaacaagagaaagggtggtggctctgtgtggccagtgcggagccagggagcagagcccgagaacagttggagagacaggcagtggctggccgagtgtttaagacggatatggagctggaggttctgcgctataccaataaaatctccagcgaggcccaccgtgaggtaatgaaggctgtaaaagtgggaatgaaagaatatgagttggaaaggtaagccaccatgtttctccgggtaaaattaaaaggtaaaaaacagtaaa

SEQ ID NO: 70690 - DNA, 1735 bp, Homo Sapiens
  misc_feature (1512)..(1662): n is a, c, g, or t
  misc_feature (1665)..(1665): n is a, c, g, or t
  misc_feature (1677)..(1690): n is a, c, g, or t
gtttcactgaggcaggagctctggctggtgccccctaccctgcatgccgtgggccttgacatggggccccagcctttgcctccagctgctcccagccgcttccctgtggacagtcttgtctgcattcctggggtccaggttcgaagtcaacaataccattcttcacccagagatcgttgagtgccgagtgtttaagacggatatggagctggaggttctgcgctataccaataaaatctccagcgaggcccaccgtgaggtaatgaaggctgtaaaagtgggaatgaaagaatatgagttggaaagcctcttcgagcactactgctactcccggggcggcatgcgccacagctcctacacctgcatctgcggcagtggtgagaactcagccgtgctacactacggacacgccggagctcccaacgaccgaacgatccagaatggggatatgtgcctgttcgacatgggcggtgagtattactgcttcgcttccgacatcacctgctcctttcccgccaacggcaagttcactgcagaccagaaggccgtctatgaggcagtgctgcggagctcccgtgccgtcatgggtgccatgaagccaggtgtctggtggcctgacatgcaccgctggctgaccgcatccacctggaggagctggcccacatgggcatcctgagcggcagcgtggacgccatggtccaggctcacctgggggccgtgcttatgcctcacgggcttggccacttcctgggcattgacgtgcatgacgtgggaggctacccagaggacgtggagcgcatcgacgagcccggcctgcggagcctgcgcactgcacggcacctgcagccaggcatggtgctcaccgtggagccgggcatctacttcatcgaccacctcctggatgaggccctggcggacccggcccgcgcctccttccttaaccgtcgaggtcctgcagcgctttcgcggttttggcggggtccgcatcgaggaggacgtcgtggtgactgacagcggcatagagctgctgacctgcgtgccccgcactgtggaagagattgaagcatgcatggcaggctgtgacaaggcctttacccccttctctggccccaagtagagccagccagaaatcccagcgcacctgggggcctggccttgcaacctcttttcgtgatgggcagcctgctggtcagcactccagtagcgagagacggcacccagaatcagatcccagcttcggcatttgatcagaccaaacagtgctgtttcccggggaggaaacacttttttaattacccttttgcaggctcccacctttaatctgttttataccttgcttattaaatgagcgacttaaaatgattgaaaataatgctgttctttagtagcaactaaaatgtgtcttgctgtcatttatattccttttcccaggaaagaagcatttctgatactttctgtcaaaaatcaatatgcagaatggcatttgcaataaaaggtttcctaaaatggtcnnnnnnnnnnnnnnnnnnnnnnnnnnnnnnnnnnnnnnnnnnnnnnnnnnnnnnnnnnnnnnnnnnnnnnnnnnnnnnnnnnnnnnnnnnnnnnnnnnnnnnnnnnnnnnnnnnnnnnnnnnnnnnnnnnnnnnnnnnnnnnnnnnnnnnnaanaaaatgtggggnnnnnnnnnnnnnnaaaaaattttttaaacaactttttggggggcccggccccccaaag

SEQ ID NO: 70691 - DNA, 1007 bp, Homo Sapiens
  misc_feature (852)..(852): n is a, c, g, or t
  misc_feature (875)..(876): n is a, c, g, or t
  misc_feature (880)..(880): n is a, c, g, or t
  misc_feature (961)..(961): n is a, c, g, or t
cggtccggaattcccgggatcggtgccgggcgaacatggcggcggccaccggaccctcgttttggctggggaatgaaaccctgaaggtgccgctggcgctctttgccttgaaccggcagcgcctgtgtgagcggctgcggaagaaccctgctgtgcaggccggctccatcgtggtcctgcagggcggggaggagactcagcgctactgcaccgacaccggggtcctcttccgccaggagtccttctttcactgggcgttcggtgtcactgagccaggctgctatggtgtcatcgatgttgacactgggaagtcgaccctgtttgtgcccaggcttcctgccagccatgccacctggatgggaaagatccattccaaggagcacttcaaggagaagtatgccgtggacgacgtccagtacgtagatgagattgccagcgtcctgacgtcacagaagccctctgtcctcctcactttgcgtggcgtcaacacggacagcggcagtgtctgcagggaggcctcctttgacggcatcagcaagttcgaagtcaacaataccattcttcacccagagatcgttgagtgccgagtgtttaagacggatatggagctggaggttctgcgctataccaataaaatctccagcgaggcccaccgtgaggtaatgaaggctgtaaaagtgggaatgaaagaatatgagttggaaagcctcttcgagcactactgctactcccggggcggcatgcgccacagctcctacacctgcatctgcggcagtggtgagaactcagccgtgctacactacggacacgccggagctccccacgaccgaacgatccagaaatggggatatngtgcctggtcgaacatgggcggnngagnattactggcttcgcttcccgacatcacctggccccttttccgcccaacgggcaagttcactggcagaacagaaagccgccncctattgaaggcaatgtgcttccggaaacttccctgggcccggcca

SEQ ID NO: 70692 - DNA, 1259 bp, Homo Sapiens
  misc_feature (990)..(1145): n is a, c, g, or t
  misc_feature (1159)..(1194): n is a, c, g, or t
tatggacctatgaacagtcgttacaaaaaagcaggctggtaccggtcggaatcccgggatatcgtcgaccacgcgtcggttgatttaaaacttttaacattttgtttggctggattgtactactttacctctactttaccaccaccacccttttcctccctcctttccaaataatatacagaactccaaaatagcttcatttaaggatttttttgtgagttaacaatttccttgaaatcctgtgaaatagatttgcacagacaccttgtgagtgattggtattggaggtgttcaagaaactgttcgaaaaagaacaaaaacacttccctcgttattttctctcattttttgatgagaggaaaatttgaaacattattcttgttgttgttggtaatagcataatgacagtgggaggggtacaaggggataagaaaaatgtcatgatttttttccggtcctgccacatgtaacacttactctgttacctaaattttatagttagatcatatccaatctacttattaaactgtgttctatttaccagtggagtttttctgcagtggttgcgtttcactgtaaggataatggagttcctctcctctgctttcctcagaggatggtcctttaacatagccagaaacaagccctgtggtttgaaggtgagctgtgaggatgggactaattgatatgcaccagtttacaaagacagtcttatcatccgagaatacaccatctttttctctggataattatttcttacatcatgcttgattcctacattttgttgggtctcaacattggctcacgaatgctgttaatatttattctgtattgataaaaagtctgtcttgccactacaagtaaatcccccatttaatattttcttctttagcatagcactgtcattttttgtgaaaatggttatgtttatttattacaatactgagtcatatataaattttcaataaaagcagaaactttcttaccttnnnnnnnnnnnnnnnnnnnnnnnnnnnnnnnnnnnnnnnnnnnnnnnnnnnnnnnnnnnnnnnnnnnnnnnnnnnnnnnnnnnnnnnnnnnnnnnnnnnnnnnnnnnnnnnnnnnnnnnnnnnnnnnnnnnnnnnnnnnnnnnnnnnnnnnnnnnnccccctgtgggggnnnnnnnnnnnnnnnnnnnnnnnnnnnnnnnnnnnncttcttttgggggggcggggcccgcccagaagaaaagaggaaacgggggaacaatgctttgcccc

SEQ ID NO: 70693 - DNA, 705 bp, Homo Sapiens
agaaggtaatatgcaagacacttcgatttgttgcacattattatggagcatcattaatgttacccagtaaatcagaagctctattactaaaaatacgtggagttatcaaccagttggcatttggcattgacaaaagcaaatcaatatgtgtggatcagaataaaccgctgtttatcacagcaggattggattctttcggtcaaataggatctcctcctgttcctgaaaatgacattggaaagcttcatgcccactcacctatggagttgtggaaaaaagtgtatgaaaagctctttccaccaaagagtattaacacgctgaaagatatcaaggaccctgcgagagatcctcagtatgctgaaaatgaagtcgatgagatgagaattcagaaggatctggaactggaacagtacaaaagaagttcttccaagtcttggaaacaaatcgagcttgattcttgaacctatttcaattattgtatatttatttcttcttttccaaatacaaataagattatactgtgaattaactattgtggcaatatgtgaagaaagttaaactgtataatttgttaaaggacaagctggatttcttggactagtgcatctccctgtatatcttgaagctttttaaaaggaaaaattattgtagaaccacgtgtaattttttttaaaataaaagaatcttctactacctacctctaaa

SEQ ID NO: 70694 - DNA, 681 bp, Homo Sapiens
  misc_feature (48)..(48): n is a, c, g, or t
  misc_feature (56)..(56): n is a, c, g, or t
taccaactgggcatattctaatccccccagagtatacagatcagagtntgatgtgnccaatgggtccaatgcccaagtgagaatctcttgatgaagttattggtgtggggttttgctttggtttttaattatagagagcaaaagtattgaaagtattacatttaccctaaaggtgtaagcaagttatggtcaagtgaagatgaagtaccatcctcaaacacgggttccattcttagctcatctcatttaaaggagagaaaagccttgcaggtgaaacatggtgggggtagacaggggttcagccaatttcagtgtttggccccaagaagtgaatttgggtttgaggacctctctctggaaggattttatgaccagatcttcctggagatgatattagaagcttttctcaccaaatatttatttgcctggggtgcaacttctgcttcattctctctttgactccagctgtctttttggactgaagtgcaggttgctcacagcatcctacaaagtaactgtcttcccaaatctcacttacctctgagtttctgctgtattcctgtctttctctctctttttttgaactggaatctattactttggatgatgcatgctggcgttttctaaagttttctgattgattgtgtctttaaaaaataatctgataatattttaaaaaaa

SEQ ID NO: 70695 - DNA, 1528 bp, Homo Sapiens
  misc_feature (862)..(873): n is a, c, g, or t
ccgcaatggcggctgtgagggccctggtggcctcgaggctcgctgcggcatctgcattcacgtccctgtcccccggtcggtcggacgccttcccagcgcgcagcccttcacctctccgtgccgcgccccgcggccaggtcgcgctggatcctggtgcacctgagccgtggaggggctgaagtccagatctttgctcctgacgtccctcagatgcacgtgattgaccacaccaaggggcagccgtccgaaggcgagagcaggaatgttttgaccgagtctgcgaggatcgcccgtggcaaaatcacagacctggccaacctcagtgcagccaaccatgatgctgccatctttccaggaggcttaggagcggctaaaaacctgagcacgtttgccgtggacgggaaagattgcaaggtgaataaacgaagtggagcgtgtcctgaacggagttccaccaggccgggaagcccatcggcttgtgctgcattgcacctgtcctcgcggccaaggtgctcagaggcgtcgaggtgactgtgggccacgagcaggaggaaggtggcaagtggccttatgccgggaccgcagaggccatcaaggccctgggtgccaagcactgcgtgaaggaagtggtcgaagctcacgtggaccagaaaaacaaggtggtcacgaccccagccttcatgtgcgagacggcactccactacatccatgatgggatcggagccatggtgaggaaggtgctggaactcactggaaagtgacgcgcatggacggggcccagctaggcgccaggactgggcctcaccctctggctgaggagctgtcggctgctttccatccagctgggagtctggcaggcccnnnnnnnnnnnnctttgccgaaacctgcaggcgttctctctctaaggaggatgtgctgcagtgcatgggggatgtttcttcctgggtgtggctgggctgctctcacatacagaggccgaggggccaattcgttctctgccacagggacttgcctcactgtgtcccaaaaacaaatcgcagccagcttttccagaaatagaaaattctgccgtctgaggttttatacttcaggttagttagtttttggaaggaagaacatttttaggtttgcaagcctcctgatcaggaaaccagaaataccacatttatggaccatgaaaggttggttcttgactctgaagggacttttgagttaatcagcgtaaggggatttctaaagcaggcaatccctgtagccgcagagaataaacgccttcccaaaatggcaacttcccacagccacatttcagacctgctgagactgctgagtgaggaatggcagtgaggtttcttcaattagtctcagttctcttaattttcaggaagaaagggaaattgcagctcctcagcccccaggattgacctctggggagtgatggtagcgttggtgccaggccgtgggttcaggtgtggcagaagcttgcagatgcgtccgaagggaaataaagtgtgttggcgttagactttg

SEQ ID NO: 70696 - DNA, 1004 bp, Homo Sapiens
ggctaggtacgaggctgggtggttggaattcggcacgaggcgcgtttgtagaggggtgggtgcgcacgctctgtccctgcgtgaccttccgaccccgctgtcctcaccgcaatggcggctgtgagggccctggtggcctcgaggctcgctgcggcatctgcattcacgtccctgtcccccggcggtcggacgccttcccagcgcgcagcccttcacctctccgtgccgcgccccgcggccagggtcgcgctggtgctgtctggatgcggagtctacgatgggaccgagatccacgaggcctcggcgatcctggtgcacctgagccgtggaggggctgaagtccagatctttgctcctgacgtccctcagatgcacgtgattgaccacaccaaggggcagccgtccgaaggcgagagcaggaatgttttgaccgagtctgcgaggatcgcccgtggcaaaatcacagacctggccaacctcagtgcagccaaccatgatgctgccatctttccaggaggctttggagcggctaaaaacctgagcacgtttgccgtggacgggaaagattgcaaggtgaataaagaagtggagcgtgtcctgaaggagttccaccaggccgggaagcccatcggcttgtgctgcattgcacctgtcctcgcggccaaggtgctcagaggcgtcgaggtgactgtgggccacgagcaggaggaaggtggcaagtggccttatgccgggaccgcagaggccatcaaggccctgggtgccaagcactgcgtgaaggaagtggtcgaagctcacgtggaccagaaaaacaaggtggtcacgaccccagccttcattgtgcgagacggcactccactacactccatgatgcggatcggagcctggtgcaggaagggtgctggaactcactggaacggttgacgcgcatggaccggggcccagctaggcgcccggacttgggcctcacctctggttgggagctgtcggtgctttccttccac

SEQ ID NO: 70697 - DNA, 1009 bp, Homo Sapiens
aggcatgtaatatgaaccaagttgtaaaaaaagcaggctggtacggtcggatattcccgggatatcgtcgacccacgcgtcgggcggctgtgagggccctggtggcctcgaggctcgctgcggcatctgcattcacgtccctgtcccccggcggtcggacgccttcccagcgcgcagcccttcacctctccgtgccgcgccccgcggcagggtcgcgctggtgctgtctggatgcggagtctacgatgggaccgagatccacgaggcctcggcgatcctggtgcacctgagccgtggaggggctgaagtccagatctttgctcctgacgtccctcagatgcacgtgattgaccacaccaaggggcagccgtccgaaggcgagagcaggaatgttttgaccgagtctgcgaggatcgcccgtggcaaaatcacagacctggccaacctcagtgcagccaaccatgatgctgccatctttccaggaggctttggagcggtaaaaacctcttgtgctgcattgcacctgtcctcgcggccaaggtgctcagaggcgtcgaggtgactgtgggccacgagcaggaggaaggtggcaagtggccttatgccgggaccgcagaggccatcaaggccctgggtgccaagcactgcgtgaaggaagtggtcgaagctcacgtggaccagaaaaacaaggtggtcacgaccccagccttcatgtgcgagacggcactccactacatccatgatgggatcggagccatggaagaaagggaatgcagctctcagccccagatggactctggggagtgatgtagcgttgtgcaggccggggtcagtgtggcaaagctgcgagcgtccaggaataacgggtctgggtggaaacacacaatcaaacaaacacaaaaaaggggggcgaaatccgggggccatccccctttgaaggcccaggggtaaaagaggggacaagggaaagggcggggccggggagccccacgaaatgccccgcgaaaaa

SEQ ID NO: 70698 - DNA, 687 bp, Homo Sapiens
aacaatcaaataactgtctccaggcctccagactttctgaacttcattgtatctacctgctgtggccacatatatatctcctcaaaacccagatctcatcagtccactcttctgttccctggctggctccctgttgccttcaggataaagtctacatgcctttgtcctggcattgaaaactctgcaaaacaaagctccaacctagctttccatccttctttctcttccccattgggtaccccttactctagtcacaccagtccccaattcactttatccgtctccttttctttctcaagctattctctatacctcaccttttctcccctgcctccattgttgcttattcaaccctagcagtgctttcaggctcagctcaaaccttatcacccatgttaaatgaaagaagccagacacaagaaggggacattctgaatgattccatttatatgaaggttaagaacaggcaaaactattgtggggaaaaaacagaactgtggttgcctttggggagtgaggattgattagaaggggttttgggggtatgaaaatgttcttgatcttcattccagtggtaatttcatgggtgaatacatttgccaaaattcactgaattgtacactaaagatctgcatttctctgtattgtcaatttaatctaaaaataaaaatcttaccacccagaaaa

SEQ ID NO: 70699 - DNA, 1226 bp, Homo Sapiens
  misc_feature (78)..(112): n is a, c, g, or t
taatcatcactatagggcgctagctcgtttgtagcgaacgaccgagcgcagcgaagtagtgagcgaggaagcggccgnnnnnnnnnnnnnnnnnnnnnnnnnnnnnnnnnnncagtcgacggtaccggacatatgcccgggaattcggccattacggccggggcttctcgtcggtgttcccggctgctatagagccgggtgagagagcgagcgcccgtcggcgggtgtcgagggcgggttgcctcgcgctgacccttcccgccctccttctcgtcacacaccaggtccccgcggaagccgcggtgtcggcgccatggcggagctgacggctcttgagagtctcatcgagatgggcttccccaggggacgcgcggagaaggctctggccctcacagggaaccagggcatcgaggctgcgatggactggctgatggagcacgaagacgaccccgatgtggacgagcctttagagactccccttggacatatcctgggacgggagcccacttcctcagagcaaggcggccttgaaggatctggttctgctgccggagaaggcaaacccgctttgagtgaagaggaaagacaggaacaaactaagaggatgttggagctggtggcccagaagcagcgggagcgtgaagaaagagaggaacgggaggcattggaacgggaacggcagcgcaggagacaagggcaagagttgtcagcagcacgacagcggctacaggaagatgagatgcgccgggctgctgaggagaggcggagggaaaaggccgaggagttagcagccagacaaagagttagagaaaagatcgagagggacaaagcagagagagccaagaagccaggagcctcccaccaagcgggagtatgaccagtgtcgcatacaggtcaggctgccagatgggacctcactgacccagacgttccggggcccgggaacagctggcagctgtgaggctctatgtggagctccaccgtggggaggaactaggtgggggccaggaccctgtgcaattgctcagtggcttccccagacgggccttttcagaagctgacatggagcggcctctgcaggagctgggactcgtgccttctgctgttctcattgtggccaagaaatgtcccagctgagggcctttgtcccattgtccctctgtgaccccttcatctttgataaagcactgacatctccttcctaataaatagaccctgagttctgt

SEQ ID NO: 70700 - DNA, 962 bp, Homo Sapiens
tggggacccggacatgcagggtcggcccccaggagttcgcccccgggactccacatggactcacagcgccactgttccggcccggaacgtttggtcagtgagtcccatctgcagccctgacctgtatgcgacagcggctcaaactcccgcttggttggaagcctcctgcctgggagaaagagggaaccaggaccttggctcttggtgccacctgggggtggctgagagcccacactgccacccatacttcttggctctctctgctttgtccctctcgatcttttctctaactctttgtctgggctgctaactcctcggccttttccctccgcctctcctcagcagcccggcgcatctcatcttcctgtagccgctgtcgtgctgctgacaactcttgcccttgtctcctgcgctgccgttcccgttccaatgcctcccgttcctctctttcttcacgctcccgctgcttctgggccaccagctccaacatcctcttagtttgttcctgtctttcctcttcactcaaagcgggtttgccttctccggcagcagaaccagatccttcaaggccgccttgctctgaggaagtgggctcccgtcccaggatatgtccaaggggagtctctaaaggctcgtccacatcggggtcgtcttcgtgctccatcagccagtccatcgcagcctcgatgccctggttccctgtgagggccagagccttctccgcgcgtcccctggggaagcccatctcgatgagactctcaagagccgtcagctccgccatggcgccgacaccgcggcttccgcggggacctggtgtgtgacgagaaggagggcgggaagggtcagcgcgaggcaacccgccctcgacacccgccgacgggcgctcgctctctcacccggctctatagcagccgggcctcgtgccgaattaaacacccaggcctcgtacctagccataagtt

SEQ ID NO: 70701 - DNA, 1893 bp, Homo Sapiens
  misc_feature (1176)..(1286): n is a, c, g, or t
  misc_feature (1387)..(1395): n is a, c, g, or t
  misc_feature (1845)..(1845): n is a, c, g, or t
ggcagtaactataacggtcctaaggtagcgaggcctgggtggcgaattcggcacgaggccggctgctatagagccgggtgagagagcgagcgcccgtcggcgggtgtcgagggcgggttgcctcgcgctgacccttcccgccctccttctcgtcacacaccaggtccccgcggaagccgcggtgtcggcgccatggcggagctgacggctcttgagagtctcatcgagatgggcttccccaggggacgcgcggagaaggctctggccctcacagggaaccagggcatcgaggctgcgatggactggctgatggagcacgaagacgaccccgatgtggacgagcctttagagactccccttggacatatcctgggacgggagcccacttcctcagagcaaggcggccttgaaggatctggttctgctgccggagaaggcaaacccgctttgagtgaagaggaaagacaggaacaaactaagaggatgttggagctggtggcccagaagcagcgggagcgtgaagaaagagaggaacgggaggcattggaacgggaacggcagcgcaggagacaagggcaagagttgtcagcagcacgacagcggctacaggaagatgagatgcgccgggctgctgaggagaggcggagggaaaaggccgaggagttagcagccagacaaagagttagagaaaagatcgagagggacaaagcagagagagccaagaagtatggtggcagtgtgggctctcagccacccccagtggcaccagagccaggtcctgttccctcttctcccagccaggagcctcccaccaagcgggagtatgaccagtgtcgcatacaggtcaggctgccagatgggacctcactgacccagacgttccgggcccgggaacagctggcagctgtgaggctctatgtggagctccaccgtggggaggaactaggtgggggccaggaccctgtgcaattgctcagtggcttccccagacgggccttctcagaagctgacatggagcggcctctgcaggagctgggactcgtgccttctgctgttctcattgtggccaagaaatgtcccagctgagggcctttgtcccattgtccctctgtgaccccttcatctttgataaagcactgacatctccttcctaataaatagaccctgagttctgtnnnnnnnnnnnnnnnnnnnnnnnnnnnnnnnnnnnnnnnnnnnnnnnnnnnnnnnnnnnnnnnnnnnnnnnnnnnnnnnnnnnnnnnnnnnnnnnnnnnnnnnnnnnnnnnttacaacacataccctaccacctactcttttaccacccctccaacaccttcccaaaactaccccttaaaaacatatcctcttaaacctctttttctttctnnnnnnnnntccgccattaaaccaatatatctaccaaatcctctttcgatttgcggccagcgcccgataatgcagacgcaacggcacccaacgcacacagataccgtcccctctataaaaaaacaacataccgcccgatcttacacatagccttcttcgcctccccccccttcaaccccacttatgagcctgcgagtgcaacgcctccgaggatcctccccaacccctcctccacgcaaggagcgcttttcacccatccctttcccgcgaccgcccaccccgccccccgacaatcctccccgtccatacccagtatcccgaacctatccccccctacttgcccccgcccgcccgatccgatgcgcgcggcaggctgtcacatattatatcattccttccaccgccacaagagccaccaccccaccgaacacaagcgaacgccgcccaaaactcgctgcncaacccgccgcgcgcggcatacacacacccccaccgcttctctcattg

SEQ ID NO: 70702 - DNA, 922 bp, Homo Sapiens
ggaccggtccggaattcccgggatctcgtcggtgttcccggctgctatagagccgggtgagagagcgagcgcccgtcggcgggtgtcgagggcgggttgcctcgcgctgacccttcccgccctccttctcgtcacacaccaggtccccgcggaagccgcggtgtcggcgccatggcggagctgacggctcttgagagtctcatcgagatgggcttccccaggggacgcgcgtaagggagttccccaaccccggcctgcgggtgtggggggtcgcggacctgtctcggcctttgccccagcctgaccgtcaccatggctcgtgggcgctattcatggtgtttctgcccccagggagaaggctctggccctcacagggaaccagggcatcgaggctgcgatggactggctgatggagcacgaagacgaccccgatgtggacgagcctttagagactccccttggacatatcctgggacgggagcccacttcctcagagcaaggcggccttgaaggatctggttctgctgccggagaaggcaaacccgctttgagtgaagaggaaagacaggaacaaactaagaggatgttggagctggtggcccagaagcagcgggagcgtgaagaaagagaggaacgggaggcattggaacgggaacggcagcgcaggagacaagggcaagagttgtcagcagcacgacagcggctacaggaagatgagatgcgccgggctgctgaggagaggcggagggaaaaggccgaggagttagcagccagacaaagagttagagaaaagatcgagagggacaaagcagagagagccaagaaagtaggtgactgagaagaccccacgggtaatgggatggggcaggttagtaaaatcttttcccagcttcaaaaggaaagcatggggcttatatggatc

SEQ ID NO: 70703 - DNA, 983 bp, Homo Sapiens
  misc_feature (163)..(171): n is a, c, g, or t
gtgggctttttttacactttttcaagaggggcacaaaatggcaaaccgggggctccccttccaggaattcccagaggggccagaggtggcaacccagggccccaccaattttcttcaaggtacccgttcccctcggttctggtgaattatttcttggagaatnnnnnnnnngggggccctttcccggcaggtcatgttttgctttagttttccaagtccgtttcagtcccctttccttggtctgaagaaattctgcagtggcgagcagtttcccacttgccaaagatcccttttaaccaacactagcccttgtttttaacacacgctccagcccttcatcagcctgggcagtcttaccaaaatgtttaaagtgatctcagaggggcccatggattaacgccctcatcccaaggtccgtcccatgacataacactccacacccgccccagccaacttcatgggtcactttttctggaaaataatgatctgtacagacaggacagaatgaaactcctgcgggtctttggcctgaaagttgggaatggttgggggagagaagggcagcagcttattggtggtcttttcaccattggcagaaacagtgagagctgtgtggtgcagaaatccagaaatgaggtgtagggaattttgcctgccttcctgcagacctgagctggctttggaatgaggttaaagtgtcagggacgttgcctgagcccaaatgtgtagtgtggtctgggcaggcagacctttaggttttgctgcttagtcctgaggaagtggccactcttgtggcaggtgtagtatctggggcgagtgttgggggtaaaagcccaccctacagaaagtggaacagcccggagcctgatgtgaaaggaccacgggtgttgtaagctgggacacggaagccaaactggaatcaaacgccgactgtaaattgtatcttataacttattaaataaaacatttgctccgtaaagttg

SEQ ID NO: 70704 - DNA, 1053 bp, Homo Sapiens
  misc_feature (84)..(118): n is a, c, g, or t
ggtgtatagactcactatagggcgctagccggtttgtagccgaacgaccgagcgcagcgaagtagtgagcgaggaagcggccgnnnnnnnnnnnnnnnnnnnnnnnnnnnnnnnnnnncagtcgacggtaccggacatatgcccgggaattcggccattacggccgggggcagtcctcccaaagtacttgtgtccgggtggtggactggattcgctgcggagccctggaagctgcctttccttctccctgtgcttaaccagaggtgcccatgggttggacaatgaggctggtcacagcagcactgttactgggtctcatgatggtggtcactggagacgaggatgagaacagcccgtgtgcccatgaggccctcttggacgaggacaccctcttttgccagggccttgaagttttctacccagagttggggaacattggctgcaaggttgttcctgattgtaacaactacagacagaagatcacctcctggatggagccgatagtcaagttcccgggggccgtggacggcgcaacctatatcctggtgatggtggatccagatgcccctagcagagcagaacccagacagagattctggagacattggctggtaacagatatcaagggcgccgacctgaagaaagggaagattcagggccaggagttatcagcctaccaggctccctccccaccggcacacagtggcttccatcgctaccagttctttgtctatcttcaggaaggaaaagtcatctctctccttcccaaggaaaacaaaactcgaggctcttggaaaatggacagatttctgaaccgtttccacctgggcgaacctgaagcaagcacccagttcatgacccagaactaccaggactcaccaaccctccaggctcccagagaaagggccagcgagcccaagcacaaaaaccaggcggagatagctgcctgctagatagccggctttgccatccgggcatgtggccacactgcccaccaccgacgatgtgggtatggaaccccctctggatacagaaccccttcttttccaaatt

SEQ ID NO: 70705 - DNA, 484 bp, Homo Sapiens
tagatcgagctcggtaccggtgttaatcgatgccaccgtgcgccggtggggagggagcctggtacgctgataactcctggacctgaatcttccctttcttcaggtcggcgcccttgatatctgttaccaggccaatgtctccagaacctctgtctgggttctgctctgctaggggcatctggatccaccatcaccaggatataggttgcgccgtccacggcccccgggaacttgactatcggctccatccaggagctgatcttctgtctgtagctgtcacaatcaggaacaaccttgcagccaatgttccccaactctgggtagaagacattcaagcccctggcaaaagagggagtcactcgtccaagagggcactcatgggcacacggactgttctcatcctcgtctcccagtgaccaccatcatgagacccagtaaggctgctgtgaccagcatcatgatgctggcatcgataacaccggac

SEQ ID NO: 70706 - DNA, 1120 bp, Homo Sapiens
  misc_feature (855)..(860): n is a, c, g, or t
  misc_feature (862)..(868): n is a, c, g, or t
  misc_feature (870)..(873): n is a, c, g, or t
  misc_feature (875)..(875): n is a, c, g, or t
  misc_feature (877)..(878): n is a, c, g, or t
  misc_feature (901)..(1042): n is a, c, g, or t
cataagacacatcaaacaggcctatacaaaaggtttaggaaaagaaaacaatggtgagtcccggccctcttcgaattcactggcacctcatgcaagtgtaggaaggcacgctggatcgtctatctgattccaaagctgtcctttgccatctcatcccttggcctgccccccaaccctgaggatgcccctgccatccccccaacctcctcatattgcctctgaacccagatggcaatccatcccggttctctctgagggccacgggcttgggtagtggaaagggtgtttgggaaattgttaaatcagttacccgtagtagagctatttcttgtacttctaagttttctagaagtggaaggattgtagtcatcctgaaaatgggtttacttcaaaatccctcagccttgttcttcacgactgtctatactgagagtgtcatgtttccacaaagggctgacacctgagcctggattttcactcatccctgagaagccctttccagtagggtgggcaattcccaacttccttgccacaagcttcccaggctttctcccctggaaaactccagcttgagtcccagatacactcatgggctgccctgggcagccagcattcattgtaagttccctctttgaaaactggtgtgtgggtgttcagttctgtgtctggtgggtatggacagacagtaatctcctgtgatctgtgctagctgtgaggcagctctggaacgtgaagagctgtttggtttgaaccgtgaacaaaactgtgttttgagtttagctgacattaaagaaaaaagttcatcacgtgactgttaatgtaaacctggttattaaaataactatgaaattacannnnnnannnnnnnannnnanannaaaaacctcgtgccgaattcttnnnnnnnnnnnnnnnnnnnnnnnnnnnnnnnnnnnnnnnnnnnnnnnnnnnnnnnnnnnnnnnnnnnnnnnnnnnnnnnnnnnnnnnnnnnnnnnnnnnnnnnnnnnnnnnnnnnnnnnnnnnnnnnnnnnnnnnnnnnnnnttgatgggctactcaaataattgcgttggctcatgcccgcttccattcggaaacctgcgtgcacctgataatgaacgc

SEQ ID NO: 70707 - DNA, 513 bp, Homo Sapiens
  misc_feature (27)..(27): n is a, c, g, or t
  misc_feature (85)..(85): n is a, c, g, or t
tctctcctcatatacggtgttctgcgntggatatcagtaaagccatcacttcataggtgacagcctgcatatttggtgccttaangtacagacactgttccccatcctatccagagttagttttagttgcagcatggaacaattacaggacttggtggggaacttaaagatgcttcgaaaagcctggaaagagcaactcagttgtaacttggggaagttaacgatccgcccgagtgcagaggaaaaccagaaacgccttgccttcagctgaaccaccgtttgtgcgagctggatgtccttttcagtagaaaagaattttccttttgaatttataccattcatcaattttgacactttaaaaacgtgtgaaagggttaagagggaaagatactgcccaagtatttgaatcgtttagtagtaactgtccatttatcctattttgatctttttcaagtcttctgaaaggaagtagacagtattacaccctgaataaataaggtgttgttttccaca

SEQ ID NO: 70708 - DNA, 922 bp, Homo Sapiens
cgaaggtcacggcacgctcacaatggagctctcggagtctgtgcagaaaggcttccagatgctggcggatccccgtccttcgactccaacgccttcacgcttctcctccgggcggcattccagagtctgctggacgcccaggcggacgaggccgtgttagatcatccagacttgaaacatatcgacccagtggttttaaaacattgtcatgcagcagctgcaacttacatactagaggcaggaaagcaccgagctgacaagtcaactctaagcacttatctagaagactgtaaatttgacagagagcgaatagaactgttttgcacggaatatcagaataataagaattccctagaaatcctactgggaagtataggcagatctctccctcatataacggatgtttcttggcgcttggaatatcagataaagaccaatcaacttcataggatgtacagacctgcatatttggtgaccttaagtgtacagaacactgattccccatcctatccagagattagttttagttgcagcatggaacaattacaggacttggtggggaaacttaaagatgcttcgaaaagcctggaaagagcaactcagttgtaacttggggaagttaacgatccgcccgagtgcagaggaaaaccagaaacgccttgccttcagctgaaccaccgtttgtgcgagctggatgtccttttcagtagaaaagaattttccttttgaatttataccattcatcaattttgacactttaaaaacgtgtgaaagggttaagagggaaagatactgcccaagtatttgaatcgtttagtagtaactgtccatttatcctattttgatctttttcaagtcttctgaaaggaagtagacagtattacaccctgaataaataaggtgttgttttccacaaaaaaaa

SEQ ID NO: 70709 - DNA, 582 bp, Homo Sapiens
aatggagctctcggaggctgtgcagaaaggcttccagatgctggcggatccccgctccttcgactccaacgccttcacgcttctcctccgggcggcattccagagtctgctggacgcccaggcggacgaggccgtgttagatcatccagacttgaaacatatcgacccagtggttttaaaacattgtcatgcagcagctgcaacttacatactagaggcaggaaagcaccgagctgacaagtcaactctaagcacttatctagaagactgtaaatttgacagagagcgaatagaactgttttgcacggaatatcagaataataagaattccctagaaatcctactgggaaggtaggtactgtataaggtgtcaagctgaggcacttttcacttgcaggtatgaatggagagtgttggtgtgaaacaagatcttcgggatcttgacccaaagaaaaggagccaaagggcatgtcaagcaattgaagttaagctcatgtttttaaagatcgtttattgagatgattttgaaatgctcctttaccattcataatttgaaaataaagtttaacaatggtttaaatt

SEQ ID NO: 70710 - DNA, 819 bp, Homo Sapiens
  misc_feature (405)..(498): n is a, c, g, or t
caagtggggccaaaacaatgctcagagtctgctccgagttcctgcagagccacgtccccaacacccgtccggagcgacagcaaagcccggagacttcctcttcccggggctttccccttcatcgtccgccggctcctcttctccgagcgcccctccaccccggcggatccagctccgagccgaccgagcggcttacctaacacggcctcgtccccctgggcgtccaacagacctctggaatgccgccccgaggagaagcgggaaggcgttggagtcgaaggagcggggatcccgccagcatctgaaagcctttctgcacagactccgagagctccattgtgagcgcgccgtgaccttcgacacgcacaccacgtgacacgcgccgcgcgctcagttgatgcggcnnnnnnnnnnnnnnnnnnnnnnnnnnnnnnnnnnnnnnnnnnnnnnnnnnnnnnnnnnnnnnnnnnnnnnnnnnnnnnnnnnnnnnnnnnnnnngccgccgcctacggcctcccaccgtttccgtccagctctcgcttgtccagcgcaggccgcgggagctgccgagccttggcgagaagggcggcctcgggcgttttgtggacgcgctcggcgctttctccttggttcggcgcttacctcggacggccaccagctcggttccctgagagaccccggggagactgcggacggtgtcgggatcccggcccccgcctcccgcaaacggcgtcctccccgctcctcgctctgcgcgaatcctgcgggaagctccgatctcagcctcgtgccgaattcgccacccaggcctcgctccct

SEQ ID NO: 70711 - DNA, 648 bp, Homo Sapiens
  misc_feature (159)..(203): n is a, c, g, or t
gactcctgcatgtccttgggggcgcagccctgtgggctcaggcagagctctcaggagccggggcaccttgctgttcgctgctgtgtcgtcttctaatgtgagctcatccactgctgctgcagcgtggtgatcaggagtcacagacaagatcggggatgnnnnnnnnnnnnnnnnnnnnnnnnnnnnnnnnnnnnnnnnnnnnngctaaattaagtcatactgtcaaccacacgtgatctcgtctgaaacagtgtttggaagtgggaacagttttgtcctgtatgctgatgtgtccagaatttcatttaatgatagacggaaaatgtgtggttactgaaaactgtatatgatacagaatttcataagagccatgctgttgggcaaagcaactctttttcaaccactgctcatcagtttctgtagagacaaaaactctgtacatattttggaatctgaagaatcctatgtaaatcatttgttacttaagtctgtgaaaaacatatttctttggaggaaaatgtatgcatttataagtgttccatggaatcagtttttattgtatcgatataattgtctctaagtgttgactgtcttcattgcaatatgaaattcattaaaatgtccatgttccataattactattataaa

SEQ ID NO: 70712 - DNA, 747 bp, Homo Sapiens
  misc_feature (484)..(528): n is a, c, g, or t
ggtccaattgccagagcctcccacactgcacatacaaaggtctgagcccagggcagcttctggggccactgcacaggccacctgcttgggttcctcggagtttaatttgaaagtctgggtgtcttaggatgatggttaggaacattgaaaaatggctgcaaatagccaaatcaaacttaagaaccagatctctgccagattaaacatttttgaagcttttaaaagtcaatattcctagtggccactgagttccaggcacactggtgccctttactgccacagctgctcaccttgtctggcaaactggagggacctcagaaactggactcctgcatgtccttgggggcgcagccctgtggtgctcaggcagagctctcaggagccggggcaccttgctgttcgctgctgtgtcgtcttctaatgtgagctcatccactgctgctgcagcgtggtgatcaggagtcacagacaagatcggggatgnnnnnnnnnnnnnnnnnnnnnnnnnnnnnnnnnnnnnnnnnnnnngctaaattaagtcatactgtcaaccacacgtgatctcgtctgaaacagtgtttggaagtgggaacagttttgtcctgtatgctgatgtgtccagaatttcatttaatgatagacggaaaatgtgtggttactgaaaactgtatatgatacagaatttcataagagccatgctgttgggcaaagcaactctttttcaacacactgctcatcagtttctgt

SEQ ID NO: 70713 - DNA, 1074 bp, Homo Sapiens
ccgagtaccagtgtatctcagccagcaccatcccccaggaagactaccgctgctggccatcctaccaccacgggagctgcctcctttcagtgttcaacctggctgaggctgtggatgtctgtgagagccatgcccagtgtcgggcctttgtggtcaccaaccagaccacctggacaggtcggcagctggtctttttcaagactggatggagccaagtggtccctgatcccaacaagaccacatatgtgaaggcctctggctgacctatctgagggctcggctgaccagctgactatcctcagcagctgggcttgcctgtggagggagtgacttgcactggcagcactgcatgtcacctgggaacccctgcagacaaagctaacatcccagacagacagatgtgaccaggacaaacgtgcaataatgccaaatgttaaaatgtgagtttaccagcctagctatgggactgctggctcctagtccaggaatcatgggggtatgactgcctctccaaccctgtgggctgtaagcaagctcaggctagtctccccactgggggctgtgcccctccctgggacggttccgtgggcagccccatcactgtgttcaatagtgtgagaatgtagctaaagcccctgctgctgctgctgcacatgccacagcaggcggtgggggctgcgtggggacaatccatcgtggagtgttctctcagcttaggtctggacaggagacttggcgggagatgctccaggatgtgggtgattctgtacctggggaggctatctctgacctcccgacaggggacactcccaggccagcccaggggtcaggggcagaggtgcacacctcagcatgagccaagactggggtcagggagcaggtgtggtttgagccaggacctggggcgggggtggggccggggcctttctgcctcatttgctttcaatgaaagcctcaaagcagccaaaaccaggctttcccccttcctcgagtttgaatatccagaatcttttgtacttcttgttggttaaattgtttatttttgtaaaaaataaaataaaattagttaataaa

SEQ ID NO: 70714 - DNA, 598 bp, Homo Sapiens
aagttataattttgttttattgcccaggttctgaattggggccagaggtaggaatagaacccaggccttctcatttgaaatcctgtgttcttcccctccccagggtgggaactatggttgctagggctgaggtgtattgcttacttcttccatcaaaaatctcttttatctctgaacaacttgccacctctgcagaaacaagtccctgtggagatctcagttcagccccaggcagggttactacatggagtacccagatcccaggggctacttcaggcccttctactaagctcctgaccctggctctgggtcagatgttggctgaacatgaactattgtagggctgacagctacagaccacagaaagagcaaagcttcagtaggttcctgcctgatggagaagtcctcgggaagcccttggccttctatttcctcattgtcctttcagagaagagagcaggagttgggggagaaaggagattcgcatttactgaccatctgttatgtgctagacacttcattttacactgagaaaatatggaaagcatagataaacacctaaaagaaaataaaaacctcatgttatcccaccacccaa

SEQ ID NO: 70715 - DNA, 973 bp, Homo Sapiens
  misc_feature (69)..(103): n is a, c, g, or t
ttgactctatgggcgctcccgtcctgccgaacgacgagcgcagcgagtcattgagcgaggaagcggcgnnnnnnnnnnnnnnnnnnnnnnnnnnnnnnnnnnncagtcgacggtaccggacatatgcccgggaattcggccattacggccggggaggaacgagatggcggttctctggaggctgagtgccgtttgcggtgccctaggaggccgagctctgttgcttcgaactccagtggtcagacctgctcatatctcagcatttcttcaggaccgacctatcccagaatggtgtggagtgcagcacatacacttgtcaccgagccaccattctggctccaaggctgcatctctccactggactagcgagagggttgtcagtgttttgctcctgggtctgcttccggctgcttatttgaatccttgctctgcgatggactattccctggctgcagccctcactcttcatggtcactggggccttggacaagtagttactgactatgttcatggggatgccttgcagaaagctgccaaggcagggcttttggcactttcagctttaacctttgctgggctttgctatttcaactatcacgatgtgggcatctgcaaagctgttgccatgctgtggaagctctgaccttttcgacttcatacttcgaacgaatcgatgtatgcctctttgcctctgctttgtcatgccattaagctcacaataaggaagaaataacagataagtcccatgggtggaacagcccttcttctcttaatcacaagattatcttcagaattcaatctttgaggaaaaggtttgagaggaatcatatctaaggtgtgagactgagttctaatattctgggtaaagttaacgggggttgcctcccagcttcttataagactcacggtataactacccatgatatatccaggtttggctttacaattatcatctcttaagcgcatccactta

SEQ ID NO: 70716 - DNA, 1453 bp, Homo Sapiens
  misc_feature (42)..(74): n is a, c, g, or t
aagcagccaagccgagtctttgagcgaggaagcggccgcacnnnnnnnnnnnnnnnnnnnnnnnnnnnnnnnnncagtcgacggtaccggacatatgcccgggaattcggccattacggccgggggttccgggttggtggatgaccttgagccctcaggaacgagatggcggttctctggaggctgagtgccgtttgcggtgccctaggaggccgagctctgttgcttcgaactccagtggtcagacctgctcatatctcagcatttcttcaggaccgacctatcccagaatggtgtggagtgcagcacatacacttgtcaccgagccaccattctggctccaaggctgcatctctccactggactagcgagagggttgtcagtgttttgctcctgggtctgcttccggctgcttatttgaatccttgctctgcgatggactattccctggctgcagccctcactcttcatggtcactggggccttggacaagttgttactgactatgttcatggggatgccttgcagaaagctgccaaggcagggcttttggcactttcagctttaacctttgctgggctttgctatttcaactatcacgatgtgggcatctgcaaagctgttgccatgctgtggaagctctgacctttttgacttcatactttgaagaattgatgtatgcctctttgcctctgctttgtcatgccattaagctcacaataaggaagaaataacagataagtccattggtggacagccttcttctcttaatcacaagattattttcagaatttaatctttgaggaaaaggtttgagaggaattatatctaagttgtgagactgagttctatattctggtgagttaatggggttgcctcccagcttcttataagactcacagtataactaaacatgatatatcagcttttgcctttcaatttatcaatctcttaaagagaatccaactttattacgattagtatatgatcaaacttccatatttgccttgggaataatggacaaagggaaatactcttaattcatgaataaaaactttgcagaaaattagacagtgtttaattttcgaaaacttccctctctagacagtagataccacctactgatggttacatatactagggaaattttaaaattaggaaatgctgatagctcatattataaatttctaaatcctaggaagaaacgcttggagtgcttctgaatatacagaagttccatttaagggcaagtttccccgtagatgtatcaaaatactaccaactgtaaattgagatttaattcccaaatgtattctacttgttctaaaacaatctgtccacaaatataaaactataagtaataaattgttattttcgcacaatgggaatctctaatgtgaaaatgtattctatgaaaataatttttttaaataaaatgttatataataaaaaa

SEQ ID NO: 70717 - DNA, 1093 bp, Homo Sapiens
  misc_feature (82)..(116): n is a, c, g, or t
  misc_feature (891)..(891): n is a, c, g, or t
  misc_feature (922)..(922): n is a, c, g, or t
gacgctcggatcgatcctatagggcgctaggcgtattttcgaacgacgagcgcagcgagtcagtttagcgaggaagcggcgnnnnnnnnnnnnnnnnnnnnnnnnnnnnnnnnnnncagtcgcacggtaccggacatatgcccgggaattcggccattacggccgggggggttggtggatgaccttgagccctcaggaacgagatggcggttctctggaggctgagtgccgtttgcggtgccctaggaggccgagctctgttgcttcgaactccagtggtcagacctgctcatatctcagcatttcttcaggaccgacctatcccagaatggtgtggagtgcagcacatacacttgtcaccgagccaccattgggccttggacaagttgttactgactatgttcatggggatgccttgcagaaagctgccaaggcagggcttttggcactttcagctttaacctttgctgggctttgctatttcaactatcacgatgtgggcatctgcaaagctgttgccatgctgtggaagctctgacctttttgacttcatactttgaagaattgatgtatgcctctttgcctctgctttgtcatgccattaagctcacaataaggaagaaataacagataagtccattggtggacagccttcttctcttaatcacaagattattttcagaatttaatctttgaggaaaaggtttgagaggaattatatctaagttgtgagactgagttctatattctggtgagttaatgggggttgcctcccagcttcttattaagactcacagctattaactaaacatgatatatcagcttttggccctttcaatttatcaatctcttaaagagaatccaactttaatacgattagtatatgatcanacttcatatttgcctggggatatgacaaggnaatactctattctgataaacttgcaaaatagacggtttatttcaactcctcctgacgtgacactctgtgtacttctagaattaatagatggagcttttatcatcgaaactgagtgatcatctaggtcgagcaacgagatcgtctagcacatcgtcgattaaaactgccccc

SEQ ID NO: 70718 - DNA, 1002 bp, Homo Sapiens
  misc_feature (892)..(926): n is a, c, g, or t
ggaccaaacctatcgtataagttgggattctccttaagagattgataattgaaaggccaaacctgatatatcaatgtttagttatactgtggattcttataagaagccgggaggccaacgccgcagtaacttcaccagaatatagaactccagtctcacaaccttagatataagtcctcgtcgaacctggtcctcaaagattaaattctgaaaataatcttgtgattaagagaagaaggctgtccaccaatggacttatctgttatttcttccttattgtgagcttaatggcatgacaaagcagaggcaaagaggcatacatcaattcttcaaagtatgaagtcaaaaaggtcagagcttccacagcatggcaacagctttgcagatgcccacatcgtgatagttgaaatagcaaagcccagcaaaggttaaagctgaaagtgccaaaagccctgccttggcagctttctgcaaggcatccccatgaacatagtcagtaacaacttgtccaaggccccagtgaccatgaagagtgagggctgcagccagggaatagtccatcgcagagcaaggattcaaataagcagccggaagcagacccaggagcaaaacactgacaaccctctcgctagtccagtggagagatgcagccttggagccagaatggtggctcggtgacaagtgtatgtgctgcactccacaccattctgggataggtcggtcctgaagaaatgctgagatatgagcaggtctgaccactggagttcgaagcaacagagctcggcctcctagggcaccgcaaacggcactcagcctccagagaaccgccatctcgttcctccccggccgtaatggccgaattcccgggcatatgtccggtaccgtcgactgnnnnnnnnnnnnnnnnnnnnnnnnnnnnnnnnnnnccggccgcttcctcgctcactactcgctgcgctcgtcgttcggctgcgagagctagcgccctatagtgattatcat

SEQ ID NO: 70719 - DNA, 1123 bp, Homo Sapiens
  misc_feature (86)..(120): n is a, c, g, or t
gaagtcgtatcgactcactatagggcgctcacgtctgtacagccgaacgacgagcgcagcgagtctgtgagcgaggaagcggccgnnnnnnnnnnnnnnnnnnnnnnnnnnnnnnnnnnncagtcgacggtaccggacatatgcccgggaattcggccattacggccggggggagccctcaggaacgagatggcggttctctggaggctgagtgccgtttgcggtgccctaggaggccgagctctgttgcttcgaactccagtggtcagacctgctcatatctcagcatttcttcaggaccgacctatcccagaatggtgtggagtgcagcacatacacttgtcaccgagccaccattctggctccaaggctgcatctctccactggactagcgagagggttgtcagtgttttgctcctgggtctgcttccggctgcttatttgaatccttgctctgcgatggactattccctggctgcagccctcactcttcatggtcactggggccttggacaagttgttactgactatgttcatggggatgccttgcagaaagctgccaaggcagggcttttggcactttcagctttaacctttgctgggctttgctatttcaactatcacgatgtgggcatctgcaaagctgttgccatgctgtggaagctctgacctttttgacttcatactttgaagaattgatgtatgcctctttgcctctgctttgtcatgccattaagctcacaataaggaagaaataacagataagtccattggtggacagccttcttctcttaatcacaagattattttcagaatttaatctttgaggacaaaggttgagaggaattatatctaagttgtgagactgagttctatattctggtgagttaatggggttgctcccagttcttataagactcacagtataactaaacatgatatatcagcttttgcctttcaatttatcaatctcttaagagaatcaaattattacgattagtatatgatcaaattccatatttgccttggcgatactgcccagggaaatcccttatctgagttacacttggccaaattgccgggcgttatttccaaattcccctaaaagaaaccctagggccta

SEQ ID NO: 70720 - DNA, 899 bp, Homo Sapiens
  misc_feature (77)..(111): n is a, c, g, or t
atcgatacatcctatagggcgctagctctcgcagccgaacgacgagcgcagcgagtagtgagcgaggaagcggccgnnnnnnnnnnnnnnnnnnnnnnnnnnnnnnnnnnncagtcgacggtaccggacatatgcccgggaattcggccattacggccggggtggcttatggggacatcaatggcttttcagccatggctaaaaccgtggggttacccaccgccatggcagccaaaatgttgcttgatggtgaaattggagccaaaggcctaatggggcccttttcaaaggagatctatggaccaatattggagcgaattaaagcagaaggcattatatatactacacagagtacaattaaaccataattgggaattatatttgtttttttcttcccaggcaatacacctctgaacatgtgtgtgataaatgggtttgctaatgtgctgttttaaagtataaagcataatatgttttggttaacacaatgtactttttgaactataaatctttattttaatatggaaatgtttggaacaggagatgcaagccactaacagagaactttaataattctaccctgtattttataaatacgtatgtgaaagtgatgatcatgctatttgttaatttattgtgccacttttttctttcgttctcggtcgtcgccgtttgagatggacgtctcgctctgtcacccaggctgagttgcaggtggggcgaacttcggtcactgaaagctccgcctcctggttcacgccattctccggcctaagcctccaggtactgggaatgagaccccgccaagcccggctaatccggatttcaaacaaccggttcacccagttgcagaatccattttctaagaccattgttaccaaaagtttctttacatcaaa

SEQ ID NO: 70721 - DNA, 925 bp, Homo Sapiens
  misc_feature (84)..(118): n is a, c, g, or t
gtaaatactgacccctccgactaataggcccatcgcgtgtagcgaacgacgagcgcagcgaagtagtgagcgaggaagcggcgnnnnnnnnnnnnnnnnnnnnnnnnnnnnnnnnnnncagtcgacggtaccggacatatgcccgggaattcggccattacggccggggaggaacgagatggcggttctctggaggctgagtgccgtttgcggtgccctaggaggccgagctctgttgcttcgaactccagtggtcagacctgctcatatctcagcatttcttcaggaccgacctatcccagaatggtgtggagtgcagcacatacacttgtcaccgagccaccattctggctccaaggctgcatctctccactggactagcgagagggttgtcagtgttattgctcctgggtctgcattccggctgcttatttgaatccttgctctgcgatggactattccctggctgcagccctcactcttcatggtcactggggccttggacaagttcgtatcactgactatgttcatggggatgccttgcagcaaagctgccaaggcagggcttttggcactttcagctttaacctttgctgggctttgctatttcaactatcacgatgtgggcatctgcaaagctgttgccatgctgtggaagctctgacctttttgacttcatactttgaagaattgatgtatcgcctctttgccctctgcctttgtcatgccatttaagctcacaataaggaagaaataaccagataaagtccattggtgggacagccttcttctcttaatcaccagattatttccagaatttaatcctctgagggaaacggtttgacaaggattatatctagttgtgaactgagtccaaatctgggaagtaaggggttgccccattttttaaaccgttacaactgat

SEQ ID NO: 70722 - DNA, 796 bp, Homo Sapiens
ggggagccctcaggaacgagatggcggttctctggaggctgagtgccgtttgcggtgccctaggaggccgagctctgttgcttcgaactccagtggtcagacctgctcatatctcagcatttcttcaggaccgacctatcccagaatggtgtggagtgcagcacatacacttgtcaccgagccaccattctggctccaaggctgcatctctccactggactagcgagagggttgtcagtgttttgctcctgggtctgcttccggctgcttatttgaatccttgctctgcgatggactattccctggctgcagccctcactcttcatggtcactggggccttggacaagttgttactgactatgttcatggggatgccttgcagaaagctgccaaggcagggcttttggcactttcagctttaacctttgctgggctttgctatttcaactatcacgatgtgggcatctgcaaagctgttgccatgctgtggaagctctgacctttttgacttcatactttgaagaattgatgtatgcctctttgcctctgctttgtcatgccattaagctcacaataaggaagaaataacagataagtccattggtggacagccttcttctcttaatcacaagattattttcagaattttaatctttgaggaaaaaggtttgagaaggaattatatcctaagttgtgtgagactgagttctataattctggtgaaattaaatgggggttgccctcccaacttcttattagaactcccaggtattactaaaacatgatatatccagc

SEQ ID NO: 70723 - DNA, 667 bp, Homo Sapiens
ctcacagcaaaagctgtagccagagcttcatgttggttttattcagttcctcatttttctagttcccacaggaggaacacaaagggcccatgatgaaagcctgcacacagtgggttatgttgtaagcttgggttattaactgcttttatagtaagcaaaaaaatcctggtctttgtccaaagggagttattaccccatacttgaagatagcttagtgtaaacacaagcctaggacatggactaggtaaagacaaagtccttgcattcttgacatacccagtaagtatgcagggacactcagagcccatagtggatagtctcttccaacagtctgctcctcagcctgagatgttcttggccaaacttgaattttcacatgagtatgccactctatcagctactctgattaacctgacagtcgggttgtttagtcaggaccaaaattgttcatttggtctcatatagcaattaatgcaggctattatcagacacagcagcaggatgaagccaacctgcagtattaacctcagtcctgtcccccaaggtcttgactcaatcaactgtaagttccaagggaggaccaataggtctttttattaggcagccagaaaggagtgaaggacaatttattatactttatgacccaataaagggagctttgactgcc

SEQ ID NO: 70724 - DNA, 833 bp, Homo Sapiens
attggcacgaggccgccactatgcttaagagaatctgcaccaggcgttccaccaggaagacgggacctgcctctccaccctcggggatttttacctggacacgcaccatttagacctttaggttcacttggcccaagagagtactttattcctggtacccgattaccacccccaacccatggtccccaggaatacccaccaccacctgctgtaagagacttactgccgtcaggctctagagatgagcctccacctgcctctcagagcactagccaggactgttcacaggctttaaaacagagcccataaaactatgacctctgaggtttcattggaaagaaagtgtactgtgcattatccattacagtaaaggatttcattggcttcaaaatccaaaagtttattttaaaaggtttgttgttagaactaagctgccttggcagtgtgcatttttgagccaaacaattcaaaaatgtcatttcttccctaaataaaaatcaccttttaagctagagcgtccttacaactttgaaatgtgcaataaagaatacctgtgttttagctaatgtagcatatgtaattgcaaaatgatttagaatgtcatgaaaaatatgaacatttcctgtggaaatgctttaagaacatgtatttccattatcctatttttagtgtacaccagctgaatacggagcaatggtgtttataagcgtttttttaaactatctggtcacaaagactgttacgctaaaaatgtttactaaaagatcactaaactatctcccctcttgctgaagttctttgtagtaatagctcataaaaatttgtttattaat

SEQ ID NO: 70725 - DNA, 1761 bp, Homo Sapiens
gcagtaactataacggtcctaaggtagcgaggcctgggtggcgaattcggcacgaggccagtcggtcccatctatccacctggctccacagtgctggtggaaggagggtatgatgcaggtgccagatttggagctggggctactgctggcaacattcctcctccacctcctggatgccctcccaatgctgctcagcttgcagtcatgcagggagccaacgtcctcgtaactcagcggaaggggaacttcttcatgggtggttcagatggtggctacaccatctggtgaggaaccaaggccacctttgtgccgggaaagacatcacataccttcagcacttctcacaatgtaactgctttagtcatattaacctgaagttgcagtttagacacatgttgttggggtgtctttctggtgcccaaactttcaggcacttttcaaatttaataaggaaccatgtaatggtagcagtacctccctaaagcattttgaggtaggggaggtatccattcataaaatgaatgtgggtgaagccgccctaaggattttcctttaatttctctggagtaatactgtaccatactggtctttgcttttagtaataaaacatcaaattaggtttggagggaactttgatcttcctaagaattaaagttgccaaattattctgattggtctttaatctcctttaagtctttgatatatattacttgttataaatggaacgcattagttgtctgccttttcctttccatcccttgccccacccatcccatctccaaccctagtcttccatttcctcccgccagtctccattgaatcaatggtgcaggacagaaagccagtcagactaatttccttctttcctcgcacttctccccactcgtcatcttttaactagtgtttcacaaggatcctctgaaaccctctctgtgccccaagtacagatcccattacttctgctttcgtatctcctcaggcaaaagtggagggtgccttatgggccctcctcataggttgtctctgcatacacgaacctaacccaaatttgctttggtgccagaaaaactgagctatgtttgaacaaagatgtcgtgcaaactgtactgtgaacaacagttggtttaaaatatgaggggcaaggaggaggatgcatttcaaaagcttgattgatgtgttcagagctaaattaagaggagttttcagatcaaaaactggttaccattttttgtcagagtgtctgatgcggccactcattcggctccccagaattcctagactgggttaatagggtcatattgtgaatgtctcactacaaaatgacttgagtccagtgaaatctcattagggtttaagaatatttcagggatccttaatgttttgatttttgttttctgaaattggattttagtttattttatcttataatttcagttcatctaaattgtgtgttctgtacatgtgatgtttgactgtaccattgactgttatggaagttcagcgttgtatgtctctctctacactgtggtgcacttaacttgtggaatttttatactaaaaatgtagaataaagactattttgaagatttgaataaagtgatgaagttgcattacacctcactgcaaggattctttacttagcttgtttttagatttcttctatatatattttatttatatcccatctagaattcagctaggtgctgctgctgctctgtttcctttgatgacgctttgaaataaaggcaggagtacaagcct

SEQ ID NO: 70726 - DNA, 1138 bp, Homo Sapiens
  misc_feature (81)..(124): n is a, c, g, or t
  misc_feature (322)..(341): n is a, c, g, or t
  misc_feature (374)..(1021): n is a, c, g, or t
  misc_feature (1035)..(1035): n is a, c, g, or t
ggcacgaggtctcactacaaaatgacttgagtccagtgaaatctcattagggtttaagaatatttcagggatccttaatgnnnnnnnnnnnnnnnnnnnnnnnnnnnnnnnnnnnnnnnnnnnnttataatttcagttcatctaaattgtgtgttctgtacatgtgatgtttgactgtaccattgactgttatggaagttcagcgttgtatgtctctctctacactgtggtgcacttaacttgtggaatttttatactaaaaatgtagaataaagactatttttaagatttgaataaagtgatgaagttgcattacacctcnnnnnnnnnnnnnnnnnnnngcctacagccgcggccctcttgccgaattcttnnnnnnnnnnnnnnnnnnnnnnnnnnnnnnnnnnnnnnnnnnnnnnnnnnnnnnnnnnnnnnnnnnnnnnnnnnnnnnnnnnnnnnnnnnnnnnnnnnnnnnnnnnnnnnnnnnnnnnnnnnnnnnnnnnnnnnnnnnnnnnnnnnnnnnnnnnnnnnnnnnnnnnnnnnnnnnnnnnnnnnnnnnnnnnnnnnnnnnnnnnnnnnnnnnnnnnnnnnnnnnnnnnnnnnnnnnnnnnnnnnnnnnnnnnnnnnnnnnnnnnnnnnnnnnnnnnnnnnnnnnnnnnnnnnnnnnnnnnnnnnnnnnnnnnnnnnnnnnnnnnnnnnnnnnnnnnnnnnnnnnnnnnnnnnnnnnnnnnnnnnnnnnnnnnnnnnnnnnnnnnnnnnnnnnnnnnnnnnnnnnnnnnnnnnnnnnnnnnnnnnnnnnnnnnnnnnnnnnnnnnnnnnnnnnnnnnnnnnnnnnnnnnnnnnnnnnnnnnnnnnnnnnnnnnnnnnnnnnnnnnnnnnnnnnnnnnnnnnnnnnnnnnnnnnnnnnnnnnnnnnnnnnnnnnnnnnnnnnnnnnnnnnnnnnnnnnnnnnnnnnnnnnnnnnnnnnnnnnnnnnnnnnnnnnnnnnnnnnnnnnnnnnnnnnnnnnnnnnnnnnnnnnnnctcagtcggtgtangtcttcgctccagctggctgtgtgacgacccccgtcagccgacgctgcgcttatcggtactatctctgagtcaccggttaaacactatcgcatggagagcatg

SEQ ID NO: 70727 - DNA, 621 bp, Homo Sapiens
aggaagatgcatttcaaaagcctgattgatggtttaaagccaaattaagaggagttttcagatcaaaaattggttaccattttttgtcagagtgtctgatgcagccactcatttggtcccccaaaattcctggactgggttaatagggtcatattgtgaatgcctcactacaaaacgacttgaatccagtgaaatctcattagggttaagaatatttcagggatccttaatgttttgatttttgttttctgaaattggattttattttattttatcttataatttcagttcatctaaattgtgtgttctgtacatgtgatgtttgactgtaccattgactgttatggaagttcagcgttgtatgtctctctctacactgtggtgcacttaacttgtggaatttttatactaaaaatgtagaataaagactattttgaagatttgaataaagtgatgaagttgcattacacctcactgcaaggattctttacttagcttgtttttagatttcttctatatatattttatttatatcccatctagaattcagctaggtgctctgctgctctgtttcctttgatgacgctttgaaataaaggcaggagtacaagcctaaaaaaa

SEQ ID NO: 70728 - DNA, 763 bp, Homo Sapiens
cagtcgacggtaccggacatatgcccgggaattcggccattacggccggggggggcatgaatatcagacgctagggggacagccactgtgttgtctgctaccctcatcctggtcactgcttctgctataacagccctaggccaggaatatgaacaagccgctgctttggatctctgtcctcaccagcctcctggaagcctttgctcacacagacctcagtgggaaggtgtttgtatttcctagagaatctgttactgatcatgtaaacttgatcacaccgctcgagaagtcctcatcaggtattgctgaattttggatcaatgggacacctttggtgaaaaagggtctgcgacagggttactttgtggaagctcagcccaagattgtcctggggcaggaacaggattcctatgggggcaagtttgataggagccagtcctttgtgggagagatcggggatttgtacatgtgggactctgtgctgcccccagaaaatatcctgtctgcctatcagggtacccctctccctgccaatatcctggactggcaggctctgaactatgaaatcagaggatatgtcatcatcaaacccttggtgtggggtctgaggtcttgactcaacgagagcacttgaaaatgacatgactgtctaagagatctgggtcaaagcaactggatactagatcttacatctgcagtctttcttctttgaatttcctatctgtatgtctggcctaattaaaaacctattctcgtcatcatc

SEQ ID NO: 70729 - DNA, 1004 bp, Homo Sapiens
ccgaggaagcggcgcataacttcgtatagcatacattataccccccttttagtcgacggtaccggacatatgcccgggaattcggccattacggccgggggggcatgaatatcagacgctagggggacagccactgtgttgtctgctaccctcatcctggtcactgcttctgctataacagccctaggccaggaatatgaacaagccgctgctttggatctctgtcctcaccagcctcctggaagcctttgctcacacagacctcagtgggaaggtgtttgtatttcctagagaatctgttactgatcatgtaaacttgatcacaccgctggagaagcctctacagaactttaccttgtgttttcgagcctatagtgatctctctcgtgcctacagcctcttctcctacaatacccaaggcagggataatgagctactagtttataaagaaagagttggagagtatagtctatacattggaagacacaaagttacatccaaagttatcgaaaagttcccggctccagtgcacatctgtgtgagctgggagtcctcatcaggtattgctgaattttggatcaatgggacacctttggtgaaaaagggtctgcgacagggttactttgtggaagctcagcccaagattgtcctggggcaggaacaggattcctatgggggcaagtttgataggagccagtcctttgtgggagagatcggggatttgtacatgtgggactctgtgctgcccccagaaaatatcctgtctgcctatcagggtacccctctccctgacaatattcctggactggcaggctctgaatatgaaatcagaggatatgtcatcatcaaacccttggtgtgggtctgagggcctgactcacgaagccttgacatgaatgctgtctagaaaccggtcaagcagggtacagatctcttctgggccttctcttgattccatctgtgttgccattaaactttttgccacacacattcaacacaaaaac

SEQ ID NO: 70730 - DNA, 927 bp, Homo Sapiens
ccaggaagcggcgcataacttcgtatagcatacattatacgacccttctgtcgacggtaccggacatatgcccgggaattcggccattacggccgggggacacggaagtagctccgaacaggaagaggacgaaaaaaataaccgtccgcgacgccgagacaaaccggacccgcaaccaccatgaacagcaaaggtcaatatccaacacagccaacctaccctgtgcagcctcctgggaatccagtataccctcagaccttgcatcttcctcaggctccaccctataccgatgctccacctgcctactcagagctctatcgtccgagctttgtgcacccaggggctgccacagtccccaccatgtcagccgcatttcctggagcctctctgtatcttcccatggcccagtctgtggctgttgggcctttaggttccacaatccccatggcttattatccagtcggtcccatctatccacctggctccacagtgctggtggaaggagggtatgatgcaggtgccagatttggagctggggctactgctggcaacattcctcctccacctcctggatgccctcccaatgctgctcagcttgcagtcatgcagggagccaacgtcctcgtaactcagcggaaggggaacttcttcatgggtggttcagatggtggctacaccatctggtgaggaaccaaggccaccttggtgccgggaaagacatcacatacccttcagcactttctcacaatgtaacctggctttaagtcataattaacctggaagttgcagtttagacacattgtgtgggagtggtctttctgggtgcccaaatttcaggcactttccactttcaccacggaaccctgtatggttcgcagtactccctaaagcatttgacgcaggaagtatcctccataacatgccgtg

SEQ ID NO: 70731 - DNA, 1305 bp, Homo Sapiens
  misc_feature (65)..(106): n is a, c, g, or t
  misc_feature (110)..(144): n is a, c, g, or t
taaccagcagcagcaacaacacagaccgcaaagtgaagactcactatagggcgctagctcgttgnnnnnnnnnnnnnnnnnnnnnnnnnnnnnnnnnnnnnnnnnnccgnnnnnnnnnnnnnnnnnnnnnnnnnnnnnnnnnnncagtcgacggtaccggacatatgcccgggaattcggccattacggccgggggacacggaagtagctccgaacaggaagaggacgaaaaaaataaccgtccgcgacgccgagacaaaccggacccgcaaccaccatgaacagcaaaggtcaatatccaacacagccaacctaccctgtgcagcctcctgggaatccagtataccctcagaccttgcatcttcctcaggctccaccctataccgatgctccacctgcctactcagagctctatcgtccgagctttgtgcacccaggggctgccacagtccccaccatgtcagccgcatttcctggagcctctctgtatcttcccatggcccagtctgtggctgttgggcctttaggttccacaatccccatggcttattatccagtcggtcccatctatccacctggctccacagtgctggtggaaggagggtatgatgcaggtgccagatttggagctggggctactgctggcaacattcctcctccacctcctggatgccctcccaatgctgctcagcttgcagtcatgcagggagccaacgtcctcgtaactcagcggaaggggaacttcttcatgggtggttcagatggtggctacaccatctggtgaggaaccaaggccacctttgtgccgggaaagacatcacataccttcagcacttctcacaatgtaactgctttagtcatattaacctgaagttgcagtttagacacatgttgttggggtgtctttctggtgcccaaactttcaggcacttttcaaatttaataaggaaccatggtaatggtagcagtacctccctaaagcattttgaggtaaggggaggtatccattcataaaatgaatgtggggtgaagccgcccctaaggattttccctttaattttctcctggagtaatactggtaccatactgggtctttgcttttagtaataaaacatcaaattacgtttggaggggactttgatcttcctaagaattaagttgcccaattattctgattggcctttaatctccttttaagcctttgatatatattacttgttataaatggaacgcattagttgcctgcctttttcctttccatccccttgcccaccccatcccaatctccaacccctaaatctttct

SEQ ID NO: 70732 - DNA, 1035 bp, Homo Sapiens
acggcagtaactctcacggtcttaaggtagcgaggctgggtggcgaattcggcacgaggaggacgaaaaaataaccgtccgcgacgccgagacaaaccggacccgcaaccaccatgaacagcaaaggtcaatatccaacacagccaacctaccctgtgcagcctcctgggaatccagtataccctcagaccttgcatcttcctcaggctccaccctataccgatgctccacctgcctactcagagctctatcgtccgagctttgtgcacccaggggctgccacagtccccaccatgtcagccgcatttcctggagcctctctgtatcttcccatggcccagtctgtggctgttgggcctttaggttccacaatccccatggcttattatccagtcggtcccatctatccacctggctccacagtgctggtggaaggagggtatgatgcaagtgccagatttggagctggggctactgctggcaacattacctccatccacctcctggatgccctcccaatgctgctcagcttgcagtcatgcagggagccaacgtcctcgtaactcagcggaaggggaacttcttcatgggtggttcagatggtggctacaccatctggtgaggaaccaagccacctttgtgccgggaaagacatcacataccttcagcacttctcacaactgtaactgctttagtcatattaacctgaagttgccagtttagacaacatggttgttggggtgtctacctgggtgcccaaactttcaggcactttttaaatttaataagggaccatgtaaatggtagcagtacctccctaaagcattttgagggaggggaggtatccattcataaaatgaatgggggggaacccgccctagggattttcctttatttctctgggagtatactgtaccatactgggcttttgcttttagaataaaacctccaatttagggttggaagggaactttggatcctcctaaggatttaaagtggccaaattattccggattgggctttaaacccccttta

SEQ ID NO: 70733 - DNA, 725 bp, Homo Sapiens
ttgaccagtggtaaaaaaagcaggctggtacggtccggaattcccgggatatcgtcgacccacgcgtccgcgaacacgacgaaaaaaataaccgtccgcgacgccgagacaaaccggacccgcaaccaccatgaacagcaaaggtcaatatccaacacagccaacctaccctgtgcagcctcctgggaatccagtataccctcagaccttgcatcttcctcaggctccaccctataccgatgctccacctgcctactcagagctctatcgtccgagctttgtgcacccaggggctgccacagtccccaccatgtcagccgcatttcctggagcctctctgtatcttcccatggcccagtctgtggctggtgggcctttaggttccacaatccccatggcttattatccagtcggtcccatctatccaccctggctccacagtgctggtggaaggagggtatgatgcaggtgccagatttggagctggggctactgctggcaacattcctcctccacctcctggatgccctcccaatgctgctcagcttgcagtcatgcagggagccaacgtcctcgtaactcagcggaaggggaacttcttcatgggtggttcagatggtggctacaccatctggtgaggaaccaaggccacctttgtgccgggaaagacatcacataccttcagcacttctcacaatgtaactgctttagtcatattaacctga

SEQ ID NO: 70734 - DNA, 736 bp, Homo Sapiens
  misc_feature (76)..(76): n is a, c, g, or t
  misc_feature (566)..(566): n is a, c, g, or t
gcaaagctgacatgaacctttgtcgtggacttcaggccacattggattgaaggcattcgtttccttctggggtggngacaggccctcatggcaggcttgttcccgtggctctgagcgaggcctcttcctgctgggctcccagactcctgcatccaggcccccaccttctcggcttctggtttttctttctttttggtagaacacaacatctaccattcagttaaaccttctttatctcctcctctggcatccatttttccaaagaagagtcgagtcctctgaggtctgtgcttgaaagccgtccgaaggcattcttgttagctttgcttttctccccatatcccaaggcgaagcgctgagattcttccatctaaaaaaccctcgacccgaaaccctcaccagataaactacagtttgtttaggaggccctgaccttcatggtgtctttgaagcccaaccactcggtttccttcggattttcctccctttgtccgtatcttgttcggtgtcctcgaggttgagcttcactccactgcggcagaggcagcgtgcacactcggatttgntacgtttctatatatcttgaagctaaatgtatatatgagtagtttgccatgagataacacagtgtaaacagtagacacccagaaatcgtgacttctgtgttctctccatttgagtattttgtaatttttttgaaatatttgtggacataaataaaaccaagctacactac

SEQ ID NO: 70735 - DNA, 1955 bp, Homo Sapiens
  misc_feature (1117)..(1135): n is a, c, g, or t
ggtcattaccagggtaaaaaagcaggcggtaccggtccggatatcccgggatatcgtcgacccacgcgtccgcgttcacttgtgtctgctcctagcctgtgctctgccagcagcacagacatctgctccatcagacctcttccattttgcacagggagtgcaggaggtgaatgttcactttctgttctccagtgtcactgttctgtttccacgggatggaaagcgcatgggcctgtgtccattgtagatttccttctagatttctgtgtacacacacttgattgttctggatgaatgtcttttttaatactccgaaaatttcatcatctaagaaaatgattccatacaaataactcagcacacaagtgacccaggacatatgcctgccaaagggatgtgttagaaggctgccttctcatgcgcattgtcacttggatcttgtggtgaggacggccccatctttcttgccacagattgaggccacttttgagcaagggagatcctggagttaagacaggtgttgggggcagcctgtattttaccctaggggcaggtctgcatggtgaccccacattgcactggtaaaccatttgagtcccactcttcatcctggaagtgggaactggagtcccacccacagtgcattcagaaagcatgctgtgtgggggctgcttctcaggaggccaggcccttctgagcggaaccgtcctggagagagcctgccctcgtttccaggctgcagccgtaacgcactttctcccaggctgagggcgggtgttctggggtgtctgccctctgtcggccctgcttcctgccaggacgtggcctcttccgatccttttctctcagacactggaggtctcttctgccattgtgctggtcccatcccaagaattgtaggacagagaccacactgggtcggcggacacaaagtccatccaggacccaggccgcagagggagcaggaagagatgctgatagtttgatctagaaaccagcagctactggctcaaattcaggttctggcgtcaaatagcgacatttccagtttctcttaaaaaccgtgtttggtttcagttgggataggcttgttttgtctgttgaaaatgtttctagnnnnnnnnnnnnnnnnnnnctctcattccatttctgccttaactttagtttgttcacagggaggcaaagctgacatgaaccttttgtcgtgggacttcaggccacattggcttgaaggcattcgtttccttctggggtggggacaggccctcatggcaggcttgttcccgtggctctgagcgaggcctcttcctgctgggctcccagactcctgcatccaggcccccaccttctcggcttctggtttttctttctttttggtagaacacaacatctaccattcagttaaaccttctttatctcctcctctggcatccatttttccaaagaagagtcgagtcctctgaggtctgtgcttgaaaaccgtccgaaggcattcttgttagctttgcttttctccccatatcccaaggcgaagcgctgagattcttccatctaaaaaaccctcgacccgaaaccctcaccagataaactacagtttgtttaggaggccctgaccttcatggtgtctttgaagcccaaccactcggtttccttcggattttcctccctttgttcggggtttggtttggctcctctgtgtgtgtccgtatcttgttcggtgtcctcgaggttgagcttcactccactgcggcagaggcagcgtgcacactcggatttgctacgtttctatatatcttgaagctaaatgtatatatgagtagtttgccatgagataacacagtgtaaacagtagacacccagaaatcgtgacttctgtgttctctccatttgagtattttgtaatttttttgaaatatttgtggacataaataaaaccaagctactatccaaaaaaa

SEQ ID NO: 70736 - DNA, 1239 bp, Homo Sapiens
  misc_feature (134)..(134): n is a, c, g, or t
  misc_feature (203)..(204): n is a, c, g, or t
  misc_feature (1012)..(1066): n is a, c, g, or t
gctttgatctcattggagtccatgaaactttttgattgcctttgaagatcgcaaatgatccagccggttgcttcttcctagtgaacgcagtccgcattgtggtacaaaccagactggccgacgtccccaacctnttcatttccgaagttagtctgaggccctgtccgcacttctagcatgtggtctccttagtggggctattnntaatgagagaaaatctgtctttccagcatgaaatacatttagtctcctcaaaggaactgcaggtgttgacatgagttggaaagggaaccctgggatacgtggcgtcccctctattggaacagtctgaggactgaaggcatttgtccctggatttattggagacggcccagctcctccctctgaaggtggtcacattctgttgactctccatactcagcctctcctccagaaacagatctgttccagaacattccagcactttctatctggcctccttgtccccacactacgcccccccaccctcgccagggcttcctctagtgacactgttagagctaatctctgagacagggaaggcattactcacttaaaacccaggctgagtcctggccacctgctggattgtgacataggaggtggaatccactgaactgctacttctgcacaggctccttctcctggggctgtacccaggcccagccctgatggctcaccctgtcaggcaccagctgctccctcctgggctctcacccacctgcacatcctccttcctagcatcacattacctgcgtgtttccccagacaaaagcacttcccattcttgaaccttgcctaccctgggctgagctgacggcaatagatttaatgacagtgactcccaggaagggggtcctgtgactttgcgccttaataagaacaaaaggtggaattggtgacctaggaaaactgttgaattctaaaaagaatgaagttagtttctaacccctagtaatgttccctttttattttttgagtcttgccctgtcannnnnnnnnnnnnnnnnnnnnnnnnnnnnnnnnnnnnnnnnnnnnnnnnnnnnnngtttagccgattctcctgggtagctgggattacgggtgtggtcccaccccaccttagcccctggggcataatttgtactcacaaacaaggtttttgcctagtttggcccaggcctgggtcctcaaattcctgggctttcagtggatcaacccaacctcgggctttccacaagg

SEQ ID NO: 70737 - DNA, 804 bp, Homo Sapiens
  misc_feature (201)..(201): n is a, c, g, or t
acgtcagagcccagcgacggtccagcccagacaggccagagaagagagccacgtcctaccagatgcccttggtccctgctgctggctgcacttgcctgccttgtccctctgctgcattggaacatccgcagatagaagttttagaaagttctatttttccaaaccaggattccttactattgacagatttgctttaccaanaagaaaagacatttattcttttgatgcacttgaatgccagagaactgtccttctttttctcctctccctccctcccagcccctgagtcatgaacagcaaggagtgtttgaagtttctgctttgaactccgtccagcctgatccctggcctgagcaacttcacaacagtaattgcactttaagacagcctagagttctggacgagcgtgtttggtagcagggatgaaagctagggcctcttatttttttctcttaattattattatatttctgagttaaacttagaagaaacaactatcaagctacaacttttcctgccattttcctgtggttgcagcctgtcttcctttgaaattgttttactctctgagttttatatgctggaatccaatgcagagttggtttgggactgtgatcaagacaccttttattaataaagaagagacacaggtgtagatatgtatatacaaaaagatgtacggtctggccaaaccaccttcccagcctttatgcaaaaaaaggggagaatcaaagctttcatttcagaaatgttgcgtggaaaagtatctgtaattaaagtttcgaagtaatttaacctaaaaaa

SEQ ID NO: 70738 - DNA, 1238 bp, Homo Sapiens
ttctagcctgtcctaaagtgccatgactgttgtgaagttgctctagcccaggcatcaggctggacggagctcatagcaggtacttcaacactcctagctgttcatgactcagggcctgggagggatggaagaggttagaaaagaaggacagttctctggcattcaagtgcatcaaaagaataaatgtcttttcttttggtaaagcaaatctgtccaatagtaaggaatcctggctttggaaaaatagaactttctaaaacttctatctgcggatgttccaatgcagcagagggacaaggcaggcaagtgcagccagcagcagggaccaggtgtgcctcccaggggcccggccatacaggctgcttccactgtcttctgcgaggtcctctgccctcggcgaagaggaggcacactggaccaagggcatctggtaggacgtggctctcttctctggcctgtctgggctggacccgtcgctgggcctctgaccgttgaacagcagatagcgcccccgggcatcctgttccattttgaagatctcgtactccgtgtgaggtagtttgatgcccagggccacgcagccattggtgtgggtcacatcctgctggatgcccaacctgccaggagccctcggccccgcactcattcccgttgaagacgttgagcagtgaggctgtggccgcatccatgggggtgaccttcatgtgattcactttgaacacgaactcggtgcctcccatgaccctggacgagaggacgccgcggctgtagcggccccgggcgtagatggagaaggtggggtgcttgcacaccgggtctgagtagtggtagtagtggccctcccaggtgttgttgttgtcatggaagatgaagtggcgggtgaggaagaggacttcggggcgcacctcacagcgctggctcacccactccccgtgcaggccgatggtcaggtctgcctttgggggcaggatgggagggtggtgctcgtctgaccgatagatgatccgacaggcgatgcaggcatggtcgtggttcgtgaagcaggagggccgggaacaggtatctgagcaggaggcggcgcggccaggacatttccagtcctgctctgggccctcccgcacgccgcgctccgatttggtgcccgggcaactgggcgcgcgctctgccctccgcctccggccgggtgcggccgggccaggccggggcttcaggcggctgccgcgcgccccatgcccggc

SEQ ID NO: 70739 - DNA, 812 bp, Homo Sapiens
aagctagtacgagactgggtttaaatcggcacgaggaggttgcgggtaggaagggcggactgcgcgcgccccctgcgtcccgcgcacctcggggccggtccatgctcccgacggctgcgggcttcagcatctggggccaggttggggcggcggggtccaggccgcaggtggtgcggccgatgcgccgggccggaggctgaggccgcgctgcggggctgggacagcactggcatctccagagcaggcccggggcagcaagggaggcgccgcgatgccagacgaaaatatcttcctgttcgtgcccaacctcatcggaacccggtttggggccatgctggacatgctgacggaccgctgctccaccatgtgcctgttggtcaacctggccctgctgtaccctggagccacgctgttcttccaaatcagcatgagtttggatgtggccagtcactggctgcacctccacagttctgtggtccgaggcagtgagagtcacaagatgatcgacttgtccgggaatccggtgcttcggatctactaaacctcgaggccctgctctgttcaccttgtgtgctgggaatgaactcctctactgcctcctctacctggtcccatttctctgagggacctttagttggctctgtgggactgttccggatgggcctctgggtcactgcccccatcgccttgctgaagtcgctcatcagcgtcatccacctgatcacggcgcccgcaacatggctgcctggacgcagcagaccgcgcaagaagaagtgacgctggagcccgggtctggtgcccactgcctggga

SEQ ID NO: 70740 - DNA, 926 bp, Homo Sapiens
ggctaggtacgaggcctgggtgttaaattcggcacgaggacgacgggcgcggaggaggaggttcccggaagccacgcgcagctggagcagcggcgaccgcagctggaggcccggagcgcctgcggggctggcagaggcgagggaggttgcgggtaggaagggcggactgcgcgcgccccctgcgtcccgcgcacctcggggccggtccatgctcccgacggctgcgggcttcagcatctggggccaggttggggcggcggggtccagggcgcaggtggtgcggccgatgcgccgggccggaggctgaggccgcgctgcggggctgggacagcactggcatctccagagcaggcccggggcagcaagggaggcgccgcgatgccagacgaaaatatcttcctgttcgtgcccaacctcatcgcggcctgctggacgctttcgatggacacgctgctcgcgctcttaatcaaggaacccggtttggggccatgctggacatgctgacggaccgctgctccaccatgtgcctgttggtcaacctggccctgctgtaccctggagccacgctgttcttccaaatcagcatgagtttggatgtggccagtcactggctgcacctccacagttctgtggtccgaggcagtgagagtcacaagatgatcgacttgtccgggaatccggtgcttcggatctactacacctcgaggcctgctctgttcaccttgtgtgctgggaatgagctcttctactgcctcctctacctgttccatttctctgagggacctttagttggctctgtgggactgttccggatgggcctctgggtcaactgccccatcgccttgctgaagtcgctcatcagcgtcatccacctgatcaaggcgcccgaacatggtgccggaagcagcagaccggccagaacaatg

SEQ ID NO: 70741 - DNA, 1898 bp, Homo Sapiens
aaggccagtaactctaacggttctaaggtagcgaggcctgggtggcgaattcggcacgaggcctctctccaattttgcaacgacgggcgcggaggaggaggttcccggaagccacgcgcagctggagcagcggcgaccgcagctggaggcccggagcgcctgcggggctggcagaggcgagggaggttgcgggtaggaagggcggactgcgcgcgccccctgcgtcccgcgcacctcggggccggtccatgctcccgacggctgcgggcttcagcatctggggccaggttggggcggcggggtccagggcgcaggtggtgcggccgatgcgccgggccggaggctgaggccgcgctgcggggctgggacagcactggcatctccagagcaggcccggggcagcaagggaggcgccgcgatgccagacgaaaatatcttcctgttcgtgcccaacctcatcggttatgcccggattgtcttcgccatcatttctttctacttcatgccctgctgccccctcacggcctcctccttctacctgctcagcggcctgctggacgctttcgatggacacgctgctcgcgctcttaatcaaggaacccggtttggggccatgctggacatgctgacggaccgctgctccaccatgtgcctgttggtcaacctggccctgctgtaccctggagccacgctgttcttccaaatcagcatgagtttggatgtggccagtcactggctgcacctccacagttctgtggtccgaggcagtgagagtcacaagatgatcgacttgtccgggaatccggtgcttcggatctactacacctcgaggcctgctctgttcaccttgtgtgctgggaatgagctcttctactgcctcctctacctgttccatttctctgagggacctttagttggctctgtgggactgttccggatgggcctctgggtcactgcccccatcgccttgctgaagtcgctcatcagcgtcatccacctgatcacggccgcccgcaacatggctgccctggacgcagcagaccgcgccaagaagaagtgacgctggagccccgggtcctggctgcccacctgccctgggagtcttgctgtgccacacagctccccaccccctgctaggaggtcccagtctcacgccttcctcatgtgttgttctacctgctgggatgggggtcagcctctctttggtgacgtcacgttctctgggatcctgaggacccgggcctcaaatcagggaggatacgcgggaggccccctccatccaggcggtgctcctggggtgccgggaccgggcagtgtcacaccctgcctgctcagtcctggggtccgagatgctagggacgcttgagtgagggaggtggtgtgagggccaggtttcctgaaaggcgggagtcagacctccgcccccagccagagcaagcttggggcaccatgcccaggagggaagaagccatccacagccttccctgtcaccggctcctctgtcctgcctaccctggtcctggcgggacttcactatttgacttggtttcctttcagatattcttggctcagggcctgggttgagggagcttagggaaggacgtccgtctgggtgcttttcctccagtttgctggctggcttctccgtctacccacagtgacctcacagagaggccctcctgccacccatgctcatgtggtgtccccaccgcccacttgtttgatgtcactgactgtctacatgtatttatattcttgatattttctaccctcactagaatgtaaactccatgaaggcacagacttttcttgttctcttctctatccctagagtaagaccaacttgaacctggcatatagtagctgcttaataaatactcgtctgtcaatgaaaaaaa

SEQ ID NO: 70742 - DNA, 170 bp, Homo Sapiens
gcggccgcctactactactatacggctgcgagaagacgacagaagggaataagatgtgtctcctttccctggcttatttcatcctggtcttggggtatggtgctagctatggtaagggaaagggacctttccgaaaaacatcttttggggaaataaaaatgtggactgca

SEQ ID NO: 70743 - DNA, 2622 bp, Homo Sapiens
  misc_feature (689)..(689): n is a, c, g, or t
  misc_feature (2112)..(2236): n is a, c, g, or t
  misc_feature (2244)..(2257): n is a, c, g, or t
  misc_feature (2282)..(2471): n is a, c, g, or t
  misc_feature (2504)..(2513): n is a, c, g, or t
  misc_feature (2530)..(2538): n is a, c, g, or t
aattgtgactataaccagttgttacaaaaagcaggctggtacggtcggaatcccgggatatcgtcgacccacgcgtcgatgtggaaaggagccaggttcggtcagcagcccaacagtctacctggcgagatttggcaggaagctccgcctcctgagtggctacctgtggcctcgagggagtccagctctgcagctggtggtgctcatctgcctggggctcatgggtttggaacgggcactcaatgtgttggtgcctatattctataggaacattgtgaacttgctgactgagaaggcaccttggaactctctggcctggactgttaccagttacgtcttcctcaagttcctccaggggggtggcactggcagtacaggcttcgtgagcaacctgcgcaccttcctgtggatccgggtgcagcagttcacgtctcggcgggtggagctgctcatcttctcccacctgcacgagctctcactgcgctggcacctggggcgccgcacaggggaggtgctgcggatcgcggatcggggcacatccagtgtcacagggctgctcagctacctggtgttcaatgtcatccccacgctggccgacatcatcattggcatcatctacttcagcatgttcttcaacgcctggtttggcctcattgtgttcctgtgcatgagtctttacctcaccctgnaccattgtggtcactgagtggagaaccaagtttcgtcgtgctatgaacacacaggagaacgctacccggggcacgagcaggtggactctctgctaaaactttcgagacggtgaagtattacaacgccgagagttaccgaagtggaacgctatcgagaggccatcatcaaatatcagggtttggagtggaagtcgagcgcttcactggttttactaaatcagacccagaacctggtgattgggctcgggctcctcgccggctccctgctttgcgcatactttgtcactgagcagaagctacaggttggggactatgtgctctttggcacctacattatccagctgtacatgcccctcaattggtttggcacctactacaggatgatccagaccaacttcattgacatggagaacatgtttgacttgctgaaagacgagacagaagcgaaggaccttcctggagcagggccccttcgctttcagaagggccgtattgagtttgagaacgtgcacttcagctatgccgatgggcgggagactctgcaggacgtgtctttcactgtgatgcctggacagacacttgccctggtgggcccatctggggcagggaagagcacaattttgcgcctgctgtttcgcttctacgacatcagctctggctgcatccgaatagatgggcaggacatttcacaggtgacccaggcctctctccggtctcacattggagttgtgccccaagacactgtcctctttaatgacaccatcgccgacaatatccgttacggccgtgtcacagctgggaatgatgaggtggaggctgctgctcaggctgcaggcatccatgatgccattatggctttccctgaagggtacaggacacaggtgggcgagcggggactgaagctgagcggcggggagaagcagcgcgtcgccattgcccgcaccatcctcaaggctccgggcatcattctgctggatgaggcaacgtcagcgctggatacatctaatgagagggccatccaggcttctctggccaaagtctgtgccaaccgcaccaccatcgtagtggcacacaggctctcaactgtggtcaatgctgaccagatcctcgtcatcaaggatggctgcatcgtggagaggggacgacacgaggctctgttgtcccgaggtggggtgtatgctgacatgtggcagctgcagcagggacaggaagaaacctctgaagacactaagcctcagaccatggaacggtgacaaaagtttggccacttccctctcaaagactaacccagaagggaataagatgtgtctcctttccctggcttatttcatcctggtcttggggtatggtgctagctatggtaagggaaagggacctttccgaaaaacatcttttggggaaataaaaatgtggactgtgaaannnnnnnnnnnnnnnnnnnnnnnnnnnnnnnnnnnnnnnnnnnnnnnnnnnnnnnnnnnnnnnnnnnnnnnnnnnnnnnnnnnnnnnnnnnnnnnnnnnnnnnnnnnnnnnnnnnnnnnnnnnnnttgggggnnnnnnnnnnnnnnaaaaattttttaaaacctttttttnnnnnnnnnnnnnnnnnnnnnnnnnnnnnnnnnnnnnnnnnnnnnnnnnnnnnnnnnnnnnnnnnnnnnnnnnnnnnnnnnnnnnnnnnnnnnnnnnnnnnnnnnnnnnnnnnnnnnnnnnnnnnnnnnnnnnnnnnnnnnnnnnnnnnnnnnnnnnnnnnnnnnnnnnnnnnnnnnnnnnnnnnnnnnnaatttagcccccgccggggcctttttgggaaannnnnnnnnnaatttaaaaaacctttnnnnnnnnnttgggaaccgcccccccaacggggggtgggaaagaccctgaaaccccccgcgggggttataccacacctttttgcccccttggg

SEQ ID NO: 70744 - DNA, 1685 bp, Homo Sapiens
  misc_feature (56)..(86): n is a, c, g, or t
cacattttcaccaagcaggcttagaaagacctactcgaaaaaaatatttgcggccnnnnnnnnnnnnnnnnnnnnnnnnnnnnnnntaaaaaacaattttcttgaagaatccgattttgtgcatagtaatgacacagcaccattcctgagaaataggaaatatatgtgtgtggtatgaaaagcccatattctgttcttgtcacctgaatctaggcttcctctttggatgtgaacgcgggaatgaacagtggctgttttccacccaaaggggcgtggagaccttttggaaacgggctttctcctttccattttgcagccgggggcgggtggaaaccttccttcgaagggtagtgccttggggagcagcagacctgctctgagtccagcttagctttccaaaattctgtgtggaacttactggagatgtttttatatatttgaaaataatggcctgtatttctcacgctatacttaaaaaaaataactaaccttttaaacaaagatattcaaactcacccttgtgctgaaagcactcacatttctgtgttcattcctgaaagggcgttttagagtccccgtttctacgttctatgtggcaccctcttgccgagggaacatccagaatccctccacttcctgtctagtttgaggcctcaacaccttcatgatccagagtcctgcggctatgagggggtgggcccaccaccgcccagccctccttggtggacgtggggacaggttttgctgagaaacgggagtgcgttctgtgtcggtgtttgtgacgccctgagaccctgcttggcctagctaaagtccagaaggcctgggccccacagggcttggatgagggctcatgggcctgtacttcaggaggcctgagaggcccggtcagtcccatgaggctactcggcttggcccgcaggtcctccgaggcacagggcagagggacaccccagggacccatcagactcacgacacagagaaactcaagtggggtgccagggccggccacagaggccacgggcttcctgcctgtgacgagccgccctgtttgtctgagccctttggagatttaggttgagtcatgagaaccggtcattggaacatacactttattatgttacaaaaacaaaaatccccactgaaacacagctaaaaaaataacacattttcccaagattacattaccaaaaacagttgttatgtcattggagggcgtccattaatactgctcggagaagcacgatcttacacgaaaaacacggatgggatttcgttttcaccttaaagcattaaagtgctttaactggtaacagaggagtggatgtttgtgcgttggagacactgactgttctgagtgacaagtggctctgtgccaggatactgcgggtcgggctcctgggtacagcaagggcttcccagcagcccaggcctggtgggaacgctgggggaatgggggagagtcgctgtttctgaccagagcgacttggacagatgtgagctgacctgcctggcgagctccttctgccttgcctctctgagcagactcaggaccactgcctgtcccccttggccccaggagtgccagcagcctccctccaacccctgcactgctgggaaaaccatccgccttcaagatttatttgttgatttgtttagttttataaaaacatatcacttaaagg

SEQ ID NO: 70745 - DNA, 773 bp, Homo Sapiens
  misc_feature (694)..(708): n is a, c, g, or t
gggaatgtattatatattggtgcagccattatggaagacagtatggaggttcctaagtaaattaaaaatagaactaccatatgacccagcaatccctcttctgggtatatccccaaagagaatgagattatctctgcactcccaagtttattgcagcacaattcacaatagtcaagatacagacacaacctaggtgttcatcaatgggcaaatggataaagaaactgtgatatagagagatcaatagatagataattagaatattatttagcctttaaaaagaaggcagtcctgtcatttgccaaaacatggatagacctagaagacattatgctaaatgaaataagccagacacagaaagaaaaatattgcgtgatctcacttatatgtggaatcaagaaaaaaaaggttaaatatatagagatagagaataaaacagtaattactaaggtcaggataaggtggaggaaatgagatgtaggtcaaaggatgcaaagtagtaaatatgcaggatgaacaagtgaaaagatcaaagatcaaatgtacaacatgaggactatagttaatacatattgtatattgtgttcaggactttttgctaaatgagtagattatacctgctcttgccaatgggggaataatcagtaactatgtgagatgatgggtatgttcattgttccactatagttttacnnnnnnnnnnnnnnngtttcatttaacattgtgttgtataccttaatatagacaataaaatttatttaaaacataaaaaa

SEQ ID NO: 70746 - DNA, 740 bp, Homo Sapiens
  misc_feature (50)..(50): n is a, c, g, or t
  misc_feature (410)..(440): n is a, c, g, or t
aggatggagcaagctcttcccttgctcatgagctcctgatcagagcattngagcagctgaataacctgcacaggcttgctgtatgacccctggccacagccttccctctgcattgacctggaggggagaggtcagccttgacctaatgaggtagctatagttgcagcccaaggacagttcagagatcaggatcagctttgaaggctggattctatctacataagtcctttcaattccaccagggccagagcagctccaccactgtgcacttagccatgatggcaacagaaaccaagagacacaattacgcaggtatttagaagcagagggacaaccagaaggcccttaactatcaccagtgcatcacatctgcacactctcttctccattccctagcaggaacttctagnnnnnnnnnnnnnnnnnnnnnnnnnnnnnnncggtttcagctagacaatgatttggccaggcctagtaaccaaggccctgtctctggctactccctggaccacgaggctgattcctctcatttccagcttctcagtttctgcctgggcaatggccaggggccaggagtggggagagttgtgatggaggggagaggggtcacacccaccccctgcctggttctaggctgctgcacaccaaggccctgcatctgtctgctctgcatatatgtctctttggagttggaatttcattatatgttaagaaaataaaggaaaatgacttgtaaggtc

SEQ ID NO: 70747 - DNA, 1003 bp, Homo Sapiens
  misc_feature (63)..(93): n is a, c, g, or t
  misc_feature (397)..(464): n is a, c, g, or t
  misc_feature (753)..(761): n is a, c, g, or t
aactatcaccagtgcatcacatctgcacactctcttctccattccctagcaggaacttctagnnnnnnnnnnnnnnnnnnnnnnnnnnnnnnncggtttcagctagacaatgatttggccaggcctagtaaccaaggccctgtctctggctactccctggaccacgaggctgattcctctcatttccagcttctcagtttctgcctgggcaatggccaggggccaggagtggggagagttgtgatggaggggagaggggtcacacccaccccctgcctggttctaggctgctgcacaccaaggccctgcatctgtctgctctgcatatatgtctctttggagttggaatttcattatatgttaagaaaataaaggaaaatgacttgtaaggtcaagnnnnnnnnnnnnnnnnnnnnnnnnnnnnnnnnnnnnnnnnnnnnnnnnnnnnnnnnnnnnnnnnnnnngacaggggggcggcgcgcgcgccaaagatattatcctccccgcgcgggggcgccccacatcttagcgcgcgccccccaccttttctgggagagaaaagaggggggccccacataatagagggagcgcagacaatataatacaaccgacgccgacggtgcgggcgaggcggtgataaacaaacaggatacaaagcgagaggaacacaaagcggacaagagagaagcaacaccagtgggaggaagcagccacccacatagggaggaggggggagaagacaacccaaacgannnnnnnnnacacaaaacgacacgcccaccgagcagaagtaatatcagaagcgccccccccgagagagggcacagcaatatcaagacaatcccctgcaagggaggcagaaacgaaaagggggcggtacacacaccacaacagagcacaaacagacagaagccgcggacgcaggaagagaagaaatacgtgggccacccaacgcggcgagagcagcgatatgcagcagaaacacaatatattcccaccgggg

SEQ ID NO: 70748 - DNA, 345 bp, Homo Sapiens
  misc_feature (216)..(224): n is a, c, g, or t
caggaacttctagctcatttaacagataaagaaactgaggcccccggtttcagctagacaatgatttggccaggcctagtaaccaaggccctgtctctggctactccctggaccacgaggctgattcctctcatttccagcttctcagtttctgcctgggcaatggccaggggccaggagtggggaaagttgtgatggaggggaaaggggtcacannnnnnnnntgcctggttttaggctgctgcacaccaaggccctgcatctgtctgctctgcatatatgtctctttggagttggaatttcattatatgttaagaaaataaaggaaaatgacttgtaaggtcc

SEQ ID NO: 70749 - DNA, 963 bp, Homo Sapiens
cttctctcaggatacatcattcactctttggggacgtgaagaagctcatcactgatgagtttgtgaagcagaagtacctggactatgccagagtccccaatagcaatccccctgaatatgagttcttctggggcctgcgctcttactatgagaccagcaagatgaaagtcctcaagtttgcctgcaaggtacaaaagaaggatcccaaggaatgggcagctcagtaccgagaggcgatggaagcggatttgaaggctgcagctgaggctgcagctgaagccaaggctagggccgagattagagctcgaatgggcattgggctcggctcggagaatgctgccgggccctgcaactgggacgaagctgatatcggaccctgggccaaagcccggatccaggcgggagcagaagctaaagccaaagcccaagagagtggcagtgccagcactggtgccagtaccagtaccaataacagtgccagtgccagtgccagcaccagtggtggcttcagtgctggtgccagcctgaccgccactctcacatttgggctcttcgctggccttggtggagctggtgccagcaccagtggcagctctggtgcctgtggtttctcctacaagtgagattttagatattgttaatcctgccagtctttctcttcaagccagggtgcatcctcagaaacctactcaacacagcactctaggcagccactatcaatcaattgaagttgacactctgcattaaatctatttgccatttctattcctttctgtttgctggatgtcaattgacccttttattttctcttacttgtgttttcagatattgttaatcctgccagtctttctcttcaagccagggtgcatcctcagaaacctactcaacacagcactctaggcagccactatcaatcaattgaagttgacactctgcattaaatctatttgccatttctgaaaa

SEQ ID NO: 70750 - DNA, 1116 bp, Homo Sapiens
gctggtaccggtccggaattcccgggatatcgtcgacccacgcgtccgcggacgcgtgggcgctggcacatcttcctggagaaggggagggtgcggctgcagagaattgagacttagaagctttgaattcctgtatctgagaacggagtcgttgggggtggtggagggggttggaattggggacctacggaaggctcagctcttgccaggccaaattgagacatgtctgacacaagcgagagtggtgcaggtctaactcgcttccaggctgaagcttcagaaaaggacagtagctcgatgatgcagactctgttgacagtgacccagaatgtggaggtcccagagacaccgaaggcctcaaaggcactggaggtctcagaggatgtgaaggtctcaaaagcctctggggtctcaaaggccacagaggtctcaaagaccccagaggctcgggaggcacctgccacccaggcctcgtctactactcagctgactgatacccaggttctggcagctgaaaacaagagtctagcagctgacaccaagaaacagaatgctgacccgcaggctgtgacaatgcctgccactgagaccaaaaaggtcagccatgtggctgatacgaaggtcaatacaaaggctcaggagactgaggctgcaccctctcaggccccagcagatgaacctgagcctgagagtgcagctgcccagtctcaggagaatcaggatactcggcccaaggtcaaagccaagaaaacccgaaaggtgaagcatctggaagggggaaaaggatgggcaccagtgatcagagtcaagccttctgggaaccacaggtggcccgaaagggtctcaaaaggccctaatgggcctcaatgggccgcaagggccttcaagggggctcccactagccctttctgggcccccccagggccattcaggggacctcgggtgggctgcctttggggcccccgaaaacccttggctccttccctgaagaatcacccctaagggcccgcataggggggccaagggttccccccgctaaaaaaccttccccaagctctccacggcatctctccaaaaaagcctctgaaaaccccccacccaccctccgggggaggg

SEQ ID NO: 70751 - DNA, 1896 bp, Homo Sapiens
gctaggtacgaggccgggtgttaatcggcacgaggccgagtttcggaggggcttggagtgagtggacgcactcgggaattgtaggaggacgaggctcagctcttgccaggccaaattgagacatgtctgacacaagcgagagtggtgcaggtctaactcgcttccaggctgaagcttcagaaaaggacagtagctcgatgatgcagactctgttgacagtgacccagaatgtggaggtcccagagacaccgaaggcctcaaaggcactggaggtctcagaggatgtgaaggtctcaaaagcctctggggtctcaaaggccacagaggtctcaaagaccccagaggctcgggaggcacctgccacccaggcctcatctactactcagctgactgatacccaggttctggcagctgaaaacaagagtctagcagctgacaccaagaaacagaatgctgacccgcaggctgtgacaatgcctgccactgagaccaaaaaggtcagccatgtggctgatacaaaggtcaatacaaaggctcaggagactgaggctgcaccctctcaggccccagcagatgaacctgagcctgagagtgcagctgcccagtctcaggagaatcaggatactcggcccaaggtcaaagccaagaaagcccgaaaggtgaagcatctggatggggaagaggatggcagcagtgatcagagtcaggcttctggaaccacaggtggccgaagggtctcaaaggccctaatggcctcaatggcccgcagggcttcaaggggtcccatagccttttgggcccgcagggcatcaaggactcggttggctgcttgggcccggagagccttgctctccctgagatcacctaaagcccgtaggggcaaggctcgccgtagagctgccaagctccagtcatcccaagagcctgaagcaccaccacctcgggatgtggcccttttgcaagggagggcaaatgatttggtgaagtaccttttggctaaagaccagacgaagattcccatcaagcgctcggacatgctgaaggacatcatcaaagaatacactgatgtgtaccccgaaatcattgaacgagcaggctattctttggagaaggtatttgggattcaattgaaggaaattgataagaatgacccacttgtacattcttctcagcaccttagagcccactgatgcaggcatactgggaacgactaaggactcacccaagctgggtctgctcatggtgcttcttagcatcatcttcatgaatggaaatcggtccagtgaggctgtcatctgggaggtgctgcgcaagttggggctgcgccctgagatacatcattcactctttggggacgtgaagaagctcatcactgatgagtttgtgaagcagaagtacctggactatgccagagtccccaaatagcaatcccccctgaatatgagttcttctggggccctgcgctccttacctatgagacccagcaagatgaaagtccctccaaggttttgccctgcaagggtacaaaaaagaaaggaatccccaaaggaaaatggggccagccttcagttaaccccacacagggccaaacggaaacgcaaatatatttggaaagggctggccagcctggaacggcattggcaagccttgcaaacccaaaagggcttacgggtcccgcaagaattaaaaaaccctcgcaaatgggggcaaatttggggggtctcgcgccctccgggcaaaaaatgcctggccccggggcccctctgccatactggggaaaccgaaaactttgataattccggacacccctggggagccaaaaaaggcccggggaatctccagggcggggtgtagaccagaaaagccttaaaaaggcctaaaagacccccaaggtaa

SEQ ID NO: 70752 - DNA, 1062 bp, Homo Sapiens
  misc_feature (941)..(953): n is a, c, g, or t
cctacaaccgcatcagtctaggtacgagcctgggtggcgatttcggcacgaggggcagacgcatcccgaactcgctggaggacaaggctcagctcttgccaggccaaattgagacatgtctgacacaagcgagagtggtgcaggtctaactcgcttccaggctgaagcttcagaaaaggacagtagctcgatgatgcagactctgttgacagtgacccagaatgtggaggtcccagagacaccgaaggcctcaaaggcactggaggtctcagaggatgtgaaggtctcaaaagcctctggggtctcaaaggccacagaggtctcaaagaccccagaggctcgggaggcacctgccacccaggcctcatctactactcagctgactgatacccaggttctggcagctgaaaacaagagtctagcagctgacaccaagaaacagaatgctgacccgcaggctgtgacaatgcctgccactgagaccaaaaaggtcagccatgtggctgatacaaaggtcaatacaaaggctcaggagactgaggctgcaccctctcaggccccagcagatgaacctgagcctgagagtgcagctgcccagtctcaggagaatcaggatactcggcccaaggtcaaagccaagaaagcccgaaaggtgaagcatctggatggggaagaggatggcagcagtgatcagagtcaggcttctgtgaacacaggtggccgaagggtctcaaaggccctaatggcctcaatggcccgcagggcttcaaggggtcccatacgcttttggggcccgcagggcattcagggactccggtgggctggtttgggccccggaaaagccttggccctcccttgagatcacctaaaagccccgaagggggcaagggttcgcccgaaaaagctggccaagctcccggtcattcccaaaaccctggaannnnnnnnnnnnngggggtggtggccctttttgccgggggagggccaatgggtttggggcgaccccctttgggcctcaagacccgacgaagagtccccttcgcagcgctcgggaaggtgggg

SEQ ID NO: 70753 - DNA, 446 bp, Homo Sapiens
  misc_feature (48)..(48): n is a, c, g, or t
  misc_feature (408)..(408): n is a, c, g, or t
  misc_feature (424)..(424): n is a, c, g, or t
tccgagtgaggcgacggggtaggggttggcgctcaggcggcgaccatngcgtatcacggcctcactgtgcctctcattgtgatgagcgtgttctggggcttcgtcggcttcttggtgccttggttcatccctaagggtcctaaccggggagttatcattaccatgttggtgacctgttcagtttgctgctatctcttttggctgattgcaattctggcccaactcaaccctctctttggaccgcaattgaaaaatgaaaccatctggtatctgaagtatcattggccttgaggaagaagacatgctctacagtgctcagtctttgaggtcacgagaagagaatgccttctagatgcaaaatcacctccaaaccagaccactttcttgacttgcctgttttggcattantgcttaaacgttacanacatttgaatgcttatctacaa

SEQ ID NO: 70754 - DNA, 185 bp, Homo Sapiens
atagcggccgcctactactactatacggctgcgagaagacgacagaaggggtggtcagtaggagagcacgttcagagggaagagccatctcaacagaatcgcaccaaactatactttcaggatgaatttcttctttctgccatcttttggaataaatattttcctcctttctatggaaatctggc

SEQ ID NO: 70755 - DNA, 879 bp, Homo Sapiens
ggggcacacgctggtcacgcggtcagctattgacacttcctggtgggatccgagtgaggcgacggggtaggggttggcgctcaggcggcgaccatggcgtatcacggcctcactgtgcctctcattgtgatgagcgtgttctggggcttcgtcggcttcttggtgccttggttcatccctaagggtcctaaccggggagttatcattaccatgttggtgacctgttcagtttgctgctatctcttttggctgattgcaattctggcccaactcaaccctctctttggaccgcaattgaaaaatgaaaccatctggtatctgaagtatcattggccttgaggaagaagacatgctctacagtgctcagtctttgaggtcacgagaagagaatgccttctagatgcaaaatcacctccaaaccagaccacttttcttgacttgcctgttttggccattagctgccttaaacgttaacagcacatttgaatgccttattctacaatgcagcgtgttttcctttgccttttttgcactttggtgaattacgtgcctccataacctgaactgtgccgactccacaaaacgattatgtactcttctgagatagaagatgctgttcttctgagagatacgttactctctccttggaatctgtggatttgaagatggctcctgccttctcacgtgggaatcagtgaagtgtttagaaactgctgcaagacaaacaagactccagtggggtggtcagtaggagagcacgttcagagggaagagccatctcaacagaatcgcaccaaactatactttcaggatgaatttcttctttctgccatcttttggaataaatattttcctcctttctatggaaatctgaaaaaa

SEQ ID NO: 70756 - DNA, 1008 bp, Homo Sapiens
tgattcgcggcgttttaataatcgctaacctcatcctatatgtcgtcacattgccgtgtgaaatttccaatgtagtgccgttccccattttatatgggcataggtgtgagatatcccatgggagaatcctggcttttccaacattcattgtgtccaatctccagtgtctgatcatggcgtaagaataagattgtaagttctttcccagttagttgatggaatcagatctattgaagtaaatgttcttctgcaagaagtatttactcagaatgtaccatcttgtttcctttcagtttattaaatggcatcataaagatgactttgctaagttaatagagttaaaaatttttttaatataagccaaaatattaactttaatgaaacattgacttggcaaatgaatttcctataaattatcattggtcagaatgctgttttgtttaataatattacgcaacataaaccataggtgttattagaagtggagaactgcctttttcatctggggcttttaaggacttgctataaatgattattttttaaatgctttataaatcttcatggtttttctatttctgatacactcagctatagttaataccagagtatcctaccaggagtaatatttggaatatttaaatctagtaaaagaagaaagttgtacttcctggctgggagtattaggagatgggagtagagattcacttttaagttcttgaaaatatatgcattctcctaaatattaaccaaaaatgattttggggaaatgacatggcttgattgttctgtgtaaatttgtactgtggcttatgttacacatgttcatgttcacctctcatgtcacctgttttatatggctcttaaaattctcatgtaacaaaattcagaaaattcacctgaaacgtattttgacctaaaagaaacatatttttgtatcagtattgaattttggacagtgcccccatataaggaagttactgttttaaaataaagcaaactaactgtttt

SEQ ID NO: 70757 - DNA, 846 bp, Homo Sapiens
  misc_feature (482)..(492): n is a, c, g, or t
  misc_feature (494)..(496): n is a, c, g, or t
  misc_feature (498)..(501): n is a, c, g, or t
  misc_feature (503)..(508): n is a, c, g, or t
  misc_feature (511)..(511): n is a, c, g, or t
  misc_feature (513)..(514): n is a, c, g, or t
  misc_feature (516)..(528): n is a, c, g, or t
  misc_feature (531)..(552): n is a, c, g, or t
  misc_feature (555)..(555): n is a, c, g, or t
  misc_feature (646)..(646): n is a, c, g, or t
  misc_feature (653)..(653): n is a, c, g, or t
  misc_feature (672)..(680): n is a, c, g, or t
aaacgtttttattacaaatattacattaaactaaagctcacaactgttactatgcatcaggaattaacagtcatttctcatttgtgttattctcctatttgataacatatagtgactatctctttatgggttaaatatcagtttcttggccagaattcaagatctgcccctaactaatcctacttctcccagtacccttacagcactcctaccctactagtaactctgatatctcatagtcctcagatttatcaagcaaacgaaactgaatgagcactactataaggtaccacaaactacaaaaggagacagttttgcccttgttgctttcagttaaattattgtgctattttttgcttaatttctaggttttttttgcgtgtttatcatgtctccgtaggtaaagtgggcagaaatctttttctactttacatttcctgtaagtgctgtttgtttgaataaagttaatgtgtgaggttaannnnnnnnnnngnnngnnnntnnnnnngtnanngnnnnnnnnnnnnnggnnnnnnnnnnnnnnnnnnnnnnagngggaaagaagaaggagaaggtggggggagagaaggatagagctttaaggtagcggagcgttggttttttgggagaaaaaagaggggagagntggggtntgttttggggcggcgccgnnnnnnnnnacacaaaaatatattttctcacaccccctttctgtgggggcgcgcgccggcccgccccgcaccagagaagagaaaaagtgggcccattacctatggtgtcgtcccccagaagaaaaaacccggcgcgggaccacaagaaagcacgcgggtcccgtcctaccccaca

SEQ ID NO: 70758 - DNA, 1975 bp, Homo Sapiens
  misc_feature (1761)..(1776): n is a, c, g, or t
  misc_feature (1804)..(1812): n is a, c, g, or t
tcggcgcttcccggcatgctccgctgcaggcccgcgcccgcgcccggactttgccatcggcggggcagtcgcgggatgcgcccgggagccacagcctgaggccctcaggtctctgcaggtgtcgtggaggaacctagcacctgccatcctcttccccaatttgccacttccagcagctttagcccatgaggaggatgtgaccgggactgagtcaggagccctctggaagcatggagactgtggtgattgttgccataggtgtgctggccaccatctttctggcttcgtttgcagccttggtgctggtttgcaggcagcgctactgccggccgcgagacctgctgcagcgctatgattctaagcccattgtggacctcattggtgccatggagacccagtctgagccctctgagttagaactggacgatgtcgttatcaccaacccccacattgaggccattctggagaatgaagactggatcgaagatgcctcgggtctcatgtcccactgcattgccatcttgaagatttgtcacactctgacagagaagcttgttgccatgacaatgggctctggggccaagatgaagacttcagccagtgtcagcgacatcattgtggtggccaagcggatcagccccagggtggatgatgttgtgaagtcgatgtaccctccgttggaccccaaactcctggacgcacggacgactgccctgctcctgtctgtcagtcacctggtgctggtgacaaggaatgcctgccatctgacgggaggcctggactggattgaccagtctctgtcggctgctgaggagcatttggaagtccttcgagaagcagccctagcttctgagccagataaaggcctcccaggccctgaaggcttcctgcaggagcagtctgcaatttagtgcctacaggccagcagctagccatgaaggcccctgccgccatccctggatggctcagcttagccttctactttttcctatagagttagttgttctccatggctggagagttcagctgtgtgtgcatagtaaagcaggagatccccgtcagtttatgcctcttttgcagttgcaaactgtggctggtgagtggcagtctaatactacagttaggggagatgccattcactctctgcaagaggagtattgaaaactggtggactgtcagctttatttagctcacctagtgttttcaagaaaattgagccaccgtctaagaaatcaagaggtttcacattaaaattagaatttctggcctctctcgatcggtcagaatgtgtggcaattctgatctgcattttcagaagaggacaatcaattgaaactaagtaggggtttcttcttttggcaagacttgtactctctcacctggcctgtttcatttatttgtattatctgcctggtccctgaggcgtctgggtctctcctctcccttgcaggtttgggtttgaagctgaggaactacaaagttgatgatttcttttttatctttatgcctgcaattttacctagctaccactaggtggatagtaaatttatacttatgtttccaaaaaccaatcctttccccctcaacactaacctcccctcacaccccccccatctttcgtcccagatggtgcgttcccccaccctccggccctcctatatcccatcactttaccatccccccaccgccccccacacatcgcaaaaatcccatcctccccccacaaccacgtacgcccaccaaaacttccctccttgcggnnnnnnnnnnnnnnnnaacaacatctcttaaaccacctttcgtnnnnnnnnncccaccctaataaaacactcccagtacctccccctattttctcccaaataaatacccgcccggccaccaaactttgtgcctccctcccaacaacataccaacccgcccctctgaggcacccccgctcgtttcaataaacacagccctcgcggttgcgcccccc

SEQ ID NO: 70759 - DNA, 772 bp, Homo Sapiens
tacggctaggtacgaggctgggtttgaatcggcacgaggctccaggcgtcggtgctcagcggtgttggaacttcgttgcttgcttgcctgtgcgcgcgtgcgcggacatggcctcaaacgattatacccaacaagcaacccaaagctatggggcctaccccacccagcccgggcagggctattcccagcagagcagtcagccctacggacagcagagttacagtggttatagccagtccacggacacttcaggctatggccagagcagctattcttcttatggccagagccagaacacaggctatggaactcagtcaactccccagggatatggctcgactggcggctatggcagtagccagagctcccaatcgtcttacgggcagcagtcctcctatcctggctatggccagcagccagctcccagcagcacctcgggaagttacggtagcagttctcagagcagcagctatgggcagccccagagtgggagctacagccagcagcctagctatggtggacagcagcaaagctatggacagcagcaaagctataatccccctcagggctatggacagcagaaccaggtacaaacagcagcagtggtggtggaggtggaggtggaggtggagggtaactatggcaagatcaatcctccatgagtaagggtggtggcagggtggcggttatggcaatcaagacagagtgtggaggtgcagcgggctatggcagcagacgggagcgcgcagggtgcaggagcggaacacaagtg

SEQ ID NO: 70760 - DNA, 1147 bp, Homo Sapiens
  misc_feature (114)..(133): n is a, c, g, or t
  misc_feature (638)..(700): n is a, c, g, or t
cgctaggtacgaaggccggggttaattcggcacgagggacagagtggtgtgaggtggcagcggtggctatggacagcaggaccgtggaggccgcggccaggcgtggcagtggtnnnnnnnnnnnnnnnnnnnntggtggttacaaccgcagcagtggtggctatgaacccagaggtcgtggaggtggccgtggaggcagaggtggcatgggcggaagtgaccgtggtggcttcaataaatttggtggccctcgggaccaaggatcacgtcatgactccgaacaggataattcagacaacaacaccatctttgtgcaaggcctgggtgagaatgttacaattgagtctgtggctgattacttcaagcagattggtattattaagacaaacaagaaaacgggacagcccatgattaatttgtacacagacagggaaactggcaagctgaagggagaggcaacggtctcttttgatgacccaccttcagctaaagcagctattgactggtttgatggtaaagaattctccggaaatcctatcaaggtctcatttgctactcgccgggcagactttaatcggggtggtggcaatggtcgtggaggccgagggcgaggaggacccatgggccgtggaggctannnnnnnnnnnnnnnnnnnnnnnnnnnnnnnnnnnnnnnnnnnnnnnnnnnnnnnnnnnnnnnaggacagcagcgagctggtgactggaagtgtcctaatcccacctgtgagaatatgaacttctcttggaggaatgaatgcaaccagtgtaaggccccctaaacagatggcccaggagggggaccaggtgggctctcacatgggggggtaactaccggggatggattcgccctggtgggccacaggagggctatgaatcgaggcggcttaccgggggccccggcgggggaccctgggaagctttccgaagggggaccggggttggtgggggcaacagaagtggccttttggccccctggcaaagatggcattcccaggggctgaagccccacaccgggatccccaggccagaaggccctaatttacttacccctggcctccccccgggttccgtggaaaaaaggttttctgggccctggtacccccatggggtacccctctctctacta

SEQ ID NO: 70761 - DNA, 1023 bp, Homo Sapiens
gctagctaggtacaggctgggtgttgaatcggcacgaggggcgtcggtgctcagcggtgttggaacttcgttgcttgcttgcctgtgcgcgcgtgcgcggacatggcctcaaacgattatacccaatcaagcaacccaaagctatggggcctaccccacccagcccgggcagggctattcccagcagagcagtcagccctacggacagcagagttacagtggttatagccagtccacggacacttcaggctatggccagagcagctattcttcttatggccagagccagaacacaggctatggaactcagtcaactccccaggaatatggctcgacgggcggcatatggcagtagccagagctcccaatcgtcttacgggcagcagtcctcctatcctggctatggccagcagccagctcccagcagcacctcgggaagttacggtagcagttctcagagcagcagctatgggcagccccagagtgggagctacagccagcagcctagctatggtggacagcagcaaagctatggacagcagcaaagctataatccccctcaggcctatggacagcagaaccagtacaacagcagcagtggtggtggaggtggaggtggaggtggcaggtaaactatggccaagatcaatcctccatgagtagtggtggtggcagtggtggcggttatggcaagtcaagaccagagtggtggaggtggcagcggtggctatggacagcagggaccgtggaaggccgcggcaggggtgccagtggtggcggcggaggacggcggcgggtggtggttaacaaccgcagcagtggtggttatgaacccagaggtcgtggagtggccgtgagcaaaggtgcatggctgaaagtgacggggtggcctcaataaattgggggccccgaacaagatacttggctccaacggtaatccgaaaccccttttggagccgggggagtaacagagtctggggacaccaccctgtgtttcaaacaaaagggccctattttcacggg
